United States Patent Application Publication US 2024/0327476 A1 - sequence listing, part 52

SEQ ID NO: 98035 - DNA, 393 bp, synthetic construct
  misc_feature 1..393: note = Description of Artificial Sequence: Synthetic coding sequence
  source 1..393: mol_type = other DNA
atgaccttcaccaccttcgacctgggcggccacgtgcaggccagaagagtgtggaagaactacctgcccgccatcaacggcatcgtgttcctggtggactgcgccgaccacgagagactgctggagagcaaggaggagctggacagcctgatgaccgacgagaccatcgccaacgtgcccatcctgatcctgggcaacaagatcgacagacccgaggccatcagcgaggagagactgagagagatgttcggcctgtacggccagaccaccggcaagggcagcatcagcctgaaggagctgaacgccagacccctggaggtgttcatgtgcagcgtgctgaagagacagggctacggcgagggcttcagatggatggcccagtacatcgactag

SEQ ID NO: 98036 - DNA, 597 bp, synthetic construct
  misc_feature 1..597: note = Description of Artificial Sequence: Synthetic coding sequence
  source 1..597: mol_type = other DNA
atgagcttcatcttcgactggatctacagcggcttcagcagcgtgctgcagttcctgggcctgtacaagaagaccggcaagctggtgttcctgggcctggacaacgccggcaagaccaccctgctgcacatgctgaaggacgacagactgggccagcacgtgcccaccctgcaccccaccagcgaggagctgaccatcgccggcatgaccttcaccaccttcgacctgggcggccacgtgcaggccagaagagtgtggaagaactacctgcccgccatcaacggcatcgtgttcctggtggactgcgccgaccacgagagactgctggagagcaaggaggagctggacagcctgatgaccgacgagaccatcgccaacgtgcccatcctgatcctgggcaacaagatcgacagacccgaggccatcagcgaggagagactgagagagatgttcggcctgtacggccagaccaccggcaagggcagcatcagcctgaaggagctgaacgccagacccctggaggtgttcatgtgcagcgtgctgaagagacagggctacggcgagggcttcagatggatggcccagtacatcgactag

SEQ ID NO: 98037 - DNA, 597 bp, synthetic construct; identical to SEQ ID NO: 98036
  misc_feature 1..597: note = Description of Artificial Sequence: Synthetic coding sequence
  source 1..597: mol_type = other DNA

SEQ ID NO: 98038 - DNA, 312 bp, synthetic construct
  misc_feature 1..312: note = Description of Artificial Sequence: Synthetic coding sequence
  source 1..312: mol_type = other DNA
atgagcttcatcttcgactggatctacagcggcttcagcagcgtgctgcagttcctgggcctgtacaagaagaccggcaagctggtgttcctgggcctggacaacgccggcaagaccaccctgctgcacatgctgaaggacgacagactgggccagcacgtgcccaccctgcaccccaccagcgaggagctgaccatcgccggcatgaccttcaccaccttcgacctgggcggccacgtgcaggccagaagagtgtggaagaactacctgcccgccatcaacggcatcgtgttcctggtggactgcgcctag

SEQ ID NO: 98039 - DNA, 393 bp, synthetic construct; identical to SEQ ID NO: 98035
  misc_feature 1..393: note = Description of Artificial Sequence: Synthetic coding sequence
  source 1..393: mol_type = other DNA

SEQ ID NO: 98040 - DNA, 513 bp, synthetic construct
  misc_feature 1..513: note = Description of Artificial Sequence: Synthetic coding sequence
  source 1..513: mol_type = other DNA
atgagcttcatcttcgactggatctacagcggcttcagcagcgtgctgcagttcctgggcctgtacaagaagaccggcaagctggtgttcctgggcctggacaacgccggcaagaccaccctgctgcacatgctgaaggacgacagactgggccagcacgtgcccaccctgcaccccaccagcgaggagctgaccatcgccggcatgaccttcaccaccttcgacctgggcggccacgtgcaggccagaagagtgtggaagaactacctgcccgccatcaacggcatcgtgttcctggtggactgcgccgaccacgagagactgctggagagcaaggaggagctggacagcctgatgaccgacgagaccatcgccaacgtgcccatcctgatcctgggcaacaagatcgacagacccgaggccatcagcgaggagagactgagagagatgttcggcctgtacggccagaccaccggcaagggcagcatcagcctgaaggagctgaacgcctag

SEQ ID NO: 98041 - DNA, 393 bp, synthetic construct; identical to SEQ ID NO: 98035
  misc_feature 1..393: note = Description of Artificial Sequence: Synthetic coding sequence
  source 1..393: mol_type = other DNA

SEQ ID NO: 98042 - DNA, 393 bp, synthetic construct; identical to SEQ ID NO: 98035
  misc_feature 1..393: note = Description of Artificial Sequence: Synthetic coding sequence
  source 1..393: mol_type = other DNA

SEQ ID NO: 98043 - DNA, 2796 bp, synthetic construct
  misc_feature 1..2796: note = Description of Artificial Sequence: Synthetic coding sequence
  source 1..2796: mol_type = other DNA
atgagagccctggtgctgctgggctgcctgctggccagcctgctgttcagcggccaggccgagctgcaggtgagcgccagcggcggcaccgaggacgtgggcaacctgctggagaaccacttcagcgccggcgacgccagcctggaggagaaggagagagccctgtacgccgacaccgccccccaggacaagaagctgctgctgcactaccccgacggcagagaggccgagagccccaagaagacccccgccagcgccgccagcgccggccccgaccccgaggccagcctgagcaacgccagcgccaccgagagccccccccccggcgagagagacgacagagacgccgccggccccggcgaggagaagaacggcccccccgtggccagcgccctgccccccggcggcgccaagggccccgtggaggaggagtggcccgagcccagcagcggcgagggccagggcgaggaggagaccggcttcggcctgcccaccgagggcaccgccagcggcgaggccggcggccaggccggcggccacgagctgcccgaggaggtgcaggaggtgcagggcgacagcctggtgcagggcgccgtggccggcaccgccgagcccaaggccgagggcgccagcccccacagcgagggcgacggcgtgggccccctgaacgccgaggccgagggcagccccggccccggcgaggagcccgccgtgcccgagggcgcccccgacgtggccgccgtgggcggcgagagcgagcccgacatcgacacccaggccagcgagggcaccgaggaccagggcgagcccggccccgccgccgaggccagcgccgagcccggcggcgcccagagcgtgaaggccggcgacaccgaggagaaccagagccccgagatgaccgaggaggacgccgacgaggccagcagcgaggaggagagcggcgacggcagcggcagcgaggaggagggcggcgtgcccagcgaggaggagagcgaggaggacagcggcgacggcgccagcagcgaggaggccgagggcgccagcgaggaggccaccgagccccaggaggccggcgagccccaggaggccagagagccccaggagggcggcgacctgcaggaggccgaggagagccaggagggcggcgacccccaggaggccgaggagccccaggagggcggcgccccccaggagggcggcgagccccaggagggcggcgacccccaggaggccagagagccccaggaggccagagagccccaggagggcgccgagctgcccgaggccaccggcaccaccagccacagagacagaggcgcccagcccggccccgaggagctgaacaccgagagcatgggcagcgagaccctggacatgaaggccgaggagcccgaggagggccaccagagagagagccccatcatcgtggcccaggaggagaccgaggacgccaacgaggaggcccccctgagagacagaagccacatcgagaagaccctgatgctgaacgaggacaagcccagcgacgactacagcgccgtgctgcagagactgagaaagatctaccacagcagcatcaagcccctggagcagagctacaagtacaacgagctgagacagcacgagatcaccgacggcgagatcaccagcaagcccatggtgctgttcctgggcccctggagcgtgggcaagagcaccatgatcaactacctgctgggcctggagaacaccagataccagctgtacaccggcgccgagcccaccaccagcgagttcaccgtgctgatgcacggccccaagctgaagaccatcgagggcatcgtgatggccgccgacagcgccagaagcttcagccccctggagaagttcggccagaacttcctggagaagctgatcggcatcgaggtgccccacaagctgctggagagagtgaccttcgtggacacccccggcatcatcgagaacagaaagcagcaggagagaggctaccccttcaacgacgtgtgccagtggttcatcgacagagccgacctgatcttcgtggtgttcgaccccaccaagctggacgtgggcctggagctggagatgctgttcagacagctgaagggcagagagagccagatcagaatcatcctgaacaaggccgacaacctggccacccagatgctgatgagagtgtacggcgccctgttctggagcctggcccccctgatcaacgtgaccgagccccccagagtgtacgtgagcagcttctggccccaggagtacaagcccgacacccaccaggagctgttcctgcaggaggagatcagcctgctggaggacctgaaccaggtgatcgagaacagactggagaacaagatcgccttcatcagacagcacgccatcagagtgagaatccacgccctgctggtggacagatacctgcagacctacaaggacaagatgaccttcttcagcgacggcgagctggtgttcaaggacatcgtggaggaccccgacaagttctacatcttcaagaccatcctggccaagaccaacgtgagcaagttcgacctgcccaacagagaggcctacaaggacttcttcggcatcaaccccatcagcagcttcaagctgctgagccagcagtgcagctacatgggcggctgcttcctggagaagatcgagagagccatcacccaggagctgcccggcctgctgggcagcctgggcctgggcaagaaccccggcgccctgaactgcgacaagaccggctgcagcgagacccccaagaacagatacagaaagcactag

SEQ ID NO: 98044 - DNA, 1422 bp, synthetic construct
  misc_feature 1..1422: note = Description of Artificial Sequence: Synthetic coding sequence
  source 1..1422: mol_type = other DNA
atgagagccctggtgctgctgggctgcctgctggccagcctgctgttcagcggccaggccgaggagaccgaggacgccaacgaggaggcccccctgagagacagaagccacatcgagaagaccctgatgctgaacgaggacaagcccagcgacgactacagcgccgtgctgcagagactgagaaagatctaccacagcagcatcaagcccctggagcagagctacaagtacaacgagctgagacagcacgagatcaccgacggcgagatcaccagcaagcccatggtgctgttcctgggcccctggagcgtgggcaagagcaccatgatcaactacctgctgggcctggagaacaccagataccagctgtacaccggcgccgagcccaccaccagcgagttcaccgtgctgatgcacggccccaagctgaagaccatcgagggcatcgtgatggccgccgacagcgccagaagcttcagccccctggagaagttcggccagaacttcctggagaagctgatcggcatcgaggtgccccacaagctgctggagagagtgaccttcgtggacacccccggcatcatcgagaacagaaagcagcaggagagaggctaccccttcaacgacgtgtgccagtggttcatcgacagagccgacctgatcttcgtggtgttcgaccccaccaagctggacgtgggcctggagctggagatgctgttcagacagctgaagggcagagagagccagatcagaatcatcctgaacaaggccgacaacctggccacccagatgctgatgagagtgtacggcgccctgttctggagcctggcccccctgatcaacgtgaccgagccccccagagtgtacgtgagcagcttctggccccaggagtacaagcccgacacccaccaggagctgttcctgcaggaggagatcagcctgctggaggacctgaaccaggtgatcgagaacagactggagaacaagatcgccttcatcagacagcacgccatcagagtgagaatccacgccctgctggtggacagatacctgcagacctacaaggacaagatgaccttcttcagcgacggcgagctggtgttcaaggacatcgtggaggaccccgacaagttctacatcttcaagaccatcctggccaagaccaacgtgagcaagttcgacctgcccaacagagaggcctacaaggacttcttcggcatcaaccccatcagcagcttcaagctgctgagccagcagtgcagctacatgggcggctgcttcctggagaagatcgagagagccatcacccaggagctgcccggcctgctgggcagcctgggcctgggcaagaaccccggcgccctgaactgcgacaagaccggctgcagcgagacccccaagaacagatacagaaagcactag

SEQ ID NO: 98045 - DNA, 1296 bp, synthetic construct
  misc_feature 1..1296: note = Description of Artificial Sequence: Synthetic coding sequence
  source 1..1296: mol_type = other DNA
atgctgaacgaggacaagcccagcgacgactacagcgccgtgctgcagagactgagaaagatctaccacagcagcatcaagcccctggagcagagctacaagtacaacgagctgagacagcacgagatcaccgacggcgagatcaccagcaagcccatggtgctgttcctgggcccctggagcgtgggcaagagcaccatgatcaactacctgctgggcctggagaacaccagataccagctgtacaccggcgccgagcccaccaccagcgagttcaccgtgctgatgcacggccccaagctgaagaccatcgagggcatcgtgatggccgccgacagcgccagaagcttcagccccctggagaagttcggccagaacttcctggagaagctgatcggcatcgaggtgccccacaagctgctggagagagtgaccttcgtggacacccccggcatcatcgagaacagaaagcagcaggagagaggctaccccttcaacgacgtgtgccagtggttcatcgacagagccgacctgatcttcgtggtgttcgaccccaccaagctggacgtgggcctggagctggagatgctgttcagacagctgaagggcagagagagccagatcagaatcatcctgaacaaggccgacaacctggccacccagatgctgatgagagtgtacggcgccctgttctggagcctggcccccctgatcaacgtgaccgagccccccagagtgtacgtgagcagcttctggccccaggagtacaagcccgacacccaccaggagctgttcctgcaggaggagatcagcctgctggaggacctgaaccaggtgatcgagaacagactggagaacaagatcgccttcatcagacagcacgccatcagagtgagaatccacgccctgctggtggacagatacctgcagacctacaaggacaagatgaccttcttcagcgacggcgagctggtgttcaaggacatcgtggaggaccccgacaagttctacatcttcaagaccatcctggccaagaccaacgtgagcaagttcgacctgcccaacagagaggcctacaaggacttcttcggcatcaaccccatcagcagcttcaagctgctgagccagcagtgcagctacatgggcggctgcttcctggagaagatcgagagagccatcacccaggagctgcccggcctgctgggcagcctgggcctgggcaagaaccccggcgccctgaactgcgacaagaccggctgcagcgagacccccaagaacagatacagaaagcactag

SEQ ID NO: 98046 - DNA, 1164 bp, synthetic construct
  misc_feature 1..1164: note = Description of Artificial Sequence: Synthetic coding sequence
  source 1..1164: mol_type = other DNA
atggccgagaccctgttctggacccccctgctggtggtgctgctggccggcctgggcgacaccgaggcccagcagaccaccctgcaccccctggtgggcagagtgttcgtgcacaccctggaccacgagaccttcctgagcctgcccgagcacgtggccgtgccccccgccgtgcacatcacctaccacgcccacctgcagggccaccccgacctgcccagatggctgagatacacccagagaagcccccaccaccccggcttcctgtacggcagcgccacccccgaggacagaggcctgcaggtgatcgaggtgaccgcctacaacagagacagcttcgacaccaccagacagagactggtgctggagatcggcgaccccgagggccccctgctgccctaccaggccgagttcctggtgagaagccacgacgccgaggaggtgctgcccagcacccccgccagcagattcctgagcgccctgggcggcctgtgggagcccggcgagctgcagctgctgaacgtgaccagcgccctggacagaggcggcagagtgcccctgcccatcgagggcagaaaggagggcgtgtacatcaaggtgggcagcgccagccccttcagcacctgcctgaagatggtggccagccccgacagccacgccagatgcgcccagggccagccccccctgctgagctgctacgacaccctggccccccacttcagagtggactggtgcaacgtgaccctggtggacaagagcgtgcccgagcccgccgacgaggtgcccacccccggcgacggcatcctggagcacgaccccttcttctgcccccccaccgaggcccccgacagagacttcctggtggacgccctggtgaccctgctggtgcccctgctggtggccctgctgctgaccctgctgctggcctacgtgatgtgctgcagaagagagggcagactgaagagagacctggccaccagcgacatccagatggtgcaccactgcaccatccacggcaacaccgaggagctgagacagatggccgccagcagagaggtgcccagacccctgagcaccctgcccatgttcaacgtgcacaccggcgagagactgccccccagagtggacagcgcccaggtgcccctgatcctggaccagcactag

SEQ ID NO: 98047 - DNA, 792 bp, synthetic construct
  misc_feature 1..792: note = Description of Artificial Sequence: Synthetic coding sequence
  source 1..792: mol_type = other DNA
atggccgagaccctgttctggacccccctgctggtggtgctgctggccggcctgggcgacaccgaggcccagcagaccaccctgcaccccctggtgggcagagtgttcgtgcacaccctggaccacgagaccttcctgagcctgcccgagcacgtggccgtgccccccgccgtgcacatcacctaccacgcccacctgcagggccaccccgacctgcccagatggctgagatacacccagagaagcccccaccaccccggcttcctgtacggcagcgccacccccgaggacagaggcctgcaggtgatcgaggtgaccgcctacaacagagacagcttcgacaccaccagacagagactggtgctggagatcggcgaccccgagggccccctgctgccctaccaggccgagttcctggtgagaagccacgacgccgaggaggtgctgcccagcacccccgccagcagattcctgagcgccctgggcggcctgtgggagcccggcgagctgcagctgctgaacgtgaccagcgccctggacagaggcggcagagtgcccctgcccatcgagggcagaaaggagggcctgaagagagacctggccaccagcgacatccagatggtgcaccactgcaccatccacggcaacaccgaggagctgagacagatggccgccagcagagaggtgcccagacccctgagcaccctgcccatgttcaacgtgcacaccggcgagagactgccccccagagtggacagcgcccaggtgcccctgatcctggaccagcactag

SEQ ID NO: 98048 - DNA, 537 bp, synthetic construct
  misc_feature 1..537: note = Description of Artificial Sequence: Synthetic coding sequence
  source 1..537: mol_type = other DNA
atgagcgtgaccgcctacaacagagacagcttcgacaccaccagacagagactggtgctggagatcggcgaccccgagggccccctgctgccctaccaggccgagttcctggtgagaagccacgacgccgaggaggtgctgcccagcacccccgccagcagattcctgagcgccctgggcggcctgtgggagcccggcgagctgcagctgctgaacgtgaccagcgccctggacagaggcggcagagtgcccctgcccatcgagggcagaaaggagggcgtgtacatcaaggtgggcagcgccagccccttcagcacctgcctgaagatggtggccagccccgacagccacgccagatgcgcccagggccagccccccctgctgagctgctacgacaccctggccccccacttcagagtggactggtgcaacgtgaccctggtgagaagagaccccggcagcggcggcggcgtgggccacggcccccaccccagcccccccagcctgccctgctgcttcctgagccccagcctgtag

SEQ ID NO: 98049 - DNA, 792 bp, synthetic construct
  misc_feature 1..792: note = Description of Artificial Sequence: Synthetic coding sequence
  source 1..792: mol_type = other DNA
atggccgagaccctgttctggacccccctgctggtggtgctgctggccggcctgggcgacaccgaggcccagcagaccaccctgcaccccctggtgggcagagtgttcgtgcacaccctggaccacgagaccttcctgagcctgcccgagcacgtggccgtgccccccgccgtgcacatcacctaccacgcccacctgcagggccaccccgacctgcccagatggctgagatacacccagagaagcccccaccaccccggcttcctgtacggcagcgccacccccgaggacagaggcctgcaggtgatcgaggtgaccgcctacaacagagacagcttcgacaccaccagacagagactggtgctggagatcggcgaccccgagggccccctgctgccctaccaggccgagttcctggtgagaagccacgacgccgaggaggtgctgcccagcacccccgccagcagattcctgagcgccctgggcggcctgtgggagcccggcgagctgcagctgctgaacgtgaccagcgccctggacagaggcggcagagtgcccctgcccatcgagggcagaaaggaggtgctgctgagacacctgggcacccccctgatccagatggtgcaccactgcaccatccacggcaacaccgaggagctgagacagatggccgccagcagagaggtgcccagacccctgagcaccctgcccatgttcaacgtgcacaccggcgagagactgccccccagagtggacagcgcccaggtgcccctgatcctggaccagcactag

SEQ ID NO: 98050 - DNA, 957 bp, synthetic construct
  misc_feature 1..957: note = Description of Artificial Sequence: Synthetic coding sequence
  source 1..957: mol_type = other DNA
atggccgccgccgccgccgccgccgccgagcagcagagcagcaacggccccgtgaagaagagcatgagagagaaggccgtggagagaagaagcgtgaacaaggagcacaacagcaacttcaaggccggctacatccccatcgacgaggacagactgcacaagaccggcctgagaggcagaaagggcaacctggccatctgcgtgatcatcctgctgttcatcctggccgtgatcaacctgatcatcaccctggtgatctgggccgtgatcagaatcggccccaacggctgcgacagcatggagttccacgagagcggcctgctgagattcaagcaggtgagcgacatgggcgtgatccaccccctgtacaagagcaccgtgggcggcagaagaaacgagaacctggtgatcaccggcaacaaccagcccatcgtgttccagcagggcaccaccaagctgagcgtggagaacaacaagaccagcatcaccagcgacatcggcatgcagttcttcgaccccagaacccagaacatcctgttcagcaccgactacgagacccacgagttccacctgcccagcggcgtgaagagcctgaacgtgcagaaggccagcaccgagagaatcaccagcaacgccaccagcgacctgaacatcaaggtggacggcagagccatcgtgagaggcaacgagggcgtgttcatcatgggcaagaccatcgagttccacatgggcggcaacatggagctgaaggccgagaacagcatcatcctgaacggcagcgtgatggtgagcaccaccagactgcccagcagcagcagcggcgaccagctgggcagcggcgactgggtgagatacaagctgtgcatgtgcgccgacggcaccctgttcaaggtgcaggtgaccagccagaacatgggctgccagatcagcgacaacccctgcggcaacacccactag

SEQ ID NO: 98051 - DNA, 747 bp, synthetic construct
  misc_feature 1..747: note = Description of Artificial Sequence: Synthetic coding sequence
  source 1..747: mol_type = other DNA
atggccgccgccgccgccgccgccgccgagcagatcaccctggtgatctgggccgtgatcagaatcggccccaacggctgcgacagcatggagttccacgagagcggcctgctgagattcaagcaggtgagcgacatgggcgtgatccaccccctgtacaagagcaccgtgggcggcagaagaaacgagaacctggtgatcaccggcaacaaccagcccatcgtgttccagcagggcaccaccaagctgagcgtggagaacaacaagaccagcatcaccagcgacatcggcatgcagttcttcgaccccagaacccagaacatcctgttcagcaccgactacgagacccacgagttccacctgcccagcggcgtgaagagcctgaacgtgcagaaggccagcaccgagagaatcaccagcaacgccaccagcgacctgaacatcaaggtggacggcagagccatcgtgagaggcaacgagggcgtgttcatcatgggcaagaccatcgagttccacatgggcggcaacatggagctgaaggccgagaacagcatcatcctgaacggcagcgtgatggtgagcaccaccagactgcccagcagcagcagcggcgaccagctgggcagcggcgactgggtgagatacaagctgtgcatgtgcgccgacggcaccctgttcaaggtgcaggtgaccagccagaacatgggctgccagatcagcgacaacccctgcggcaacacccactag

SEQ ID NO: 98052 - DNA, 873 bp, synthetic construct
  misc_feature 1..873: note = Description of Artificial Sequence: Synthetic coding sequence
  source 1..873: mol_type = other DNA
atgatgccccaggagcagtacacccaccacagaagcaccatgcccggcagcgtgggcccccaggtgtacaaggtgggcatctacggctggagaaagagatgcctgtacttcttcgtgctgctgctgatgatcctgatcctggtgaacctggccatgaccatctggatcctgaaggtgatgaacttcaccatcgacggcatgggcaacctgagaatcaccgagaagggcctgaagctggagggcgacagcgagttcctgcagcccctgtacgccaaggagatccagagcagacccggcaacgccctgtacttcaagagcgccagaaacgtgaccgtgaacatcctgaacgaccagaccaaggtgctgacccagctgatcaccggccccaaggccgtggaggcctacggcaagaagttcgaggtgaagaccgtgagcggcaagctgctgttcagcgccgacaacaacgaggtggtggtgggcgccgagagactgagagtgctgggcgccgagggcaccgtgttccccaagagcatcgagacccccaacgtgagagccgaccccttcaaggagctgagactggagagccccaccagaagcctggtgatggaggcccccaagggcgtggagatcaacgccgaggccggcaacatggaggccacctgcagaaccgagctgagactggagagcaaggacggcgagatcaagctggacgccgccaagatcagactgcccagactgccccacggcagctacacccccaccggcaccagacagaaggtgttcgagatctgcgtgtgcgccaacggcagactgttcctgagccaggccggcgccggcagcacctgccagatcaacaccagcgtgtgcctgtag

SEQ ID NO: 98053 - DNA, 870 bp, synthetic construct
  misc_feature 1..870: note = Description of Artificial Sequence: Synthetic coding sequence
  source 1..870: mol_type = other DNA
atgccccaggagcagtacacccaccacagaagcaccatgcccggcagcgtgggcccccaggtgtacaaggtgggcatctacggctggagaaagagatgcctgtacttcttcgtgctgctgctgatgatcctgatcctggtgaacctggccatgaccatctggatcctgaaggtgatgaacttcaccatcgacggcatgggcaacctgagaatcaccgagaagggcctgaagctggagggcgacagcgagttcctgcagcccctgtacgccaaggagatccagagcagacccggcaacgccctgtacttcaagagcgccagaaacgtgaccgtgaacatcctgaacgaccagaccaaggtgctgacccagctgatcaccggccccaaggccgtggaggcctacggcaagaagttcgaggtgaagaccgtgagcggcaagctgctgttcagcgccgacaacaacgaggtggtggtgggcgccgagagactgagagtgctgggcgccgagggcaccgtgttccccaagagcatcgagacccccaacgtgagagccgaccccttcaaggagctgagactggagagccccaccagaagcctggtgatggaggcccccaagggcgtggagatcaacgccgaggccggcaacatggaggccacctgcagaaccgagctgagactggagagcaaggacggcgagatcaagctggacgccgccaagatcagactgcccagactgccccacggcagctacacccccaccggcaccagacagaaggtgttcgagatctgcgtgtgcgccaacggcagactgttcctgagccaggccggcgccggcagcacctgccagatcaacaccagcgtgtgcctgtag

SEQ ID NO: 98054 - DNA, 771 bp, synthetic construct
  misc_feature 1..771: note = Description of Artificial Sequence: Synthetic coding sequence
  source 1..771: mol_type = other DNA
atgatgccccaggagcagtacacccaccacagaagcaccatgcccggcagcgtgggcccccaggtgtacaaggtgggcatctacggctggagaaagagatgcctgtacttcttcgtgctgctgctgatgatcctgatcctggtgaacctggccatgaccatctggatcctgaaggtgatgaacttcaccatcgacggcatgggcaacctgagaatcaccgagaagggcctgaagctggagggcgacagcgagttcctgcagcccctgtacgccaaggagatccagagcagacccggcaacgccctgtacttcaagagcgccagaaacgtgaccgtgaacatcctgaacgaccagaccaaggtgctgacccagctgatcaccggccccaaggccgtggaggcctacggcaagaagttcgaggtgaagaccgtgagcggcaagctgctgttcagcgccgacaacaacgaggtggtggtgggcgccgagagactgagagtgctgggcgccgagggcaccgtgttccccaagagcatcgagacccccaacgtgagagccgaccccttcaaggagctgagactggagagccccaccagaagcctggtgatggaggcccccaagggcgtggagatcaacgccgaggccggcaacatggaggccacctgcagaaccgagctgagactggagagcaaggacggcgaggtgagagacgagaaggacagaagcagcaagagctacagcttcaacagacccaccctgcccatcaccggctag

SEQ ID NO: 98055 - DNA, 771 bp, synthetic construct; identical to SEQ ID NO: 98054
  misc_feature 1..771: note = Description of Artificial Sequence: Synthetic coding sequence
  source 1..771: mol_type = other DNA

SEQ ID NO: 98056 - DNA, 1314 bp, synthetic construct
  misc_feature 1..1314: note = Description of Artificial Sequence: Synthetic coding sequence
  source 1..1314: mol_type = other DNA
atgcagctgcccagatggtgggagctgggcgacccctgcgcctggaccggccagggcagaggcaccagaagaatgagccccgccaccaccggcaccttcctgctgaccgtgtacagcatcttcagcaaggtgcacagcgacagaaacgtgtaccccagcgccggcgtgctgttcgtgcacgtgctggagagagagtacttcaagggcgagttccccccctaccccaagcccggcgagatcagcaacgaccccatcaccttcaacaccaacctgatgggctaccccgacagacccggctggctgagatacatccagagaaccccctacagcgacggcgtgctgtacggcagccccaccgccgagaacgtgggcaagcccaccatcatcgagatcaccgcctacaacagaagaaccttcgagaccgccagacacaacctgatcatcaacatcatgagcgccgaggacttccccctgccctaccaggccgagttcttcatcaagaacatgaacgtggaggagatgctggccagcgaggtgctgggcgacttcctgggcgccgtgaagaacgtgtggcagcccgagagactgaacgccatcaacatcaccagcgccctggacagaggcggcagagtgcccctgcccatcaacgacctgaaggagggcgtgtacgtgatggtgggcgccgacgtgcccttcagcagctgcctgagagaggtggagaacccccagaaccagctgagatgcagccaggagatggagcccgtgatcacctgcgacaagaagttcagaacccagttctacatcgactggtgcaagatcagcctggtggacaagaccaagcaggtgagcacctaccaggaggtgatcagaggcgagggcatcctgcccgacggcggcgagtacaagccccccagcgacagcctgaagagcagagactactacaccgacttcctgatcaccctggccgtgcccagcgccgtggccctggtgctgttcctgatcctggcctacatcatgtgctgcagaagagagggcgtggagaagagaaacatgcagacccccgacatccagctggtgcaccacagcgccatccagaagagcaccaaggagctgagagacatgagcaagaacagagagatcgcctggcccctgagcaccctgcccgtgttccaccccgtgaccggcgagatcatcccccccctgcacaccgacaactacgacagcaccaacatgcccctgatgcagacccagcagaacctgccccaccagacccagatcccccagcagcagaccaccggcaagtggtacccctag

SEQ ID NO: 98057 - DNA, 1416 bp, synthetic construct
  misc_feature 1..1416: note = Description of Artificial Sequence: Synthetic coding sequence
  source 1..1416: mol_type = other DNA
atgcagctgcccagatggtgggagctgggcgacccctgcgcctggaccggccagggcagaggcaccagaagaatgagccccgccaccaccggcaccttcctgctgaccgccttcctgctgagctgcgccgacggcatcaacggcaccgtgaactggaagaccagacaggccaacaacttcatcatcagcagaaagatggccgccggcatgaaggacgtgtacagcatcttcagcaaggtgcacagcgacagaaacgtgtaccccagcgccggcgtgctgttcgtgcacgtgctggagagagagtacttcaagggcgagttccccccctaccccaagcccggcgagatcagcaacgaccccatcaccttcaacaccaacctgatgggctaccccgacagacccggctggctgagatacatccagagaaccccctacagcgacggcgtgctgtacggcagccccaccgccgagaacgtgggcaagcccaccatcatcgagatcaccgcctacaacagaagaaccttcgagaccgccagacacaacctgatcatcaacatcatgagcgccgaggacttccccctgccctaccaggccgagttcttcatcaagaacatgaacgtggaggagatgctggccagcgaggtgctgggcgacttcctgggcgccgtgaagaacgtgtggcagcccgagagactgaacgccatcaacatcaccagcgccctggacagaggcggcagagtgcccctgcccatcaacgacctgaaggagggcgtgtacgtgatggtgggcgccgacgtgcccttcagcagctgcctgagagaggtggagaacccccagaaccagctgagatgcagccaggagatggagcccgtgatcacctgcgacaagaagttcagaacccagttctacatcgactggtgcaagatcagcctggtggacaagaccaagcaggtgagcacctaccaggaggtgatcagaggcgagggcatcctgcccgacggcggcgagtacaagccccccagcgacagcctgaagagcagagactactacaccgacttcctgatcaccctggccgtgcccagcgccgtggccctggtgctgttcctgatcctggcctacatcatgtgctgcagaagagagggcgtggagaagagaaacatgcagacccccgacatccagctggtgcaccacagcgccatccagaagagcaccaaggagctgagagacatgagcaagaacagagagatcgcctggcccctgagcaccctgcccgtgttccaccccgtgaccggcgagatcatcccccccctgcacaccgacaactacgacagcaccaacatgcccctgatgcagacccagcagaacctgccccaccagacccagatcccccagcagcagaccaccggcgagtgctag

SEQ ID NO: 98058 - DNA, 1356 bp, synthetic construct
  misc_feature 1..1356: note = Description of Artificial Sequence: Synthetic coding sequence
  source 1..1356: mol_type = other DNA
atgcagctgcccagatggtgggagctgggcgacccctgcgcctggaccggccagggcagaggcaccagaagaatgagccccgccaccaccggcaccttcctgctgaccgtgtacagcatcttcagcaaggtgcacagcgacagaaacgtgtaccccagcgccggcgtgctgttcgtgcacgtgctggagagagagtacttcaagggcgagttccccccctaccccaagcccggcgagatcagcaacgaccccatcaccttcaacaccaacctgatgggctaccccgacagacccggctggctgagatacatccagagaaccccctacagcgacggcgtgctgtacggcagccccaccgccgagaacgtgggcaagcccaccatcatcgagatcaccgcctacaacagaagaaccttcgagaccgccagacacaacctgatcatcaacatcatgagcgccgaggacttccccctgccctaccaggccgagttcttcatcaagaacatgaacgtggaggagatgctggccagcgaggtgctgggcgacttcctgggcgccgtgaagaacgtgtggcagcccgagagactgaacgccatcaacatcaccagcgccctggacagaggcggcagagtgcccctgcccatcaacgacctgaaggagggcgtgtacgtgatggtgggcgccgacgtgcccttcagcagctgcctgagagaggtggagaacccccagaaccagctgagatgcagccaggagatggagcccgtgatcacctgcgacaagaagttcagaacccagttctacatcgactggtgcaagatcagcctggtggacaagaccaagcaggtgagcacctaccaggaggtgatcagaggcgagggcatcctgcccgacggcggcgagtacaagccccccagcgacagcctgaagagcagagactactacaccgacttcctgatcaccctggccgtgcccagcgccgtggccctggtgctgttcctgatcctggcctacatcatgtgctgcagaagagagggcgtgatccagctggtgcaccacagcgccatccagaagagcaccaaggagctgagagacatgagcaagaacagagagatcgcctggcccctgagcaccctgcccgtgttccaccccgtgaccggcgagatcatcccccccctgcacaccgacaactacgacagcaccaacatgcccctgatgcagacccagcagaacctgccccaccagacccagatcccccagcagcagaccaccggcgacttcagactgaccaccttccagagattcgaggtgaacggcatccccgaggagagaaagctgaccgaggccatgaacctgtag

SEQ ID NO: 98059 - DNA, 1389 bp, synthetic construct
  misc_feature 1..1389: note = Description of Artificial Sequence: Synthetic coding sequence
  source 1..1389: mol_type = other DNA
atgcagctgcccagatggtgggagctgggcgacccctgcgcctggaccggccagggcagaggcaccagaagaatgagccccgccaccaccggcaccttcctgctgaccgtgtacagcatcttcagcaaggtgcacagcgacagaaacgtgtaccccagcgccggcgtgctgttcgtgcacgtgctggagagagagtacttcaagggcgagttccccccctaccccaagcccggcgagatcagcaacgaccccatcaccttcaacaccaacctgatgggctaccccgacagacccggctggctgagatacatccagagaaccccctacagcgacggcgtgctgtacggcagccccaccgccgagaacgtgggcaagcccaccatcatcgagatcaccgcctacaacagaagaaccttcgagaccgccagacacaacctgatcatcaacatcatgagcgccgaggacttccccctgccctaccaggccgagttcttcatcaagaacatgaacgtggaggagatgctggccagcgaggtgctgggcgacttcctgggcgccgtgaagaacgtgtggcagcccgagagactgaacgccatcaacatcaccagcgccctggacagaggcggcagagtgcccctgcccatcaacgacctgaaggagggcgtgtacgtgatggtgggcgccgacgtgcccttcagcagctgcctgagagaggtggagaacccccagaaccagctgagatgcagccaggagatggagcccgtgatcacctgcgacaagaagttcagaacccagttctacatcgactggtgcaagatcagcctggtggacaagaccaagcaggtgagcacctaccaggaggtgatcagaggcgagggcatcctgcccgacggcggcgagtacaagccccccagcgacagcctgaagagcagagactactacaccgacttcctgatcaccctggccgtgcccagcgccgtggccctggtgctgttcctgatcctggcctacatcatgtgctgcagaagagagggcgtggagaagagaaacatgcagacccccgacatccagctggtgcaccacagcgccatccagaagagcaccaaggagctgagagacatgagcaagaacagagagatcgcctggcccctgagcaccctgcccgtgttccaccccgtgaccggcgagatcatcccccccctgcacaccgacaactacgacagcaccaacatgcccctgatgcagacccagcagtggagcttcgcccccgtggcccaggccggcgtgcagtggagcgacctgggcagcctgcagccccccccccccagaaacctgccccaccagacccagatcccccagcagcagaccaccggcaagtggtacccctag

SEQ ID NO: 98060 - DNA, 2118 bp, synthetic construct
  misc_feature 1..2118: note = Description of Artificial Sequence: Synthetic coding sequence
  source 1..2118: mol_type = other DNA
atgaccgacaacagcaacaaccagctggtggtgagagccaagttcaacttccagcagaccaacgaggacgagctgagcttcagcaagggcgacgtgatccacgtgaccagagtggaggagggcggctggtgggagggcaccctgaacggcagaaccggctggttccccagcaactacgtgagagaggtgaaggccagcgagaagcccgtgagccccaagagcggcaccctgaagagcccccccaagggcttcgacaccaccgccatcaacaagagctactacaacgtggtgctgcagaacatcctggagaccgagaacgagtacagcaaggagctgcagaccgtgctgagcacctacctgagacccctgcagaccagcgagaagctgagcagcgccaacatcagctacctgatgggcaacctggaggagatctgcagcttccagcagatgctggtgcagagcctggaggagtgcaccaagctgcccgaggcccagcagagagtgggcggctgcttcctgaacctgatgccccagatgaagaccctgtacctgacctactgcgccaaccaccccagcgccgtgaacgtgctgaccgagcacagcgaggagctgggcgagttcatggagaccaagggcgccagcagccccggcatcctggtgctgaccaccggcctgagcaagcccttcatgagactggacaagtaccccaccctgctgaaggagctggagagacacatggaggactaccacaccgacagacaggacatccagaagagcatggccgccttcaagaacctgagcgcccagtgccaggaggtgagaaagagaaaggagctggagctgcagatcctgaccgaggccatcagaaactgggagggcgacgacatcaagaccctgggcaacgtgacctacatgagccaggtgctgatccagtgcgccggcagcgaggagaagaacgagagatacctgctgctgttccccaacgtgctgctgatgctgagcgccagccccagaatgagcggcttcatctaccagggcaagctgcccaccaccggcatgaccatcaccaagctggaggacagcgagaaccacagaaacgccttcgagatcagcggcagcatgatcgagagaatcctggtgagctgcaacaaccagcaggacctgcaggagtgggtggagcacctgcagaagcagaccaaggtgaccagcgtgggcaaccccaccatcaagccccacagcgtgcccagccacaccctgcccagccaccccgtgacccccagcagcaagcacgccgacagcaagcccgcccccctgacccccgcctaccacaccctgccccaccccagccaccacggcaccccccacaccaccatcaactggggccccctggagccccccaagacccccaagccctggagcctgagctgcctgagacccgccccccccctgagacccagcgccgccctgtgctacaaggaggacctgagcaagagccccaagaccatgaagaagctgctgcccaagagaaagcccgagagaaagcccagcgacgaggagttcgccagcagaaagagcaccgccgccctggaggaggacgcccagatcctgaaggtgatcgaggcctactgcaccagcgccaagaccagacagaccctgaacagcacctggcagggcaccgacctgatgcacaaccacgtgctggccgacgacgaccagcccagcctggacagcctgggcagaagaagcagcctgagcagactggagcccagcgacctgagcgaggacagcgactacgacagcatctggaccgcccacagctacagaatgggcagcaccagcagaagcagaaaggagagcgccccccaggtgctgctgcccgaggaggagaagatcatcgtggaggagaccaagagcaacggccagaccgtgatcgaggagaagagcctggtggacaccgtgtacgccctgaaggacgaggtgcaggagctgagacaggacaacaagaagatgaagaagagcctggaggaggagcagagagccagaaaggacctggagaagctggtgagaaaggtgctgaagaacatgaacgaccccgcctgggacgagaccaacctgtag

SEQ ID NO: 98061 - DNA, 876 bp, synthetic construct
  misc_feature 1..876: note = Description of Artificial Sequence: Synthetic coding sequence
  source 1..876: mol_type = other DNA
atggtgagagagcagtacaccaccgccaccgagggcatctgcatcgagagacccgagaaccagtacgtgtacaagatcggcatctacggctggagaaagagatgcctgtacctgttcgtgctgctgctgctgatcatcctggtggtgaacctggccctgaccatctggatcctgaaggtgatgtggttcagccccgccggcatgggccacctgtgcgtgaccaaggacggcctgagactggagggcgagagcgagttcctgttccccctgtacgccaaggagatccacagcagagtggacagcagcctgctgctgcagagcacccagaacgtgaccgtgaacgccagaaacagcgagggcgaggtgaccggcagactgaaggtgggccccaagatggtggaggtgcagaaccagcagttccagatcaacagcaacgacggcaagcccctgttcaccgtggacgagaaggaggtggtggtgggcaccgacaagctgagagtgaccggccccgagggcgccctgttcgagcacagcgtggagacccccctggtgagagccgaccccttccaggacctgagactggagagccccaccagaagcctgagcatggacgcccccagaggcgtgcacatccaggcccacgccggcaagatcgaggccctgagccagatggacatcctgttccacagcagcgacggcatgctggtgctggacgccgagaccgtgtgcctgcccaagctggtgcagggcacctggggccccagcggcagcagccagagcctgtacgagatctgcgtgtgccccgacggcaagctgtacctgagcgtggccggcgtgagcaccacctgccaggagcacaaccacatctgcctgtag

SEQ ID NO: 98062 - DNA, 876 bp, synthetic construct; identical to SEQ ID NO: 98061
  misc_feature 1..876: note = Description of Artificial Sequence: Synthetic coding sequence
  source 1..876: mol_type = other DNA

SEQ ID NO: 98063 - DNA, 96 bp, synthetic construct
  misc_feature 1..96: note = Description of Artificial Sequence: Synthetic coding sequence
  source 1..96: mol_type = other DNA
atgggcatcaacaccagagagctgttcctgaacttcaccatcgtgctgatcaccgtgatcctgatgtggctgctggtgagaagctaccagtactag

SEQ ID NO: 98064 - DNA, 96 bp, synthetic construct; identical to SEQ ID NO: 98063
  misc_feature 1..96: note = Description of Artificial Sequence: Synthetic coding sequence
  source 1..96: mol_type = other DNA

SEQ ID NO: 98065 - DNA, 96 bp, synthetic construct; identical to SEQ ID NO: 98063
  misc_feature 1..96: note = Description of Artificial Sequence: Synthetic coding sequence
  source 1..96: mol_type = other DNA

SEQ ID NO: 98066 - DNA, 732 bp, synthetic construct
  misc_feature 1..732: note = Description of Artificial Sequence: Synthetic coding sequence
  source 1..732: mol_type = other DNA
atgggcaagaacaagcagcccagaggccagcagagacagggcggcccccccgccgccgacgccgccggccccgacgacatggagcccaagaagggcaccggcgcccccaaggagtgcggcgaggaggagcccagaacctgctgcggctgcagattccccctgctgctggccctgctgcagctggccctgggcatcgccgtgaccgtggtgggcttcctgatggccagcatcagcagcagcctgctggtgagagacacccccttctgggccggcatcatcgtgtgcctggtggcctacctgggcctgttcatgctgtgcgtgagctaccaggtggacgagagaacctgcatccagttcagcatgaagctgctgtacttcctgctgagcgccctgggcctgaccgtgtgcgtgctggccgtggccttcgccgcccaccactacagccagctgacccagttcacctgcgagaccaccctggacagctgccagtgcaagctgcccagcagcgagcccctgagcagaaccttcgtgtacagagacgtgaccgactgcaccagcgtgaccggcaccttcaagctgttcctgctgatccagatgatcctgaacctggtgtgcggcctggtgtgcctgctggcctgcttcgtgatgtggaagcacagataccaggtgttctacgtgggcgtgagaatctgcagcctgaccgccagcgagggcccccagcagaagatctag

SEQ ID NO: 98067 - DNA, 423 bp, synthetic construct
  misc_feature 1..423: note = Description of Artificial Sequence: Synthetic coding sequence
  source 1..423: mol_type = other DNA
atgctgtgcgtgagctaccaggtggacgagagaacctgcatccagttcagcatgaagctgctgtacttcctgctgagcgccctgggcctgaccgtgtgcgtgctggccgtggccttcgccgcccaccactacagccagctgacccagttcacctgcgagaccaccctggacagctgccagtgcaagctgcccagcagcgagcccctgagcagaaccttcgtgtacagagacgtgaccgactgcaccagcgtgaccggcaccttcaagctgttcctgctgatccagatgatcctgaacctggtgtgcggcctggtgtgcctgctggcctgcttcgtgatgtggaagcacagataccaggtgttctacgtgggcgtgagaatctgcagcctgaccgccagcgagggcccccagcagaagatctag

SEQ ID NO: 98068 - DNA, 654 bp, synthetic construct
  misc_feature 1..654: note = Description of Artificial Sequence: Synthetic coding sequence
  source 1..654: mol_type = other DNA
atggagcccaagaagggcaccggcgcccccaaggagtgcggcgaggaggagcccagaacctgctgcggctgcagattccccctgctgctggccctgctgcagctggccctgggcatcgccgtgaccgtggtgggcttcctgatggccagcatcagcagcagcctgctggtgagagacacccccttctgggccggcatcatcgtgtgcctggtggcctacctgggcctgttcatgctgtgcgtgagctaccaggtggacgagagaacctgcatccagttcagcatgaagctgctgtacttcctgctgagcgccctgggcctgaccgtgtgcgtgctggccgtggccttcgccgcccaccactacagccagctgacccagttcacctgcgagaccaccctggacagctgccagtgcaagctgcccagcagcgagcccctgagcagaaccttcgtgtacagagacgtgaccgactgcaccagcgtgaccggcaccttcaagctgttcctgctgatccagatgatcctgaacctggtgtgcggcctggtgtgcctgctggcctgcttcgtgatgtggaagcacagataccaggtgttctacgtgggcgtgagaatctgcagcctgaccgccagcgagggcccccagcagaagatctag

SEQ ID NO: 98069 - DNA, 387 bp, synthetic construct
  misc_feature 1..387: note = Description of Artificial Sequence: Synthetic coding sequence
  source 1..387: mol_type = other DNA
atgggcaagaacaagcagcccagaggccagcagagacagggcggcccccccgccgccgacgccgccggccccgacgacatggagcccaagaagggcaccggcgcccccaaggagtgcggcgaggaggagcccagaacctgctgcggctgcagattccccctgctgctggccctgctgcagctggccctgggcatcgccgtgaccgtggtgggcttcctgatggccagcatcagcagcagcctgctggtgagagacacccccttctgggccggcatcatcgtgtgcctggtggcctacctgggcctgttcatgctgtgcgtgagctaccaggtggacgagagaacctgcatccagttcagcatgaagatccactgccacgacttctag

SEQ ID NO: 98070 - DNA, 363 bp, synthetic construct
  misc_feature 1..363: note = Description of Artificial Sequence: Synthetic coding sequence
  source 1..363: mol_type = other DNA
atgctgtgcgtgagctaccaggtggacgagagaacctgcatccagttcagcatgaagctgctgtacttcctgctgagcgccctgggcctgaccgtgtgcgtgctggccgtggccttcgccgcccaccactacagccagctgacccagttcacctgcgagaccaccctggacagctgccagtgcaagctgcccagcagcgagcccctgagcagaaccttcgtgtacagagacgtgaccgactgcaccagcgtgaccggcaccttcaagctgttcctgctgatccagatgatcctgaacctggtgtgcggcctggtgtgcctgctggcctgcttcgtgatgtggaagcacagataccaggtgtag

SEQ ID NO: 98071 - DNA, 423 bp, synthetic construct; identical to SEQ ID NO: 98067
  misc_feature 1..423: note = Description of Artificial Sequence: Synthetic coding sequence
  source 1..423: mol_type = other DNA

SEQ ID NO: 98072 - DNA, 2292 bp, synthetic construct
  misc_feature 1..2292: note = Description of Artificial Sequence: Synthetic coding sequence
  source 1..2292: mol_type = other DNA
atggaccacctgaacgaggccacccagggcaaggagcacagcgagatgagcaacaacgtgagcgaccccaagggcccccccgccaagatcgccagactggagcagaacggcagccccctgggcagaggcagactgggcagcaccggcgccaagatgcagggcgtgcccctgaagcacagcggccacctgatgaagaccaacctgagaaagggcaccatgctgcccgtgttctgcgtggtggagcactacgagaacgccatcgagtacgactgcaaggaggagcacgccgagttcgtgctggtgagaaaggacatgctgttcaaccagctgatcgagatggccctgctgagcctgggctacagccacagcagcgccgcccaggccaagggcctgatccaggtgggcaagtggaaccccgtgcccctgagctacgtgaccgacgcccccgacgccaccgtggccgacatgctgcaggacgtgtaccacgtggtgaccctgaagatccagctgcacagctgccccaagctggaggacctgccccccgagcagtggagccacaccaccgtgagaaacgccctgaaggacctgctgaaggacatgaaccagagcagcctggccaaggagtgccccctgagccagagcatgatcagcagcatcgtgaacagcacctactacgccaacgtgagcgccgccaagtgccaggagttcggcagatggtacaagcacttcaagaagaccaaggacatgatggtggagatggacagcctgagcgagctgagccagcagggcgccaaccacgtgaacttcggccagcagcccgtgcccggcaacaccgccgagcagccccccagccccgcccagctgagccacggcagccagcccagcgtgagaacccccctgcccaacctgcaccccggcctggtgagcacccccatcagcccccagctggtgaaccagcagctggtgatggcccagctgctgaaccagcagtacgccgtgaacagactgctggcccagcagagcctgaaccagcagtacctgaaccaccccccccccgtgagcagaagcatgaacaagcccctggagcagcaggtgagcaccaacaccgaggtgagcagcgagatctaccagtgggtgagagacgagctgaagagagccggcatcagccaggccgtgttcgccagagtggccttcaacagaacccagggcctgctgagcgagatcctgagaaaggaggaggaccccaagaccgccagccagagcctgctggtgaacctgagagccatgcagaacttcctgcagctgcccgaggccgagagagacagaatctaccaggacgagagagagagaagcctgaacgccgccagcgccatgggccccgcccccctgatcagcaccccccccagcagacccccccaggtgaagaccgccaccatcgccaccgagagaaacggcaagcccgagaacaacaccatgaacatcaacgccagcatctacgacgagatccagcaggagatgaagagagccaaggtgagccaggccctgttcgccaaggtggccgccaccaagagccagggctggctgtgcgagctgctgagatggaaggaggaccccagccccgagaacagaaccctgtgggagaacctgagcatgatcagaagattcctgagcctgccccagcccgagagagacgccatctacgagcaggagagcaacgccgtgcaccaccacggcgacagacccccccacatcatccacgtgcccgccgagcagatccagcagcagcagcagcagcagcagcagcagcagcagcagcagcaggcccccccccccccccagccccagcagcagccccagaccggccccagactgccccccagacagcccaccgtggccagccccgccgagagcgacgaggagaacagacagaagaccagacccagaaccaagatcagcgtggaggccctgggcatcctgcagagcttcatccaggacgtgggcctgtaccccgacgaggaggccatccagaccctgagcgcccagctggacctgcccaagtacaccatcatcaagttcttccagaaccagagatactacctgaagcaccacggcaagctgaaggacaacagcggcctggaggtggacgtggccgagtacaaggaggaggagctgctgaaggacctggaggagagcgtgcaggacaagaacaccaacaccctgttcagcgtgaagctggaggaggagctgagcgtggagggcaacaccgacatcaacaccgacctgaaggactag

SEQ ID NO: 98073 - DNA, 351 bp, synthetic construct
  misc_feature 1..351: note = Description of Artificial Sequence: Synthetic coding sequence
  source 1..351: mol_type = other DNA
atggaccacctgaacgaggccacccagggcaaggagcacagcgagatgagcaacaacgtgagcgaccccaagggcccccccgccaagatcgccagactggagcagaacggcagccccctgggcagaggcagactgggcagcaccggcgccaagatgcagggcgtgcccctgaagcacagcggccacctgatgaagaccaacctgagaaagggcaccatgctgcccgtgttctgcgtggtggagcactacgagaacgccatcgagtacgactgcaaggaggagcacgccgagttcgtgctggtgagaaaggacatgctgttcaaccagctgatcgagatggccctgctgtag

SEQ ID NO: 98074 - DNA, 675 bp, synthetic construct
  misc_feature 1..675: note = Description of Artificial Sequence: Synthetic coding sequence
  source 1..675: mol_type = other DNA
atggaccacctgaacgaggccacccagggcaaggagcacagcgagatgagcaacaacgtgagcgaccccaagggcccccccgccaagatcgccagactggagcagaacggcagccccctgggcagaggcagactgggcagcaccggcgccaagatgcagggcgtgcccctgaagcacagcggccacctgatgaagaccaacctgagaaagggcaccatgctgcccgtgttctgcgtggtggagcactacgagaacgccatcgagtacgactgcaaggaggagcacgccgagttcgtgctggtgagaaaggacatgctgttcaaccagctgatcgagatggccctgctgagcctgggctacagccacagcagcgccgcccaggccaagggcctgatccaggtgggcaagtggaaccccgtgcccctgagctacgtgaccgacgcccccgacgccaccgtggccgacatgctgcaggacgtgtaccacgtggtgaccctgaagatccagctgcacagctgccccaagctggaggacctgccccccgagcagtggagccacaccaccgtgagaaacgccctgaaggacctgctgaaggacatgaaccagagcagcctggccaaggagtgccccctgagccagagcatgatcagcagcatcgtgaacagcacctactag

SEQ ID NO: 98075 - DNA, 216 bp, synthetic construct
  misc_feature 1..216: note = Description of Artificial Sequence: Synthetic coding sequence
  source 1..216: mol_type = other DNA
atggaccacctgaacgaggccacccagggcaaggagcacagcgagatgagcaacaacgtgagcgaccccaagggcccccccgccaagatcgccagactggagcagaacggcagccccctgggcagaggcagactgggcagcaccggcgccaagatgcagggcgtgcccctgaagcacagcggccacctgatgaagaccaacctgagaaagggctag

SEQ ID NO: 98076 - DNA, 27 bp, synthetic construct
  misc_feature 1..27: note = Description of Artificial Sequence: Synthetic coding sequence
  source 1..27: mol_type = other DNA
atggaccacctgaacgaggccacctag

SEQ ID NO: 98077 - DNA, 519 bp, synthetic construct
  misc_feature 1..519: note = Description of Artificial Sequence: Synthetic coding sequence
  source 1..519: mol_type = other DNA
atggaccacctgaacgaggccacccagggcaaggagcacagcgagatgagcaacaacgtgagcgaccccaagggcccccccgccaagatcgccagactggagcagaacggcagccccctgggcagaggcagactgggcagcaccggcgccaagatgcagggcgtgcccctgaagcacagcggccacctgatgaagaccaacctgagaaagggcaccatgctgcccgtgttctgcgtggtggagcactacgagaacgccatcgagtacgactgcaaggaggagcacgccgagttcgtgctggtgagaaaggacatgctgttcaaccagctgatcgagatggccctgctgagcctgggctacagccacagcagcgccgcccaggccaagggcctgatccaggtgggcaagtggaaccccgtgcccctgagctacgtgaccgacgcccccgacgccaccgtggccgacatgctgcaggacgtgtaccacgtggtgaccctgaagatccagctgcacagatag

SEQ ID NO: 98078 - DNA, 2292 bp, synthetic construct; identical to SEQ ID NO: 98072
  misc_feature 1..2292: note = Description of Artificial Sequence: Synthetic coding sequence
  source 1..2292: mol_type = other DNA

SEQ ID NO: 98079 - DNA, 393 bp, synthetic construct
  misc_feature 1..393: note = Description of Artificial Sequence: Synthetic coding sequence
  source 1..393: mol_type = other DNA
atggaccacctgaacgaggccacccagggcaaggagcacagcgagatgagcaacaacgtgagcgaccccaagggcccccccgccaagatcgccagactggagcagaacggcagccccctgggcagaggcagactgggcagcaccggcgccaagatgcagggcgtgcccctgaagcacagcggccacctgatgaagaccaacctgagaaagggcaccatgctgcccgtgttctgcgtggtggagcactacgagaacgccatcgagtacgactgcaaggaggagcacgccgagttcgtgctggtgagaaaggacatgctgttcaaccagctgatcgagatggccctgctgagcctgggctacagccacagcagcgccgcccaggccaagggctag

SEQ ID NO: 98080 - DNA, 2388 bp, synthetic construct
  misc_feature 1..2388: note = Description of Artificial Sequence: Synthetic coding sequence
  source 1..2388: mol_type = other DNA
atggaccacctgaacgaggccacccagggcaaggagcacagcgagatgagcaacaacgtgagcgaccccaagggcccccccgccaagatcgccagactggagcagaacggcagccccctgggcagaggcagactgggcagcaccggcgccaagatgcagggcgtgcccctgaagcacagcggccacctgatgaagaccaacctgagaaagggcaccatgctgcccgtgttctgcgtggtggagcactacgagaacgccatcgagtacgactgcaaggaggagcacgccgagttcgtgctggtgagaaaggacatgctgttcaaccagctgatcgagatggccctgctgagcctgggctacagccacagcagcgccgcccaggccaagggcctgatccaggtgggcaagtggaaccccgtgcccctgagctacgtgaccgacgcccccgacgccaccgtggccgacatgctgcaggacgtgtaccacgtggtgaccctgaagatccagctgcacagctgccccaagctggaggacctgccccccgagcagtggagccacaccaccgtgagaaacgccctgaaggacctgctgaaggacatgaaccagagcagcctggccaaggagtgccccctgagccagagcatgatcagcagcatcgtgaacagcacctactacgccaacgtgagcgccgccaagtgccaggagttcggcagatggtacaagcacttcaagaagaccaaggacatgatggtggagatggacagcctgagcgagctgagccagcagggcgccaaccacgtgaacttcggccagcagcccgtgcccggcaacaccgccgagcagccccccagccccgcccagctgagccacggcagccagcccagcgtgagaacccccctgcccaacctgcaccccggcctggtgagcacccccatcagcccccagctggtgaaccagcagctggtgatggcccagctgctgaaccagcagtacgccgtgaacagactgctggcccagcagagcctgaaccagcagtacctgaaccaccccccccccgtgagcagaagcatgaacaagcccctggagcagcaggtgagcaccaacaccgaggtgagcagcgagatctaccagtgggtgagagacgagctgaagagagccggcatcagccaggccgtgttcgccagagtggccttcaacagaacccagggcctgctgagcgagatcctgagaaaggaggaggaccccaagaccgccagccagagcctgctggtgaacctgagagccatgcagaacttcctgcagctgcccgaggccgagagagacagaatctaccaggacgagagagagagaagcctgaacgccgccagcgccatgggccccgcccccctgatcagcaccccccccagcagacccccccaggtgaagaccgccaccatcgccaccgagagaaacggcaagcccgagaacaacaccatgaacatcaacgccagcatctacgacgagatccagcaggagatgaagagagccaaggtgagccaggccctgttcgccaaggtggccgccaccaagagccagggctggctgtgcgagctgctgagatggaaggaggaccccagccccgagaacagaaccctgtgggagaacctgagcatgatcagaagattcctgagcctgccccagcccgagagagacgccatctacgagcaggagagcaacgccgtgcaccaccacggcgacagacccccccacatcatccacgtgcccgccgagcagatccagagccccagccccaccaccctgggcaagggcgagagcagaggcgtgttcctgcccggcctgcccacccccgccccctggctgggcgccgccccccagcagcagcagcagcagcagcagcagcagcagcagcagcagcaggcccccccccccccccagccccagcagcagccccagaccggccccagactgccccccagacagcccaccgtggccagccccgccgagagcgacgaggagaacagacagaagaccagacccagaaccaagatcagcgtggaggccctgggcatcctgcagagcttcatccaggacgtgggcctgtaccccgacgaggaggccatccagaccctgagcgcccagctggacctgcccaagtacaccatcatcaagttcttccagaaccagagatactacctgaagcaccacggcaagctgaaggacaacagcggcctggaggtggacgtggccgagtacaaggaggaggagctgctgaaggacctggaggagagcgtgcaggacaagaacaccaacaccctgttcagcgtgaagctggaggaggagctgagcgtggagggcaacaccgacatcaacaccgacctgaaggactag

SEQ ID NO: 98081 - DNA, 2202 bp, synthetic construct
  misc_feature 1..2202: note = Description of Artificial Sequence: Synthetic coding sequence
  source 1..2202: mol_type = other DNA
atggagagaagaagcgagagcccctgcctgagagacagccccgacagaagaagcggcagccccgacgtgaagggccccccccccgtgaaggtggccagactggagcagaacggcagccccatgggcgccagaggcagacccaacggcgccgtggccaaggccgtgggcggcctgatgatccccgtgttctgcgtggtggagcagctggacggcagcctggagtacgacaacagagaggagcacgccgagttcgtgctggtgagaaaggacgtgctgttcagccagctggtggagaccgccctgctggccctgggctacagccacagcagcgccgcccaggcccagggcatcatcaagctgggcagatggaaccccctgcccctgagctacgtgaccgacgcccccgacgccaccgtggccgacatgctgcaggacgtgtaccacgtggtgaccctgaagatccagctgcagagctgcagcaagctggaggacctgcccgccgagcagtggaaccacgccaccgtgagaaacgccctgaaggagctgctgaaggagatgaaccagagcaccctggccaaggagtgccccctgagccagagcatgatcagcagcatcgtgaacagcacctactacgccaacgtgagcgccaccaagtgccaggagttcggcagatggtacaagaagtacaagaagatcaaggtggagagagtggagagagagaacctgagcgactactgcgtgctgggccagagacccatgcacctgcccaacatgaaccagctggccagcctgggcaagaccaacgagcagagcccccacagccagatccaccacagcacccccatcagaaaccaggtgcccgccctgcagcccatcatgagccccggcctgctgagcccccagctgagcccccagctggtgagacagcagatcgccatggcccacctgatcaaccagcagatcgccgtgagcagactgctggcccaccagcacccccaggccatcaaccagcagttcctgaaccacccccccatccccagagccgtgaagcccgagcccaccaacagcagcgtggaggtgagccccgacatctaccagcaggtgagagacgagctgaagagagccagcgtgagccaggccgtgttcgccagagtggccttcaacagaacccagggcctgctgagcgagatcctgagaaaggaggaggaccccagaaccgccagccagagcctgctggtgaacctgagagccatgcagaacttcctgaacctgcccgaggtggagagagacagaatctaccaggacgagagagagagaagcatgaaccccaacgtgagcatggtgagcagcgccagcagcagccccagcagcagcagaaccccccaggccaagaccagcacccccaccaccgacctgcccatcaaggtggacggcgccaacatcaacatcaccgccgccatctacgacgagatccagcaggagatgaagagagccaaggtgagccaggccctgttcgccaaggtggccgccaacaagagccagggctggctgtgcgagctgctgagatggaaggagaaccccagccccgagaacagaaccctgtgggagaacctgtgcaccatcagaagattcctgaacctgccccagcacgagagagacgtgatctacgaggaggagagcagacaccaccacagcgagagaatgcagcacgtggtgcagctgccccccgagcccgtgcaggtgctgcacagacagcagagccagcccgccaaggagagcagcccccccagagaggaggccccccccccccccccccccaccgaggacagctgcgccaagaagcccagaagcagaaccaagatcagcctggaggccctgggcatcctgcagagcttcatccacgacgtgggcctgtaccccgaccaggaggccatccacaccctgagcgcccagctggacctgcccaagcacaccatcatcaagttcttccagaaccagagataccacgtgaagcaccacggcaagctgaaggagcacctgggcagcgccgtggacgtggccgagtacaaggacgaggagctgctgaccgagagcgaggagaacgacagcgaggagggcagcgaggagatgtacaaggtggaggccgaggaggagaacgccgacaagagcaaggccgcccccgccgagatcgaccagagatag

SEQ ID NO: 98082 - DNA, 2202 bp, synthetic construct; identical to SEQ ID NO: 98081
  misc_feature 1..2202: note = Description of Artificial Sequence: Synthetic coding sequence
  source 1..2202: mol_type = other DNA

SEQ ID NO: 98083 - DNA, 1848 bp, synthetic construct
  misc_feature 1..1848: note = Description of Artificial Sequence: Synthetic coding sequence
  source 1..1848: mol_type = other DNA
atggagagaagaagcgagagcccctgcctgagagacagccccgacagaagaagcggcagccccgacgtgaagggccccccccccgtgaaggtggccagactggagcagaacggcagccccatgggcgccagaggcagacccaacggcgccgtggccaaggccgtgggcggcctgatgatccccgtgttctgcgtggtggagcagctggacggcagcctggagtacgacaacagagaggagcacgccgagttcgtgctggtgagaaaggacgtgctgttcagccagctggtggagaccgccctgctggccctgggctacagccacagcagcgccgcccaggcccaggtggagagagtggagagagagaacctgagcgactactgcgtgctgggccagagacccatgcacctgcccaacatgaaccagctggccagcctgggcaagaccaacgagcagagcccccacagccagatccaccacagcacccccatcagaaaccaggtgcccgccctgcagcccatcatgagccccggcctgctgagcccccagctgagcccccagctggtgagacagcagatcgccatggcccacctgatcaaccagcagatcgccgtgagcagactgctggcccaccagcacccccaggccatcaaccagcagttcctgaaccacccccccatccccagagccgtgaagcccgagcccaccaacagcagcgtggaggtgagccccgacatctaccagcaggtgagagacgagctgaagagagccagcgtgagccaggccgtgttcgccagagtggccttcaacagaacccagggcctgctgagcgagatcctgagaaaggaggaggaccccagaaccgccagccagagcctgctggtgaacctgagagccatgcagaacttcctgaacctgcccgaggtggagagagacagaatctaccaggacgagagagagagaagcatgaaccccaacgtgagcatggtgagcagcgccagcagcagccccagcagcagcagaaccccccaggccaagaccagcacccccaccaccgacctgcccatcaaggtggacggcgccaacatcaacatcaccgccgccatctacgacgagatccagcaggagatgaagagagccaaggtgagccaggccctgttcgccaaggtggccgccaacaagagccagggctggctgtgcgagctgctgagatggaaggagaaccccagccccgagaacagaaccctgtgggagaacctgtgcaccatcagaagattcctgaacctgccccagcacgagagagacgtgatctacgaggaggagagcagacaccaccacagcgagagaatgcagcacgtggtgcagctgccccccgagcccgtgcaggtgctgcacagacagcagagccagcccgccaaggagagcagcccccccagagaggaggccccccccccccccccccccaccgaggacagctgcgccaagaagcccagaagcagaaccaagatcagcctggaggccctgggcatcctgcagagcttcatccacgacgtgggcctgtaccccgaccaggaggccatccacaccctgagcgcccagctggacctgcccaagcacaccatcatcaagttcttccagaaccagagataccacgtgaagcaccacggcaagctgaaggagcacctgggcagcgccgtggacgtggccgagtacaaggacgaggagctgctgaccgagagcgaggagaacgacagcgaggagggcagcgaggagatgtacaaggtggaggccgaggaggagaacgccgacaagagcaaggccgcccccgccgagatcgaccagagatag

SEQ ID NO: 98084 - DNA, 2202 bp, synthetic construct; identical to SEQ ID NO: 98081
  misc_feature 1..2202: note = Description of Artificial Sequence: Synthetic coding sequence
  source 1..2202: mol_type = other DNA

SEQ ID NO: 98085 - DNA, 2748 bp, synthetic construct
  misc_feature 1..2748: note = Description of Artificial Sequence: Synthetic coding sequence
  source 1..2748: mol_type = other DNA
atggccgagaccctgagcggcctgggcgacagcggcgccgccggcgccgccgccctgagcagcgccagcagcgagaccggcaccagaagactgagcgacctgagagtgatcgacctgagagccgagctgagaaagagaaacgtggacagcagcggcaacaagagcgtgctgatggagagactgaagaaggccatcgaggacgagggcggcaaccccgacgagatcgagatcaccagcgagggcaacaagaagaccagcaagagaagcagcaagggcagaaagcccgaggaggagggcgtggaggacaacggcctggaggagaacagcggcgacggccaggaggacgtggagaccagcctggagaacctgcaggacatcgacatcatggacatcagcgtgctggacgaggccgagatcgacaacggcagcgtggccgactgcgtggaggacgacgacgccgacaacctgcaggagagcctgagcgacagcagagagctggtggagggcgagatgaaggagctgcccgagcagctgcaggagcacgccatcgaggacaaggagaccatcaacaacctggacaccagcagcagcgacttcaccatcctgcaggagatcgaggagcccagcctggagcccgagaacgagaagatcctggacatcctgggcgagacctgcaagagcgagcccgtgaaggaggagagcagcgagctggagcagcccttcgcccaggacaccagcagcgtgggccccgacagaaagctggccgaggaggaggacctgttcgacagcgcccaccccgaggagggcgacctggacctggccagcgagagcaccgcccacgcccagagcagcaaggccgacagcctgctggccgtggtgaagagagagcccgccgagcagcccggcgacggcgagagaaccgactgcgagcccgtgggcctggagcccgccgtggagcagagcagcgccgccagcgagctggccgaggccagcagcgaggagctggccgaggcccccaccgaggcccccagccccgaggccagagacagcaaggaggacggcagaaagttcgacttcgacgcctgcaacgaggtgccccccgcccccaaggagagcagcaccagcgagggcgccgaccagaagatgagcagccccgaggacgacagcgacaccaagagactgagcaaggaggagaagggcagaagcagctgcggcagaaacttctgggtgagcggcctgagcagcaccaccagagccaccgacctgaagaacctgttcagcaagtacggcaaggtggtgggcgccaaggtggtgaccaacgccagaagccccggcgccagatgctacggcttcgtgaccatgagcaccgccgaggaggccaccaagtgcatcaaccacctgcacaagaccgagctgcacggcaagatgatcagcgtggagaaggccaagaacgagcccgtgggcaagaagaccagcgacaagagagacagcgacggcaagaaggagaagagcagcaacagcgacagaagcaccaacctgaagagagacgacaagtgcgacagaaaggacgacgccaagaagggcgacgacggcagcggcgagaagagcaaggaccaggacgaccagaagcccggccccagcgagagaagcagagccaccaagagcggcagcagaggcaccgagagaaccgtggtgatggacaagagcaagggcgtgcccgtgatcagcgtgaagaccagcggcagcaaggagagagccagcaagagccaggacagaaagagcgccagcagagagaagagaagcgtggtgagcttcgacaaggtgaaggagcccagaaagagcagagacagcgagagccacagcagagtgagagagagaagcgagagagagcagagaatgcaggcccagtgggagagagaggagagagagagactggagatcgccagagagagactggccttccagagacagagactggagagagagagaatggagagagagagactggagagagagagaatgcacgtggagcacgagagaagaagagagcaggagagaatccacagagagagagaggagctgagaagacagcaggagctgagatacgagcaggagagaagacccgccgtgagaagaccctacgacctggacagaagagacgacgcctactggcccgaggccaagagagccgccctggacgagagataccacagcgacttcaacagacaggacagattccacgacttcgaccacagagacagaggcagataccccgaccacagcgtggacagaagagagggcagcagaagcatgatgggcgagagagagggccagcactaccccgagagacacggcggccccgagagacacggcagagacagcagagacggctggggcggctacggcagcgacaagagaatgagcgagggcagaggcctgccccccccccccagaagagactggggcgaccacggcagaagagaggacgacagaagctggcagggcaccgccgacggcggcatgatggacagagaccacaagagatggcagggcggcgagagaagcatgagcggccacagcggccccggccacatgatgaacagaggcggcatgagcggcagaggcagcttcgcccccggcggcgccagcagaggccaccccatcccccacggcggcatgcagggcggcttcggcggccagagcagaggcagcagacccagcgacgccagattcaccagaagatactag

SEQ ID NO: 98086 - DNA, 2244 bp, synthetic construct
  misc_feature 1..2244: note = Description of Artificial Sequence: Synthetic coding sequence
  source 1..2244: mol_type = other DNA
atgaaggagctgcccgagcagctgcaggagcacgccatcgaggacaaggagaccatcaacaacctggacaccagcagcagcgacttcaccatcctgcaggagatcgaggagcccagcctggagcccgagaacgagaagatcctggacatcctgggcgagacctgcaagagcgagcccgtgaaggaggagagcagcgagctggagcagcccttcgcccaggacaccagcagcgtgggccccgacagaaagctggccgaggaggaggacctgttcgacagcgcccaccccgaggagggcgacctggacctggccagcgagagcaccgcccacgcccagagcagcaaggccgacagcctgctggccgtggtgaagagagagcccgccgagcagcccggcgacggcgagagaaccgactgcgagcccgtgggcctggagcccgccgtggagcagagcagcgccgccagcgagctggccgaggccagcagcgaggagctggccgaggcccccaccgaggcccccagccccgaggccagagacagcaaggaggacggcagaaagttcgacttcgacgcctgcaacgaggtgccccccgcccccaaggagagcagcaccagcgagggcgccgaccagaagatgagcagccccgaggacgacagcgacaccaagagactgagcaaggaggagaagggcagaagcagctgcggcagaaacttctgggtgagcggcctgagcagcaccaccagagccaccgacctgaagaacctgttcagcaagtacggcaaggtggtgggcgccaaggtggtgaccaacgccagaagccccggcgccagatgctacggcttcgtgaccatgagcaccgccgaggaggccaccaagtgcatcaaccacctgcacaagaccgagctgcacggcaagatgatcagcgtggagaaggccaagaacgagcccgtgggcaagaagaccagcgacaagagagacagcgacggcaagaaggagaagagcagcaacagcgacagaagcaccaacctgaagagagacgacaagtgcgacagaaaggacgacgccaagaagggcgacgacggcagcggcgagaagagcaaggaccaggacgaccagaagcccggccccagcgagagaagcagagccaccaagagcggcagcagaggcaccgagagaaccgtggtgatggacaagagcaagggcgtgcccgtgatcagcgtgaagaccagcggcagcaaggagagagccagcaagagccaggacagaaagagcgccagcagagagaagagaagcgtggtgagcttcgacaaggtgaaggagcccagaaagagcagagacagcgagagccacagcagagtgagagagagaagcgagagagagcagagaatgcaggcccagtgggagagagaggagagagagagactggagatcgccagagagagactggccttccagagacagagactggagagagagagaatggagagagagagactggagagagagagaatgcacgtggagcacgagagaagaagagagcaggagagaatccacagagagagagaggagctgagaagacagcaggagctgagatacgagcaggagagaagacccgccgtgagaagaccctacgacctggacagaagagacgacgcctactggcccgaggccaagagagccgccctggacgagagataccacagcgacttcaacagacaggacagattccacgacttcgaccacagagacagaggcagataccccgaccacagcgtggacagaagagagggcagcagaagcatgatgggcgagagagagggccagcactaccccgagagacacggcggccccgagagacacggcagagacagcagagacggctggggcggctacggcagcgacaagagaatgagcgagggcagaggcctgccccccccccccagaggcagaagagactggggcgaccacggcagaagagaggacgacagaagctggcagggcaccgccgacggcggcatgatggacagagaccacaagagatggcagggcggcgagagaagcatgagcggccacagcggccccggccacatgatgaacagaggcggcatgagcggcagaggcagcttcgcccccggcggcgccagcagaggccaccccatcccccacggcggcatgcagggcggcttcggcggccagagcagaggcagcagacccagcgacgccagattcaccagaagatactag

SEQ ID NO: 98087 - DNA, 2547 bp, synthetic construct
  misc_feature 1..2547: note = Description of Artificial Sequence: Synthetic coding sequence
  source 1..2547: mol_type = other DNA
atggccgagaccctgagcggcctgggcgacagcggcgccgccggcgccgccgccctgagcagcgccagcagcgagaccggcaccagaagactgagcgacctgagagtgatcgacctgagagccgagctgagaaagagaaacgtggacagcagcggcaacaagagcgtgctgatggagagactgaagaaggccatcgaggacgagggcggcaaccccgacgagatcgagatcaccagcgagggcaacaagaagaccagcaagagaagcagcaagggcagaaagcccgaggaggagggcgtggaggacaacggcctggaggagaacagcggcgacggccagatcgaggacaaggagaccatcaacaacctggacaccagcagcagcgacttcaccatcctgcaggagatcgaggagcccagcctggagcccgagaacgagaagatcctggacatcctgggcgagacctgcaagagcgagcccgtgaaggaggagagcagcgagctggagcagcccttcgcccaggacaccagcagcgtgggccccgacagaaagctggccgaggaggaggacctgttcgacagcgcccaccccgaggagggcgacctggacctggccagcgagagcaccgcccacgcccagagcagcaaggccgacagcctgctggccgtggtgaagagagagcccgccgagcagcccggcgacggcgagagaaccgactgcgagcccgtgggcctggagcccgccgtggagcagagcagcgccgccagcgagctggccgaggccagcagcgaggagctggccgaggcccccaccgaggcccccagccccgaggccagagacagcaaggaggacggcagaaagttcgacttcgacgcctgcaacgaggtgccccccgcccccaaggagagcagcaccagcgagggcgccgaccagaagatgagcagccccgaggacgacagcgacaccaagagactgagcaaggaggagaagggcagaagcagctgcggcagaaacttctgggtgagcggcctgagcagcaccaccagagccaccgacctgaagaacctgttcagcaagtacggcaaggtggtgggcgccaaggtggtgaccaacgccagaagccccggcgccagatgctacggcttcgtgaccatgagcaccgccgaggaggccaccaagtgcatcaaccacctgcacaagaccgagctgcacggcaagatgatcagcgtggagaaggccaagaacgagcccgtgggcaagaagaccagcgacaagagagacagcgacggcaagaaggagaagagcagcaacagcgacagaagcaccaacctgaagagagacgacaagtgcgacagaaaggacgacgccaagaagggcgacgacggcagcggcgagaagagcaaggaccaggacgaccagaagcccggccccagcgagagaagcagagccaccaagagcggcagcagaggcaccgagagaaccgtggtgatggacaagagcaagggcgtgcccgtgatcagcgtgaagaccagcggcagcaaggagagagccagcaagagccaggacagaaagagcgccagcagagagaagagaagcgtggtgagcttcgacaaggtgaaggagcccagaaagagcagagacagcgagagccacagcagagtgagagagagaagcgagagagagcagagaatgcaggcccagtgggagagagaggagagagagagactggagatcgccagagagagactggccttccagagacagagactggagagagagagaatggagagagagagactggagagagagagaatgcacgtggagcacgagagaagaagagagcaggagagaatccacagagagagagaggagctgagaagacagcaggagctgagatacgagcaggagagaagacccgccgtgagaagaccctacgacctggacagaagagacgacgcctactggcccgaggccaagagagccgccctggacgagagataccacagcgacttcaacagacaggacagattccacgacttcgaccacagagacagaggcagataccccgaccacagcgtggacagaagagagggcagcagaagcatgatgggcgagagagagggccagcactaccccgagagacacggcggccccgagagacacggcagagacagcagagacggctggggcggctacggcagcgacaagagaatgagcgagggcagaggcctgccccccccccccagaggcagaagagactggggcgaccacggcagaagagaggacgacagaagctggcagggcaccgccgacggcggcatgatggacagagaccacaagagatggcagggcggcgagagaagcatgagcggccacagcggccccggccacatgatgaacagaggcggcatgagcggcagaggcagcttcgcccccggcggcgccagcagaggccaccccatcccccacggcggcatgcagggcggcttcggcggccagagcagaggcagcagacccagcgacgccagattcaccagaagatactag

SEQ ID NO: 98088 - DNA, 2280 bp, synthetic construct
  misc_feature 1..2280: note = Description of Artificial Sequence: Synthetic coding sequence
  source 1..2280: mol_type = other DNA
atgaaggtggtgatcctgaccaagctgaagctgccccccagagagaccagaaagcaccagagaggcctggccaagatcgaggacaaggagaccatcaacaacctggacaccagcagcagcgacttcaccatcctgcaggagatcgaggagcccagcctggagcccgagaacgagaagatcctggacatcctgggcgagacctgcaagagcgagcccgtgaaggaggagagcagcgagctggagcagcccttcgcccaggacaccagcagcgtgggccccgacagaaagctggccgaggaggaggacctgttcgacagcgcccaccccgaggagggcgacctggacctggccagcgagagcaccgcccacgcccagagcagcaaggccgacagcctgctggccgtggtgaagagagagcccgccgagcagcccggcgacggcgagagaaccgactgcgagcccgtgggcctggagcccgccgtggagcagagcagcgccgccagcgagctggccgaggccagcagcgaggagctggccgaggcccccaccgaggcccccagccccgaggccagagacagcaaggaggacggcagaaagttcgacttcgacgcctgcaacgaggtgccccccgcccccaaggagagcagcaccagcgagggcgccgaccagaagatgagcagccccgaggacgacagcgacaccaagagactgagcaaggaggagaagggcagaagcagctgcggcagaaacttctgggtgagcggcctgagcagcaccaccagagccaccgacctgaagaacctgttcagcaagtacggcaaggtggtgggcgccaaggtggtgaccaacgccagaagccccggcgccagatgctacggcttcgtgaccatgagcaccgccgaggaggccaccaagtgcatcaaccacctgcacaagaccgagctgcacggcaagatgatcagcgtggagaaggccaagaacgagcccgtgggcaagaagaccagcgacaagagagacagcgacggcaagaaggagaagagcagcaacagcgacagaagcaccaacctgaagagagacgacaagtgcgacagaaaggacgacgccaagaagggcgacgacggcagcggcgagaagagcaaggaccaggacgaccagaagcccggccccagcgagagaagcagagccaccaagagcggcagcagaggcaccgagagaaccgtggtgatggacaagagcaagggcgtgcccgtgatcagcgtgaagaccagcggcagcaaggagagagccagcaagagccaggacagaaagagcgccagcagagagaagagaagcgtggtgagcttcgacaaggtgaaggagcccagaaagagcagagacagcgagagccacagagtgagagagagaagcgagagagagcagagaatgcaggcccagtgggagagagaggagagagagagactggagatcgccagagagagactggccttccagagacagagactggagagagagagaatggagagagagagactggagagagagagaatgcacgtggagcacgagagaagaagagagcaggagagaatccacagagagagagaggagctgagaagacagcaggagctgagatacgagcaggagagaagacccgccgtgagaagaccctacgacctggacagaagagacgacgcctactggcccgaggccaagagagccgccctggacgagagataccacagcgacttcaacagacaggacagattccacgacttcgaccacagagacagaggcagataccccgaccacagcgtggacagaagagagggcagcagaagcatgatgggcgagagagagggccagcactaccccgagagacacggcggccccgagagacacggcagagacagcagagacggctggggcggctacggcagcgacaagagaatgagcgagggcagaggcctgccccccccccccagaggcagaagagactggggcgaccacggcagaagagaggacgacagaagctggcagggcaccgccgacggcggcatgatggacagagaccacaagagatggcagggcggcgagagaagcatgagcggccacagcggccccggccacatgatgaacagaggcggcatgagcggcagaggcagcttcgcccccggcggcgccagcagaggccaccccatcccccacggcggcatgcagggcggcttcggcggccagagcagaggcagcagacccagcgacgccagattcaccagaagatactag

SEQ ID NO: 98089 - DNA, 2439 bp, synthetic construct
  misc_feature 1..2439: note = Description of Artificial Sequence: Synthetic coding sequence
  source 1..2439: mol_type = other DNA
atggccgagaccctgagcggcctgggcgacagcggcgccgccggcgccgccgccctgagcagcgccagcagcgagaccggcaccagaagactgagcgacctgagagtgatcgacctgagagccgagctgagaaagagaaacgtggacagcagcggcaacaagagcgtgctgatggagagactgaagaaggccatcgaggacgagggcggcaaccccgacgagatcgagatcaccagcgagggcaacaagaagaccagcaagagaagcagcaagggcagaaagcccgaggaggagggcgtggaggacaacggcctggagcccgagaacgagaagatcctggacatcctgggcgagacctgcaagagcgagcccgtgaaggaggagagcagcgagctggagcagcccttcgcccaggacaccagcagcgtgggccccgacagaaagctggccgaggaggaggacctgttcgacagcgcccaccccgaggagggcgacctggacctggccagcgagagcaccgcccacgcccagagcagcaaggccgacagcctgctggccgtggtgaagagagagcccgccgagcagcccggcgacggcgagagaaccgactgcgagcccgtgggcctggagcccgccgtggagcagagcagcgccgccagcgagctggccgaggccagcagcgaggagctggccgaggcccccaccgaggcccccagccccgaggccagagacagcaaggaggacggcagaaagttcgacttcgacgcctgcaacgaggtgccccccgcccccaaggagagcagcaccagcgagggcgccgaccagaagatgagcagccccgaggacgacagcgacaccaagagactgagcaaggaggagaagggcagaagcagctgcggcagaaacttctgggtgagcggcctgagcagcaccaccagagccaccgacctgaagaacctgttcagcaagtacggcaaggtggtgggcgccaaggtggtgaccaacgccagaagccccggcgccagatgctacggcttcgtgaccatgagcaccgccgaggaggccaccaagtgcatcaaccacctgcacaagaccgagctgcacggcaagatgatcagcgtggagaaggccaagaacgagcccgtgggcaagaagaccagcgacaagagagacagcgacggcaagaaggagaagagcagcaacagcgacagaagcaccaacctgaagagagacgacaagtgcgacagaaaggacgacgccaagaagggcgacgacggcagcggcgagaagagcaaggaccaggacgaccagaagcccggccccagcgagagaagcagagccaccaagagcggcagcagaggcaccgagagaaccgtggtgatggacaagagcaagggcgtgcccgtgatcagcgtgaagaccagcggcagcaaggagagagccagcaagagccaggacagaaagagcgccagcagagagaagagaagcgtggtgagcttcgacaaggtgaaggagcccagaaagagcagagacagcgagagccacagcagagtgagagagagaagcgagagagagcagagaatgcaggcccagtgggagagagaggagagagagagactggagatcgccagagagagactggccttccagagacagagactggagagagagagaatggagagagagagactggagagagagagaatgcacgtggagcacgagagaagaagagagcaggagagaatccacagagagagagaggagctgagaagacagcaggagctgagatacgagcaggagagaagacccgccgtgagaagaccctacgacctggacagaagagacgacgcctactggcccgaggccaagagagccgccctggacgagagataccacagcgacttcaacagacaggacagattccacgacttcgaccacagagacagaggcagataccccgaccacagcgtggacagaagagagggcagcagaagcatgatgggcgagagagagggccagcactaccccgagagacacggcggccccgagagacacggcagagacagcagagacggctggggcggctacggcagcgacaagagaatgagcgagggcagaggcctgccccccccccccagaggcagaagagactggggcgaccacggcagaagagaggacgacagaagctggcagggcaccgccgacggcggcatgatggacagagaccacaagagatggcagggcggcgagagaagcatgagcggccacagcggccccggccacatgatgaacagaggcggcatgagcggcagaggcagcttcgcccccggcggcgccagcagaggccaccccatcccccacggcggcatgcagggcggcttcggcggccagagcagaggcagcagacccagcgacgccagattcaccagaagatactag

SEQ ID NO: 98090 - DNA, 2862 bp, synthetic construct
  misc_feature 1..2862: note = Description of Artificial Sequence: Synthetic coding sequence
  source 1..2862: mol_type = other DNA
atggccgagaccctgcccggcagcggcgacagcggccccggcaccgccagcctgggccccggcgtggccgagaccggcaccagaagactgagcgagctgagagtgatcgacctgagagccgagctgaagaagagaaacctggacaccggcggcaacaagagcgtgctgatggagagactgaagaaggccgtgaaggaggagggccaggaccccgacgagatcggcatcgagctggaggccaccagcaagaagagcgccaagagatgcgtgaagggcctgaagatggaggaggagggcaccgaggacaacggcctggaggacgacagcagagacggccaggaggacatggaggccagcctggagaacctgcagaacatgggcatgatggacatgagcgtgctggacgagaccgaggtggccaacagcagcgcccccgacttcggcgaggacggcaccgacggcctgctggacagcttctgcgacagcaaggagtacgtggccgcccagctgagacagctgcccgcccagccccccgagcacgccgtggacggcgagggcttcaagaacaccctggagaccagcagcctgaacttcaaggtgacccccgacatcgaggagagcctgctggagcccgagaacgagaagatcctggacatcctgggcgagacctgcaagagcgagcccgtgaaggaggagagcagcgagctggagcagcccttcgcccaggacaccagcagcgtgggccccgacagaaagctggccgaggaggaggacctgttcgacagcgcccaccccgaggagggcgacctggacctggccagcgagagcaccgcccacgcccagagcagcaaggccgacagcctgctggccgtggtgaagagagagcccgccgagcagcccggcgacggcgagagaaccgactgcgagcccgtgggcctggagcccgccgtggagcagagcagcgccgccagcgagctggccgaggccagcagcgaggagctggccgaggcccccaccgaggcccccagccccgaggccagagacagcaaggaggacggcagaaagttcgacttcgacgcctgcaacgaggtgccccccgcccccaaggagagcagcaccagcgagggcgccgaccagaagatgagcagcttcaaggaggagaaggacatcaagcccatcatcaaggacgagaagggcagagtgggcagcggcagcggcagaaacctgtgggtgagcggcctgagcagcaccaccagagccaccgacctgaagaacctgttcagcaagtacggcaaggtggtgggcgccaaggtggtgaccaacgccagaagccccggcgccagatgctacggcttcgtgaccatgagcaccagcgacgaggccaccaagtgcatcagccacctgcacagaaccgagctgcacggcagaatgatcagcgtggagaaggccaagaacgagcccgccggcaagaagctgagcgacagaaaggagtgcgaggtgaagaaggagaagctgagcagcgtggacagacaccacagcgtggagatcaagatcgagaagaccgtgatcaagaaggaggagaagatcgagaagaaggaggagaagaagcccgaggacatcaagaaggaggagaaggaccaggacgagctgaagcccggccccaccaacagaagcagagtgaccaagagcggcagcagaggcatggagagaaccgtggtgatggacaagagcaagggcgagcccgtgatcagcgtgaagaccaccagcagaagcaaggagagaagcagcaagagccaggacagaaagagcgagagcaaggagaagagagacatcctgagcttcgacaagatcaaggagcagagagagagagagagacagagacagagagagagagagatcagagagaccgagagaagaagagagagagagcagagagagagagagcagagactggaggccttccacgagagaaaggagaaggccagactgcagagagagagactgcagctggagtgccagagacagagactggagagagagagaatggagagagagagactggagagagagagaatgagagtggagagagagagaagaaaggagcaggagagaatccacagagagagagaggagctgagaagacagcaggagcagctgagatacgagcaggagagaagacccggcagaagaccctacgacctggacagaagagacgacgcctactggcccgagggcaagagagtggccatggaggacagatacagagccgacttccccagacccgaccacagattccacgacttcgaccacagagacagaggccagtaccaggaccacgccatcgacagaagagagggcagcagacccatgatgggcgaccacagagacggccagcactacggcgacgacagacacggccacggcggcccccccgagagacacggcagagacagcagagacggctggggcggctacggcagcgacaagagactgagcgagggcagaggcctgccccccccccccagaggcggcagagactggggcgagcacaaccagagactggaggagcaccaggccagagcctggcagggcgccatggacgccggcgccgccagcagagagcacgccagatggcagggcggcgagagaggcctgagcggccccagcggccccggccacatggccagcagaggcggcgtggccggcagaggcggcttcgcccagggcggccacagccagggccacgtggtgcccggcggcggcctggagggcggcggcgtggccagccaggacagaggcagcagagtgccccacccccacccccacccccccccctacccccacttcaccagaagatactag

SEQ ID NO: 98091 - DNA, 1533 bp, synthetic construct
  misc_feature 1..1533: note = Description of Artificial Sequence: Synthetic coding sequence
  source 1..1533: mol_type = other DNA
atggccgagaccctgcccggcagcggcgacagcggccccggcaccgccagcctgggccccggcgtggccgagaccggcaccagaagactgagcgagctgagagtgatcgacctgagagccgagctgaagaagagaaacctggacaccggcggcaacaagagcgtgctgatggagagactgaagaaggccgtgaaggaggagggccaggaccccgacgagatcggcatcgagctggaggccaccagcaagaagagcgccaagagatgcgtgaagggcctgaagatggaggaggagggcaccgaggacaacggcctggaggacgacagcagagacggccaggaggacatggaggccagcctggagaacctgcagaacatgggcatgatggacatgagcgtgctggacgagaccgaggtggccaacagcagcgcccccgacttcggcgaggacggcaccgacggcctgctggacagcttctgcgacagcaaggagtacgtggccgcccagctgagacagctgcccgcccagccccccgagcacgccgtgggcaacctggagaccagacaggacgtgcccaccagcagcagcctgagagtgagcgtggccgccgtgcccgtgccccacctgagcgtggagaacgagaagatcctggacatcctgggcgagacctgcaagagcgagcccgtgaaggaggagagcagcgagctggagcagcccttcgcccaggacaccagcagcgtgggccccgacagaaagctggccgaggaggaggacctgttcgacagcgcccaccccgaggagggcgacctggacctggccagcgagagcaccgcccacgcccagagcagcaaggccgacagcctgctggccgtggtgaagagagagcccgccgagcagcccggcgacggcgagagaaccgactgcgagcccgtgggcctggagcccgccgtggagcagagcagcgccgccagcgagctggccgaggccagcagcgaggagctggccgaggcccccaccgaggcccccagccccgaggccagagacagcaaggaggacggcagaaagttcgacttcgacgcctgcaacgaggtgccccccgcccccaaggagagcagcaccagcgagggcgccgaccagaagatgagcagcttcaaggaggagaaggacatcaagcccatcatcaaggacgagaagggcagagtgggcagcggcagcggcagaaacctgtgggtgagcggcctgagcagcaccaccagagccaccgacctgaagaacctgttcagcaagtacggcaaggtggtgggcgccaaggtggtgaccaacgccagaagccccggcgccagatgctacggcttcgtgaccatgagcaccagcgacgaggccaccaagtgcatcagccacctgcacagaaccgagctgcacggcagaatgatcagcgtggagaaggccaagaacgagcccgccggcaagaagctgagcgacagaaaggagtgcgaggtgaagaaggagaagctgagcagcgtggacagatag

SEQ ID NO: 98092 - DNA, 786 bp, synthetic construct
  misc_feature 1..786: note = Description of Artificial Sequence: Synthetic coding sequence
  source 1..786: mol_type = other DNA
atggccgagaccctgcccggcagcggcgacagcggccccggcaccgccagcctgggccccggcgtggccgagaccggcaccagaagactgagcgagctgagagtgatcgacctgagagccgagctgaagaagagaaacctggacaccggcggcaacaagagcgtgctgatggagagactgaagaaggccgtgaaggaggagggccaggaccccgacgagatcggcatcgagctggaggccaccagcaagaagagcgccaagagatgcgtgaaggcccccagccccgaggccagagacagcaaggaggacggcagaaagttcgacttcgacgcctgcaacgaggtgccccccgcccccaaggagagcagcaccagcgagggcgccgaccagaagatgagcagcttcaaggaggagaaggacatcaagcccatcatcaaggacgagaagggcagagtgggcagcggcagcggcagaaacctgtgggtgagcggcctgagcagcaccaccagagccaccgacctgaagaacctgttcagcaagtacggcaaggtggtgggcgccaaggtggtgaccaacgccagaagccccggcgccagatgctacggcttcgtgaccatgagcaccagcgacgaggccaccaagtgcatcagccacctgcacagaaccgagctgcacggcagaatgatcagcgtggagaaggccaagaacgagcccgccggcaagaagctgagcgacagaaaggagtgcgaggtgaagaaggagaagctgagcagcgtggacagatag

SEQ ID NO: 98093 - DNA, 1221 bp, synthetic construct
  misc_feature 1..1221: note = Description of Artificial Sequence: Synthetic coding sequence
  source 1..1221: mol_type = other DNA
atggccgagaccctgcccggcagcggcgacagcggccccggcaccgccagcctgggccccggcgtggccgagaccggcaccagaagactgagcgagctgagagtgatcgacctgagagccgagctgaagaagagaaacctggacaccggcggcaacaagagcgtgctgatggagagactgaagaaggccgtgaaggaggagggccaggaccccgacgagatcggcatcgagctggaggccaccagcaagaagagcgccaagagatgcgtgaagggcctgaagatggaggaggagggcaccgaggacaacggcctggaggtggagaacgagaagatcctggacatcctgggcgagacctgcaagagcgagcccgtgaaggaggagagcagcgagctggagcagcccttcgcccaggacaccagcagcgtgggccccgacagaaagctggccgaggaggaggacctgttcgacagcgcccaccccgaggagggcgacctggacctggccagcgagagcaccgcccacgcccagagcagcaaggccgacagcctgctggccgtggtgaagagagagcccgccgagcagcccggcgacggcgagagaaccgactgcgagcccgtgggcctggagcccgccgtggagcagagcagcgccgccagcgagctggccgaggccagcagcgaggagctggccgaggcccccaccgaggcccccagccccgaggccagagacagcaaggaggacggcagaaagttcgacttcgacgcctgcaacgaggtgccccccgcccccaaggagagcagcaccagcgagggcgccgaccagaagatgagcagcttcaaggaggagaaggacatcaagcccatcatcaaggacgagaagggcagagtgggcagcggcagcggcagaaacctgtgggtgagcggcctgagcagcaccaccagagccaccgacctgaagaacctgttcagcaagtacggcaaggtggtgggcgccaaggtggtgaccaacgccagaagccccggcgccagatgctacggcttcgtgaccatgagcaccagcgacgaggccaccaagtgcatcagccacctgcacagaaccgagctgcacggcagaatgatcagcgtggagaaggccaagaacgagcccgccggcaagaagctgagcgacagaaaggagtgcgaggtgaagaaggagaagctgagcagcgtggacagatag

SEQ ID NO: 98094 - DNA, 606 bp, synthetic construct
  misc_feature 1..606: note = Description of Artificial Sequence: Synthetic coding sequence
  source 1..606: mol_type = other DNA
atggccgagaccggcaccagaagactgagcgagctgagagtgatcgacctgagagccgagctgaagaagagaaacctggacaccggcggcaacaagagcgtgctgatggagagactgaagaaggccgtgaaggaggagggccaggaccccgacgagatcggcatcgagctggaggccaccagcaagaagagcgccaagagatgcgtgaagggcctgaagatggaggaggagggcaccgaggacaacggcctggaggacgacagcagagacggccaggaggacatggaggccagcctggagaacctgcagaacatgggcatgatggacatgagcgtgctggacgagaccgaggtggccaacagcagcgcccccgacttcggcgaggacggcaccgacggcctgctggacagcttctgcgacagcaaggagtacgtggccgcccagctgagacagctgcccgcccagccccccgagcacgccgtggacggcgagggcttcaagaacaccctggagaccagcagcctgaacttcaaggtgacccccgacatcgaggagagcctgctggagcccggcaccgacaagagaaacaccaccgtgatggtgtag

SEQ ID NO: 98095 - DNA, 1821 bp, synthetic construct
  misc_feature 1..1821: note = Description of Artificial Sequence: Synthetic coding sequence
  source 1..1821: mol_type = other DNA
atgaaggtgagaagcgccggcggcgacggcgacgccctgtgcgtgaccgaggaggacctggccggcgacgacgaggacatgcccaccttcccctgcacccagaagggcagacccggccccagatgcagcagatgccagaagaacctgagcctgcacaccagcgtgagaatcctgtacctgttcctggccctgctgctggtggccgtggccgtgctggccagcctggtgttcagaaaggtggacagcctgagcgaggacatcagcctgacccagagcatctacgacaagaagctggtgctgatgcagaagaacctgcagggcctggaccccaaggccctgaacaactgcagcttctgccacgaggccggccagctgggccccgagatcagaaagctgcaggaggagctggagggcatccagaagctgctgctggcccaggaggtgcagctggaccagaccctgcaggcccaggaggtgctgagcaccaccagcagacagatcagccaggagatgggcagctgcagcttcagcatccaccaggtgaaccagagcctgggcctgttcctggcccaggtgagaggctggcaggccaccaccgccggcctggacctgagcctgaaggacctgacccaggagtgctacgacgtgaaggccgccgtgcaccagatcaacttcaccgtgggccagaccagcgagtggatccacggcatccagagaaagaccgacgaggagaccctgaccctgcagaagatcgtgaccgactggcagaactacaccagactgttcagcggcctgagaaccaccagcaccaagaccggcgaggccgtgaagaacatccaggccaccctgggcgccagcagccagagaatcagccagaacagcgagagcatgcacgacctggtgctgcaggtgatgggcctgcagctgcagctggacaacatcagcagcttcctggacgaccacgaggagaacatgcacgacctgcagtaccacacccactacgcccagaacagaaccgtggagagattcgagagcctggagggcagaatggccagccacgagatcgagatcggcaccatcttcaccaacatcaacgccaccgacaaccacgtgcacagcatgctgaagtacctggacgacgtgagactgagctgcaccctgggcttccacacccacgccgaggagctgtactacctgaacaagagcgtgagcatcatgctgggcaccaccgacctgctgagagagagattcagcctgctgagcgccagactggacctgaacgtgagaaacctgagcatgatcgtggaggagatgaaggccgtggacacccagcacggcgagatcctgagaaacgtgaccatcctgagaggcgcccccggcccccccggccccagaggcttcaagggcgacatgggcgtgaagggccccgtgggcggcagaggccccaagggcgaccccggcagcctgggccccctgggcccccagggcccccagggccagcccggcgaggccggccccgtgggcgagagaggccccgtgggccccagaggcttccccggcctgaagggcagcaagggcagcttcggcaccggcggccccagaggccagcccggccccaagggcgacatcggcccccccggccccgagggcccccccggcagccccggccccagcggcccccagggcaagcccggcatcgccggcaagaccggcagccccggccagagaggcgccatgggccccaagggcgagcccggcatccagggcccccccggcctgcccggcccccccggcccccccggcagccagagcttctactag

SEQ ID NO: 98096 - DNA, 1401 bp, synthetic construct
  misc_feature 1..1401: note = Description of Artificial Sequence: Synthetic coding sequence
  source 1..1401: mol_type = other DNA
atgaaggtgagaagcgccggcggcgacggcgacgccctgtgcgtgaccgaggaggacctggccggcgacgacgaggacatgcccaccttcccctgcacccagaagggcagacccggccccagatgcagcagatgccagaagaacctgagcctgcacaccagcgtgagaatcctgtacctgttcctggccctgctgctggtggccgtggccgtgctggccagcctggtgttcagaaaggtggacagcctgagcgaggacatcagcctgacccagagcatctacgacaagaagctggtgctgatgcagaagaacctgcagggcctggaccccaaggccctgaacaactgcagcttctgccacgaggccggccagctgggccccgagatcagaaagctgcaggaggagctggagggcatccagaagctgctgctggcccaggaggtgcagctggaccagaccctgcaggcccaggaggtgctgagcaccaccagcagacagatcagccaggagatgggcagctgcagcttcagcatccaccaggtgaaccagagcctgggcctgttcctggcccaggtgagaggctggcaggccaccaccgccggcctggacctgagcctgaaggacctgacccaggagtgctacgacgtgaaggccgccgtgcaccagatcaacttcaccgtgggccagaccagcgagtggatccacggcatccagagaaagaccgacgaggagaccctgaccctgcagaagatcgtgaccgactggcagaactacaccagactgttcagcggcctgagaaccaccagcaccaagaccggcgaggccgtgaagaacatccaggccaccctgggcgccagcagccagagaatcagccagaacagcgagagcatgcacgacctggtgctgcaggtgatgggcctgcagctgcagctggacaacatcagcagcttcctggacgaccacgaggagaacatgcacgacctgcagtaccacacccactacgcccagaacagaaccgtggagagattcgagagcctggagggcagaatggccagccacgagatcgagatcggcaccatcttcaccaacatcaacgccaccgacaaccacgtgcacagcatgctgaagtacctggacgacgtgagactgagctgcaccctgggcttccacacccacgccgaggagctgtactacctgaacaagagcgtgagcatcatgctgggcaccaccgacctgctgagagagagattcagcctgctgagcgccagactggacctgaacgtgagaaacctgagcatgatcgtggaggagatgaaggccgtggacacccagcacggcgagatcctgagaaacgtgaccatcctgagaggccacaccctgttcagccacaacagaatctag

SEQ ID NO: 98097 - DNA, 1008 bp, synthetic construct
  misc_feature 1..1008: note = Description of Artificial Sequence: Synthetic coding sequence
  source 1..1008: mol_type = other DNA
atgggcagatgctgcttctacaccgccggcaccctgagcctgctgctgctggtgaccagcgtgaccctgctggtggccagagtgttccagaaggccgtggaccagagcatcgagaagaagatcgtgctgagaaacggcaccgaggccttcgacagctgggagaagccccccctgcccgtgtacacccagttctacttcttcaacgtgaccaaccccgaggagatcctgagaggcgagacccccagagtggaggaggtgggcccctacacctacagaagcctggactggtggatcaccgacaagtgcaacatgatcaacggcaccgacggcgacagcttccaccccctgatcaccaaggacgaggtgctgtacgtgttccccagcgacttctgcagaagcgtgtacatcaccttcagcgactacgagagcgtgcagggcctgcccgccttcagatacaaggtgcccgccgagatcctggccaacaccagcgacaacgccggcttctgcatccccgagggcaactgcctgggcagcggcgtgctgaacgtgagcatctgcaagaacggcgcccccatcatcatgagcttcccccacttctaccaggccgacgagagattcgtgagcgccatcgagggcatgcaccccaaccaggaggaccacgagaccttcgtggacatcaaccccctgaccggcatcatcctgaaggccgccaagagattccagatcaacatctacgtgaagaagctggacgacttcgtggagaccggcgacatcagaaccatggtgttccccgtgatgtacctgaacgagagcgtgcacatcgacaaggagaccgccagcagactgaagagcatgatcaacaccaccctgatcatcaccaacatcccctacatcatcatggccctgggcgtgttcttcggcctggtgttcacctggctggcctgcaagggccagggcagcatggacgagggcaccgccgacgagagagcccccctgatcagaacctag

SEQ ID NO: 98098 - DNA, 1530 bp, synthetic construct
  misc_feature 1..1530: note = Description of Artificial Sequence: Synthetic coding sequence
  source 1..1530: mol_type = other DNA
atgggctgcagcgccaaggccagatgggccgccggcgccctgggcgtggccggcctgctgtgcgccgtgctgggcgccgtgatgatcgtgatggtgcccagcctgatcaagcagcaggtgctgaagaacgtgagaatcgaccccagcagcctgagcttcaacatgtggaaggagatccccatccccttctacctgagcgtgtacttcttcgacgtgatgaaccccagcgagatcctgaagggcgagaagccccaggtgagagagagaggcccctacgtgtacagagagttcagacacaagagcaacatcaccttcaacaacaacgacaccgtgagcttcctggagtacagaaccttccagttccagcccagcaagagccacggcagcgagagcgactacatcgtgatgcccaacatcctggtgctgggcgccgccgtgatgatggagaacaagcccatgaccctgaagctgatcatgaccctggccttcaccaccctgggcgagagagccttcatgaacagaaccgtgggcgagatcatgtggggctacaaggaccccctggtgaacctgatcaacaagtacttccccggcatgttccccttcaaggacaagttcggcctgttcgccgagctgaacaacagcgacagcggcctgttcaccgtgttcaccggcgtgcagaacatcagcagaatccacctggtggacaagtggaacggcctgagcaaggtggacttctggcacagcgaccagtgcaacatgatcaacggcaccagcggccagatgtggccccccttcatgacccccgagagcagcctggagttctacagccccgaggcctgcagaagcatgaagctgatgtacaaggagagcggcgtgttcgagggcatccccacctacagattcgtggcccccaagaccctgttcgccaacggcagcatctacccccccaacgagggcttctgcccctgcctggagagcggcatccagaacgtgagcacctgcagattcagcgcccccctgttcctgagccacccccacttcctgaacgccgaccccgtgctggccgaggccgtgaccggcctgcaccccaaccaggaggcccacagcctgttcctggacatccaccccgtgaccggcatccccatgaactgcagcgtgaagctgcagctgagcctgtacatgaagagcgtggccggcatcggccagaccggcaagatcgagcccgtggtgctgcccctgctgtggttcgccgagagcggcgccatggagggcgagaccctgcacaccttctacacccagctggtgctgatgcccaaggtgatgcactacgcccagtacgtgctgctggccctgggctgcgtgctgctgctggtgcccgtgatctgccagatcagaagccaggagaagtgctacctgttctggagcagcagcaagaagggcagcaaggacaaggaggccatccaggcctacagcgagagcctgatgaccagcgcccccaagggcagcgtgctgcaggaggccaagctgtag

SEQ ID NO: 98099 - DNA, 1521 bp, synthetic construct
  misc_feature 1..1521: note = Description of Artificial Sequence: Synthetic coding sequence
  source 1..1521: mol_type = other DNA
atgggctgcagcgccaaggccagatgggccgccggcgccctgggcgtggccggcctgctgtgcgccgtgctgggcgccgtgatgatcgtgatggtgcccagcctgatcaagcagcaggtgctgaagaacgtgagaatcgaccccagcagcctgagcttcaacatgtggaaggagatccccatccccttctacctgagcgtgtacttcttcgacgtgatgaaccccagcgagatcctgaagggcgagaagccccaggtgagagagagaggcccctacgtgtacagagagttcagacacaagagcaacatcaccttcaacaacaacgacaccgtgagcttcctggagtacagaaccttccagttccagcccagcaagagccacggcagcgagagcgactacatcgtgatgcccaacatcctggtgctgggcgccgccgtgatgatggagaacaagcccatgaccctgaagctgatcatgaccctggccttcaccaccctgggcgagagagccttcatgaacagaaccgtgggcgagatcatgtggggctacaaggaccccctggtgaacctgatcaacaagtacttccccggcatgttccccttcaaggacaagttcggcctgttcgccgagctgaacaacagcgacagcggcctgttcaccgtgttcaccggcgtgcagaacatcagcagaatccacctggtggacaagtggaacggcctgagcaaggtggacttctggcacagcgaccagtgcaacatgatcaacggcaccagcggccagatgtggccccccttcatgacccccgagagcagcctggagttctacagccccgaggcctgcagaagcatgaagctgatgtacaaggagagcggcgtgttcgagggcatccccacctacagattcgtggcccccaagaccctgttcgccaacggcagcatctacccccccaacgagggcttctgcccctgcctggagagcggcatccagaacgtgagcacctgcagattcagcgcccccctgttcctgagccacccccacttcctgaacgccgaccccgtgctggccgaggccgtgaccggcctgcaccccaaccaggaggcccacagcctgttcctggacatccaccccgtgaccggcatccccatgaactgcagcgtgaagctgcagctgagcctgtacatgaagagcgtggccggcatcggccagaccggcaagatcgagcccgtggtgctgcccctgctgtggttcgccgagagcggcgccatggagggcgagaccctgcacaccttctacacccagctggtgctgatgcccaaggtgatgcactacgcccagtacgtgctgctggccctgggctgcgtgctgctgctggtgcccgtgatctgccagatcagaagccagggccccgaggacaccgtgagccagcccggcctggccgccggccccgacagaccccccagcccctacacccccctgctgcccgacagccccagcggccagccccccagccccaccgcctag

SEQ ID NO: 98100 - DNA, 1230 bp, synthetic construct
  misc_feature 1..1230: note = Description of Artificial Sequence: Synthetic coding sequence
  source 1..1230: mol_type = other DNA
atgggctgcagcgccaaggccagatgggccgccggcgccctgggcgtggccggcctgctgtgcgccgtgctgggcgccgtgatgatcgtgatggtgcccagcctgatcaagcagcaggtgctgaagggcgccgccgtgatgatggagaacaagcccatgaccctgaagctgatcatgaccctggccttcaccaccctgggcgagagagccttcatgaacagaaccgtgggcgagatcatgtggggctacaaggaccccctggtgaacctgatcaacaagtacttccccggcatgttccccttcaaggacaagttcggcctgttcgccgagctgaacaacagcgacagcggcctgttcaccgtgttcaccggcgtgcagaacatcagcagaatccacctggtggacaagtggaacggcctgagcaaggtggacttctggcacagcgaccagtgcaacatgatcaacggcaccagcggccagatgtggccccccttcatgacccccgagagcagcctggagttctacagccccgaggcctgcagaagcatgaagctgatgtacaaggagagcggcgtgttcgagggcatccccacctacagattcgtggcccccaagaccctgttcgccaacggcagcatctacccccccaacgagggcttctgcccctgcctggagagcggcatccagaacgtgagcacctgcagattcagcgcccccctgttcctgagccacccccacttcctgaacgccgaccccgtgctggccgaggccgtgaccggcctgcaccccaaccaggaggcccacagcctgttcctggacatccaccccgtgaccggcatccccatgaactgcagcgtgaagctgcagctgagcctgtacatgaagagcgtggccggcatcggccagaccggcaagatcgagcccgtggtgctgcccctgctgtggttcgccgagagcggcgccatggagggcgagaccctgcacaccttctacacccagctggtgctgatgcccaaggtgatgcactacgcccagtacgtgctgctggccctgggctgcgtgctgctgctggtgcccgtgatctgccagatcagaagccaggagaagtgctacctgttctggagcagcagcaagaagggcagcaaggacaaggaggccatccaggcctacagcgagagcctgatgaccagcgcccccaagggcagcgtgctgcaggaggccaagctgtag

SEQ ID NO: 98101 - DNA, 1659 bp, synthetic construct
  misc_feature 1..1659: note = Description of Artificial Sequence: Synthetic coding sequence
  source 1..1659: mol_type = other DNA
atgggctgcagcgccaaggccagatgggccgccggcgccctgggcgtggccggcctgctgtgcgccgtgctgggcgccgtgatgatcgtgatggtgcccagcctgatcaagcagcaggtgctgaagaacgtgagaatcgaccccagcagcctgagcttcaacatgtggaaggagatccccatccccttctacctgagcgtgtacttcttcgacgtgatgaaccccagcgagatcctgaagggcgagaagccccaggtgagagagagaggcccctacgtgtacagagagttcagacacaagagcaacatcaccttcaacaacaacgacaccgtgagcttcctggagtacagaaccttccagttccagcccagcaagagccacggcagcgagagcgactacatcgtgatgcccaacatcctggtgctgggcgccgccgtgatgatggagaacaagcccatgaccctgaagctgatcatgaccctggccttcaccaccctgggcgagagagccttcatgaacagaaccgtgggcgagatcatgtggggctacaaggaccccctggtgaacctgatcaacaagtacttccccggcatgttccccttcaaggacaagttcggcctgttcgccgagctgaacaacagcgacagcggcctgttcaccgtgttcaccggcgtgcagaacatcagcagaatccacctggtggacaagtggaacggcctgagcaaggtggacttctggcacagcgaccagtgcaacatgatcaacggcaccagcggccagatgtggccccccttcatgacccccgagagcagcctggagttctacagccccgaggcctgcagaagcatgaagctgatgtacaaggagagcggcgtgttcgagggcatccccacctacagattcgtggcccccaagaccctgttcgccaacggcagcatctacccccccaacgagggcttctgcccctgcctggagagcggcatccagaacgtgagcacctgcagattcagcgcccccctgttcctgagccacccccacttcctgaacgccgaccccgtgctggccgaggccgtgaccggcctgcaccccaaccaggaggcccacagcctgttcctggacatccaccccgtgaccggcatccccatgaactgcagcgtgaagctgcagctgagcctgtacatgaagagcgtggccggcatcggccagaccggcaagatcgagcccgtggtgctgcccctgctgtggttcgccgagagcggcgccatggagggcgagaccctgcacaccttctacacccagctggtgctgatgcccaaggtgatgcactacgcccagtacgtgctgctggccctgggctgcgtgctgctgctggtgcccgtgatctgccagatcagaagccaggtgggcgccggccagagagccgccagagccgacagccacagcctggcctgctggggcaagggcgccagcgacagaaccctgtggcccaccgccgcctggagccccccccccgccgccgtgctgagactgtgcagaagcggcagcggccactgctggggcctgagaagcaccctggccagcttcgcctgcagagtggccaccaccctgcccgtgctggagggcctgggccccagcctgggcggcggcaccggcagctag

SEQ ID NO: 98102 - DNA, 1551 bp, synthetic construct
  misc_feature 1..1551: note = Description of Artificial Sequence: Synthetic coding sequence
  source 1..1551: mol_type = other DNA
atgtgcgccgtgggcaacgtgagaatcgaccccagcagcctgagcttcaacatgtggaaggagatccccatccccttctacctgagcgtgtacttcttcgacgtgatgaaccccagcgagatcctgaagggcgagaagccccaggtgagagagagaggcccctacgtgtacagagagttcagacacaagagcaacatcaccttcaacaacaacgacaccgtgagcttcctggagtacagaaccttccagttccagcccagcaagagccacggcagcgagagcgactacatcgtgatgcccaacatcctggtgctgggcgccgccgtgatgatggagaacaagcccatgaccctgaagctgatcatgaccctggccttcaccaccctgggcgagagagccttcatgaacagaaccgtgggcgagatcatgtggggctacaaggaccccctggtgaacctgatcaacaagtacttccccggcatgttccccttcaaggacaagttcggcctgttcgccgagctgaacaacagcgacagcggcctgttcaccgtgttcaccggcgtgcagaacatcagcagaatccacctggtggacaagtggaacggcctgagcaaggtggacttctggcacagcgaccagtgcaacatgatcaacggcaccagcggccagatgtggccccccttcatgacccccgagagcagcctggagttctacagccccgaggcctgcagaagcatgaagctgatgtacaaggagagcggcgtgttcgagggcatccccacctacagattcgtggcccccaagaccctgttcgccaacggcagcatctacccccccaacgagggcttctgcccctgcctggagagcggcatccagaacgtgagcacctgcagattcagcgcccccctgttcctgagccacccccacttcctgaacgccgaccccgtgctggccgaggccgtgaccggcctgcaccccaaccaggaggcccacagcctgttcctggacatccaccccgtgaccggcatccccatgaactgcagcgtgaagctgcagctgagcctgtacatgaagagcgtggccggcatcggccagaccggcaagatcgagcccgtggtgctgcccctgctgtggttcgccgagagcggcgccatggagggcgagaccctgcacaccttctacacccagctggtgctgatgcccaaggtgatgcactacgcccagtacgtgctgctggccctgggctgcgtgctgctgctggtgcccgtgatctgccagatcagaagccaggtgggcgccggccagagagccgccagagccgacagccacagcctggcctgctggggcaagggcgccagcgacagaaccctgtggcccaccgccgcctggagccccccccccgccgccgtgctgagactgtgcagaagcggcagcggccactgctggggcctgagaagcaccctggccagcttcgcctgcagagtggccaccaccctgcccgtgctggagggcctgggccccagcctgggcggcggcaccggcggcctgtag

SEQ ID NO: 98103 - DNA, 1539 bp, synthetic construct
  misc_feature 1..1539: note = Description of Artificial Sequence: Synthetic coding sequence
  source 1..1539: mol_type = other DNA
atgaacgtgagaatcgaccccagcagcctgagcttcaacatgtggaaggagatccccatccccttctacctgagcgtgtacttcttcgacgtgatgaaccccagcgagatcctgaagggcgagaagccccaggtgagagagagaggcccctacgtgtacagagagttcagacacaagagcaacatcaccttcaacaacaacgacaccgtgagcttcctggagtacagaaccttccagttccagcccagcaagagccacggcagcgagagcgactacatcgtgatgcccaacatcctggtgctgggcgccgccgtgatgatggagaacaagcccatgaccctgaagctgatcatgaccctggccttcaccaccctgggcgagagagccttcatgaacagaaccgtgggcgagatcatgtggggctacaaggaccccctggtgaacctgatcaacaagtacttccccggcatgttccccttcaaggacaagttcggcctgttcgccgagctgaacaacagcgacagcggcctgttcaccgtgttcaccggcgtgcagaacatcagcagaatccacctggtggacaagtggaacggcctgagcaaggtggacttctggcacagcgaccagtgcaacatgatcaacggcaccagcggccagatgtggccccccttcatgacccccgagagcagcctggagttctacagccccgaggcctgcagaagcatgaagctgatgtacaaggagagcggcgtgttcgagggcatccccacctacagattcgtggcccccaagaccctgttcgccaacggcagcatctacccccccaacgagggcttctgcccctgcctggagagcggcatccagaacgtgagcacctgcagattcagcgcccccctgttcctgagccacccccacttcctgaacgccgaccccgtgctggccgaggccgtgaccggcctgcaccccaaccaggaggcccacagcctgttcctggacatccaccccgtgaccggcatccccatgaactgcagcgtgaagctgcagctgagcctgtacatgaagagcgtggccggcatcggccagaccggcaagatcgagcccgtggtgctgcccctgctgtggttcgccgagagcggcgccatggagggcgagaccctgcacaccttctacacccagctggtgctgatgcccaaggtgatgcactacgcccagtacgtgctgctggccctgggctgcgtgctgctgctggtgcccgtgatctgccagatcagaagccaggtgggcgccggccagagagccgccagagccgacagccacagcctggcctgctggggcaagggcgccagcgacagaaccctgtggcccaccgccgcctggagccccccccccgccgccgtgctgagactgtgcagaagcggcagcggccactgctggggcctgagaagcaccctggccagcttcgcctgcagagtggccaccaccctgcccgtgctggagggcctgggccccagcctgggcggcggcaccggcggcctgtag

SEQ ID NO: 98104 - DNA, 441 bp, synthetic construct
  misc_feature 1..441: note = Description of Artificial Sequence: Synthetic coding sequence
  source 1..441: mol_type = other DNA
atgggctgcagcgccaaggccagatgggccgccggcgccctgggcgtggccggcctgctgtgcgccgtgctgggcgccgtgatgatcgtgatggtgcccagcctgatcaagcagcaggtgctgaagaacgtgagaatcgaccccagcagcctgagcttcaacatgtggaaggagatccccatccccttctacctgagcgtgtacttcttcgacgtgatgaaccccagcgagatcctgaagggcgagaagccccaggtgagagagagaggcccctacgtgtacagagagttcagacacaagagcaacatcaccttcaacaacaacgacaccgtgagcttcctggagtacagaaccttccagttccagcccagcaagagccacggcagcgagagcgactacatcgtgatgcccaacatcctggtgctggtgagactgccctag

SEQ ID NO: 98105 - DNA, 1446 bp, synthetic construct
  misc_feature 1..1446: note = Description of Artificial Sequence: Synthetic coding sequence
  source 1..1446: mol_type = other DNA
atgggctgcagcgccaaggccagatgggccgccggcgccctgggcgtggccggcctgctgtgcgccgtgctgggcgccgtgatgatcgtgatggtgcccagcctgatcaagcagcaggtgctgaagaacgtgagaatcgaccccagcagcctgagcttcaacatgtggaaggagatccccatccccttctacctgagcgtgtacttcttcgacgtgatgaaccccagcgagatcctgaagggcgagaagccccaggtgagagagagaggcccctacgtgtacagagagttcagacacaagagcaacatcaccttcaacaacaacgacaccgtgagcttcctggagtacagaaccttccagttccagcccagcaagagccacggcagcgagagcgactacatcgtgatgcccaacatcctggtgctgggcgccgccgtgatgatggagaacaagcccatgaccctgaagctgatcatgaccctggccttcaccaccctgggcgagagagccttcatgaacagaaccgtgggcgagatcatgtggggctacaaggaccccctggtgaacctgatcaacaagtacttccccggcatgttccccttcaaggacaagttcggcctgttcgccgagctgaacaacagcgacagcggcctgttcaccgtgttcaccggcgtgcagaacatcagcagaatccacctggtggacaagtggaacggcctgagcaaggtggacttctggcacagcgaccagtgcaacatgatcaacggcaccagcggccagatgtggccccccttcatgacccccgagagcagcctggagttctacagccccgaggcctgcagaagcatgaagctgatgtacaaggagagcggcgtgttcgagggcatccccacctacagattcgtggcccccaagaccctgttcgccaacggcagcatctacccccccaacgagggcttctgcccctgcctggagagcggcatccagaacgtgagcacctgcagattcagcgcccccctgttcctgagccacccccacttcctgaacgccgaccccgtgctggccgaggccgtgaccggcctgcaccccaaccaggaggcccacagcctgttcctggacatccaccccgtgaccggcatccccatgaactgcagcgtgaagctgcagctgagcctgtacatgaagagcgtggccggcatcggccagaccggcaagatcgagcccgtggtgctgcccctgctgtggttcgccgagagcggcgccatggagggcgagaccctgcacaccttctacacccagctggtgctgatgcccaaggagaagtgctacctgttctggagcagcagcaagaagggcagcaaggacaaggaggccatccaggcctacagcgagagcctgatgaccagcgcccccaagggcagcgtgctgcaggaggccaagctgtag

SEQ ID NO: 98106 - DNA, 1437 bp, synthetic construct
  misc_feature 1..1437: note = Description of Artificial Sequence: Synthetic coding sequence
  source 1..1437: mol_type = other DNA
atgggcagatgctgcttctacaccgccggcaccctgagcctgctgctgctggtgaccagcgtgaccctgctggtggccagagtgttccagaaggccgtggaccagagcatcgagaagaagatcgtgctgagaaacggcaccgaggccttcgacagctgggagaagccccccctgcccgtgtacacccagttctacttcttcaacgtgaccaaccccgaggagatcctgagaggcgagacccccagagtggaggaggtgggcccctacacctacagagagctgagaaacaaggccaacatccagttcggcgacaacggcaccaccatcagcgccgtgagcaacaaggcctacgtgttcgagagagaccagagcgtgggcgaccccaagatcgacctgatcagaaccctgaacatccccgtgctgaccgtgatcgagtggagccaggtgcacttcctgagagagatcatcgaggccatgctgaaggcctaccagcagaagctgttcgtgacccacaccgtggacgagctgctgtggggctacaaggacgagatcctgagcctgatccacgtgttcagacccgacatcagcccctacttcggcctgttctacgagaagaacggcaccaacgacggcgactacgtgttcctgaccggcgaggacagctacctgaacttcaccaagatcgtggagtggaacggcaagaccagcctggactggtggatcaccgacaagtgcaacatgatcaacggcaccgacggcgacagcttccaccccctgatcaccaaggacgaggtgctgtacgtgttccccagcgacttctgcagaagcgtgtacatcaccttcagcgactacgagagcgtgcagggcctgcccgccttcagatacaaggtgcccgccgagatcctggccaacaccagcgacaacgccggcttctgcatccccgagggcaactgcctgggcagcggcgtgctgaacgtgagcatctgcaagaacggcgcccccatcatcatgagcttcccccacttctaccaggccgacgagagattcgtgagcgccatcgagggcatgcaccccaaccaggaggaccacgagaccttcgtggacatcaaccccctgaccggcatcatcctgaaggccgccaagagattccagatcaacatctacgtgaagaagctggacgacttcgtggagaccggcgacatcagaaccatggtgttccccgtgatgtacctgaacgagagcgtgcacatcgacaaggagaccgccagcagactgaagagcatgatcaacaccaccctgatcatcaccaacatcccctacatcatcatggccctgggcgtgttcttcggcctggtgttcacctggctggcctgcaagggccagggcagcatggacgagggcaccgccgacgagagagcccccctgatcagaacctag

SEQ ID NO: 98107 - DNA, 1710 bp, synthetic construct
  misc_feature 1..1710: note = Description of Artificial Sequence: Synthetic coding sequence
  source 1..1710: mol_type = other DNA
atgggcctgggcctgctgctgcccctgctgctgctgtggaccagaggcacccagggcagcgagctggaccccaagggccagcacgtgtgcgtggccagcagccccagcgccgagctgcagtgctgcgccggctggagacagaaggaccaggagtgcaccatccccatctgcgagggccccgacgcctgccagaaggacgaggtgtgcgtgaagcccggcctgtgcagatgcaagcccggcttcttcggcgcccactgcagcagcagatgccccggccagtactggggccccgactgcagagagagctgcccctgccacccccacggccagtgcgagcccgccaccggcgcctgccagtgccaggccgacagatggggcgccagatgcgagttcccctgcgcctgcggcccccacggcagatgcgaccccgccaccggcgtgtgccactgcgagcccggctggtggagcagcacctgcagaagaccctgccagtgcaacaccgccgccgccagatgcgagcaggccaccggcgcctgcgtgtgcaagcccggctggtggggcagaagatgcagcttcagatgcaactgccacggcagcccctgcgagcaggacagcggcagatgcgcctgcagacccggctggtggggccccgagtgccagcagcagtgcgagtgcgtgagaggcagatgcagcgccgccagcggcgagtgcacctgcccccccggcttcagaggcgccagatgcgagctgccctgccccgccggcagccacggcgtgcagtgcgcccacagctgcggcagatgcaagcacaacgagccctgcagccccgacaccggcagctgcgagagctgcgagcccggctggaacggcacccagtgccagcagccctgcctgcccggcaccttcggcgagagctgcgagcagcagtgcccccactgcagacacggcgaggcctgcgagcccgacaccggccactgccagagatgcgaccccggctggctgggccccagatgcgaggacccctgccccaccggcaccttcggcgaggactgcggcagcacctgccccacctgcgtgcagggcagctgcgacaccgtgaccggcgactgcgtgtgcagcgccggctactggggccccagctgcaacgccagctgccccgccggcttccacggcaacaactgcagcgtgccctgcgagtgccccgagggcctgtgccaccccgtgagcggcagctgccagcccggcagcggcagcagagacaccgccctgatcgccggcagcctggtgcccctgctgctgctgttcctgggcctggcctgctgcgcctgctgctgctgggcccccagaagcgacctgaaggacagacccgccagagacggcgccaccgtgagcagaatgaagctgcaggtgtggggcaccctgaccagcctgggcagcaccctgccctgcagaagcctgagcagccacaagctgccctgggtgaccgccagcagcagcagacccctgcccgccggccccctgatgacccccagccaccccatcctgagcctggagagacagatgagattcctgcccaccgtgtgccaccccaagaagggctggagcctgtggcccagacagggcagacagagacccgcctggctgcaggtgctgagcagacccctgagaaccccccccagacacagccccagcagagccccccccgcctag

SEQ ID NO: 98108 - DNA, 2613 bp, synthetic construct
  misc_feature 1..2613: note = Description of Artificial Sequence: Synthetic coding sequence
  source 1..2613: mol_type = other DNA
atggagggcgccggccccagaggcgccggccccgccagaagaagaggcgccggcggcccccccagccccctgctgcccagcctgctgctgctgctgctgctgtggatgctgcccgacaccgtggccccccaggagctgaaccccagaggcagaaacgtgtgcagagcccccggcagccaggtgcccacctgctgcgccggctggagacagcagggcgacgagtgcggcatcgccgtgtgcgagggcaacagcacctgcagcgagaacgaggtgtgcgtgagacccggcgagtgcagatgcagacacggctacttcggcgccaactgcgacaccaagtgccccagacagttctggggccccgactgcaaggagctgtgcagctgccacccccacggccagtgcgaggacgtgaccggccagtgcacctgccacgccagaagatggggcgccagatgcgagcacgcctgccagtgccagcacggcacctgccaccccagaagcggcgcctgcagatgcgagcccggctggtggggcgcccagtgcgccagcgcctgctactgcagcgccaccagcagatgcgacccccagaccggcgcctgcctgtgccacgccggctggtggggcagaagctgcaacaaccagtgcgcctgcaacagcagcccctgcgagcagcagagcggcagatgccagtgcagagagagaaccttcggcgccagatgcgacagatactgccagtgcttcagaggcagatgccaccccgtggacggcacctgcgcctgcgagcccggctacagaggcaagtactgcagagagccctgccccgccggcttctacggcctgggctgcagaagaagatgcggccagtgcaagggccagcagccctgcaccgtggccgagggcagatgcctgacctgcgagcccggctggaacggcaccaagtgcgaccagccctgcgccaccggcttctacggcgagggctgcagccacagatgccccccctgcagagacggccacgcctgcaaccacgtgaccggcaagtgcaccagatgcaacgccggctggatcggcgacagatgcgagaccaagtgcagcaacggcacctacggcgaggactgcgccttcgtgtgcgccgactgcggcagcggccactgcgacttccagagcggcagatgcctgtgcagccccggcgtgcacggcccccactgcaacgtgacctgcccccccggcctgcacggcgccgactgcgcccaggcctgcagctgccacgaggacacctgcgaccccgtgaccggcgcctgccacctggagaccaaccagagaaagggcgtgatgggcgccggcgccctgctggtgctgctggtgtgcctgctgctgagcctgctgggctgctgctgcgcctgcagaggcaaggaccccaccagaagacccagacccagaagagagctgagcctgggcagaaagaaggccccccacagactgtgcggcagattcagcagaatcagcatgaagctgcccagaatccccctgagaagacagaagctgcccaaggtggtggtggcccaccacgacctggacaacaccctgaactgcagcttcctggagccccccagcggcctggagcagcccagccccagctggagcagcagagccagcttcagcagcttcgacaccaccgacgagggccccgtgtactgcgtgccccacgaggaggcccccgccgagagcagagaccccgaggtgcccaccgtgcccgccgaggcccccgcccccagccccgtgcccctgaccacccccgccagcgccgaggaggccatccccctgcccgccagcagcgacagcgagagaagcgccagcagcgtggagggccccggcggcgccctgtacgccagagtggccagaagagaggccagacccgccagagccagaggcgagatcggcggcctgagcctgagccccagccccgagagaagaaagccccccccccccgaccccgccaccaagcccaaggtgagctggatccacggcaagcacagcgccgccgccgccggcagagcccccagcccccccccccccggcagcgaggccgcccccagccccagcaagagaaagagaacccccagcgacaagagcgcccacaccgtggagcacggcagccccagaaccagagaccccacccccagaccccccggcctgcccgaggaggccaccgccctggccgcccccagcccccccagagccagagccagagccgcccccagacccctgggcgcccacggcagaagaagaagccccgccaagagagccgaggccgccagcatgctggccgccgacgtgagaggcaagaccagaagcctgggcagagccgaggtggccctgggcgcccagggccccagagagaagcccgcccccccccagaaggccaagagaagcgtgccccccgccagccccgccagagccccccccgccaccgagacccccggccccgagaaggccgccaccgacctgcccgcccccgagacccccagaaagaagacccccatccagaagccccccagaaagaagagcagagaggccgccggcgagctgggcagagccggcgcccccaccctgtag

SEQ ID NO: 98109 - DNA, 2493 bp, synthetic construct
  misc_feature 1..2493: note = Description of Artificial Sequence: Synthetic coding sequence
  source 1..2493: mol_type = other DNA
atgggcctgggcctgctgctgcccctgctgctgctgtggaccagaggcacccagggcagcgagctggaccccaagggccagcacgtgtgcgtggccagcagccccagcgccgagctgcagtgctgcgccggctggagacagaaggaccaggagtgcaccatccccatctgcgagggccccgacgcctgccagaaggacgaggtgtgcgtgaagcccggcctgtgcagatgcaagcccggcttcttcggcgcccactgcagcagcagatgccccggccagtactggggccccgactgcagagagagctgcccctgccacccccacggccagtgcgagcccgccaccggcgcctgccagtgccaggccgacagatggggcgccagatgcgagttcccctgcgcctgcggcccccacggcagatgcgaccccgccaccggcgtgtgccactgcgagcccggctggtggagcagcacctgcagaagaccctgccagtgcaacaccgccgccgccagatgcgagcaggccaccggcgcctgcgtgtgcaagcccggctggtggggcagaagatgcagcttcagatgcaactgccacggcagcccctgcgagcaggacagcggcagatgcgcctgcagacccggctggtggggccccgagtgccagcagcagtgcgagtgcgtgagaggcagatgcagcgccgccagcggcgagtgcacctgcccccccggcttcagaggcgccagatgcgagctgccctgccccgccggcagccacggcgtgcagtgcgcccacagctgcggcagatgcaagcacaacgagccctgcagccccgacaccggcagctgcgagagctgcgagcccggctggaacggcacccagtgccagcagccctgcctgcccggcaccttcggcgagagctgcgagcagcagtgcccccactgcagacacggcgaggcctgcgagcccgacaccggccactgccagagatgcgaccccggctggctgggccccagatgcgaggacccctgccccaccggcaccttcggcgaggactgcggcagcacctgccccacctgcgtgcagggcagctgcgacaccgtgaccggcgactgcgtgtgcagcgccggctactggggccccagctgcaacgccagctgccccgccggcttccacggcaacaactgcagcgtgccctgcgagtgccccgagggcctgtgccaccccgtgagcggcagctgccagcccggcagcggcagcagagacaccgccctgatcgccggcagcctggtgcccctgctgctgctgttcctgggcctggcctgctgcgcctgctgctgctgggcccccagaagcgacctgaaggacagacccgccagagacggcgccaccgtgagcagaatgaagctgcaggtgtggggcaccctgaccagcctgggcagcaccctgccctgcagaagcctgagcagccacaagctgccctgggtgaccgtgagccaccacgaccccgaggtgcccttcaaccacagcttcatcgagccccccagcgccggctgggccaccgacgacagcttcagcagcgaccccgagagcggcgaggccgacgaggtgcccgcctactgcgtgcccccccaggagggcatggtgcccgtggcccaggccggcagcagcgaggccagcctggccgccggcgccttccccccccccgaggacgccagcacccccttcgccatccccagaaccagcagcctggccagagccaagagacccagcgtgagcttcgccgagggcaccaagttcgccccccagagcagaagaagcagcggcgagctgagcagccccctgagaaagcccaagagactgagcagaggcgcccagagcggccccgagggcagagaggccgaggagagcaccggccccgaggaggccgaggcccccgagagcttccccgccgccgccagccccggcgacagcgccaccggccacagaagaccccccctgggcggcagaaccgtggccgagcacgtggaggccatcgagggcagcgtgcaggagagcagcggccccgtgaccaccatctacatgctggccggcaagcccagaggcagcgagggccccgtgagaagcgtgttcagacacttcggcagcttccagaagggccaggccgaggccaaggtgaagagagccatccccaagccccccagacaggccctgaacagaaagaagggcagccccggcctggccagcggcagcgtgggccagagccccaacagcgcccccaaggccggcctgcccggcgccaccggccccatggccgtgagacccgaggaggccgtgagaggcctgggcgccggcaccgagagcagcagaagagcccaggagcccgtgagcggctgcggcagccccgagcaggacccccagaagcaggccgaggaggagagacaggaggagcccgagtacgagaacgtggtgcccatcagcagaccccccgagccctag

SEQ ID NO: 98110 - DNA, 2235 bp, synthetic construct
  misc_feature 1..2235: note = Description of Artificial Sequence: Synthetic coding sequence
  source 1..2235: mol_type = other DNA
atgggcctgggcctgctgctgcccctgctgctgctgtggaccagaggcacccagggcagcgagctggaccccaagggccagcacgtgtgcgtggccagcagccccagcgccgagctgcagtgctgcgccggctggagacagaaggaccaggagtgcaccatccccatctgcgagggccccgacgcctgccagaaggacgaggtgtgcgtgaagcccggcctgtgcagatgcaagcccggcttcttcggcgcccactgcagcagcagatgccccggccagtactggggccccgactgcagagagagctgcccctgccacccccacggccagtgcgagcccgccaccggcgcctgccagtgccaggccgacagatggggcgccagatgcgagttcccctgcgcctgcggcccccacggcagatgcgaccccgccaccggcgtgtgccactgcgagcccggctggtggagcagcacctgcagaagaccctgccagtgcaacaccgccgccgccagatgcgagcaggccaccggcgcctgcgtgtgcaagcccggctggtggggcagaagatgcagcttcagatgcaactgccacggcagcccctgcgagcaggacagcggcagatgcgcctgcagacccggctggtggggccccgagtgccagcagcagtgcgagtgcgtgagaggcagatgcagcgccgccagcggcgagtgcacctgcccccccggcttcagaggcgccagatgcgagctgccctgccccgccggcagccacggcgtgcagtgcgcccacagctgcggcagatgcaagcacaacgagccctgcagccccgacaccggcagctgcgagagctgcgagcccggctggaacggcacccagtgccagcagccctgcctgcccggcaccttcggcgagagctgcgagcagcagtgcccccactgcagacacggcgaggcctgcgagcccgacaccggccactgccagagatgcagcggcagcagagacaccgccctgatcgccggcagcctggtgcccctgctgctgctgttcctgggcctggcctgctgcgcctgctgctgctgggcccccagaagcgacctgaaggacagacccgccagagacggcgccaccgtgagcagaatgaagctgcaggtgtggggcaccctgaccagcctgggcagcaccctgccctgcagaagcctgagcagccacaagctgccctgggtgaccgtgagccaccacgaccccgaggtgcccttcaaccacagcttcatcgagccccccagcgccggctgggccaccgacgacagcttcagcagcgaccccgagagcggcgaggccgacgaggtgcccgcctactgcgtgcccccccaggagggcatggtgcccgtggcccaggccggcagcagcgaggccagcctggccgccggcgccttccccccccccgaggacgccagcacccccttcgccatccccagaaccagcagcctggccagagccaagagacccagcgtgagcttcgccgagggcaccaagttcgccccccagagcagaagaagcagcggcgagctgagcagccccctgagaaagcccaagagactgagcagaggcgcccagagcggccccgagggcagagaggccgaggagagcaccggccccgaggaggccgaggcccccgagagcttccccgccgccgccagccccggcgacagcgccaccggccacagaagaccccccctgggcggcagaaccgtggccgagcacgtggaggccatcgagggcagcgtgcaggagagcagcggccccgtgaccaccatctacatgctggccggcaagcccagaggcagcgagggccccgtgagaagcgtgttcagacacttcggcagcttccagaagggccaggccgaggccaaggtgaagagagccatccccaagccccccagacaggccctgaacagaaagaagggcagccccggcctggccagcggcagcgtgggccagagccccaacagcgcccccaaggccggcctgcccggcgccaccggccccatggccgtgagacccgaggaggccgtgagaggcctgggcgccggcaccgagagcagcagaagagcccaggagcccgtgagcggctgcggcagccccgagcaggacccccagaagcaggccgaggaggagagacaggaggagcccgagtacgagaacgtggtgcccatcagcagaccccccgagccctag

SEQ ID NO: 98111 - DNA, 1710 bp, synthetic construct; identical to SEQ ID NO: 98107
  misc_feature 1..1710: note = Description of Artificial Sequence: Synthetic coding sequence
  source 1..1710: mol_type = other DNA

SEQ ID NO: 98112 - DNA, 2595 bp, synthetic construct
  misc_feature 1..2595: note = Description of Artificial Sequence: Synthetic coding sequence
  source 1..2595: mol_type = other DNA
atggagggcgccggccccagaggcgccggccccgccagaagaagaggcgccggcggcccccccagccccctgctgcccagcctgctgctgctgctgctgctgtggatgctgcccgacaccgtggccccccaggagctgaaccccagaggcagaaacgtgtgcagagcccccggcagccaggtgcccacctgctgcgccggctggagacagcagggcgacgagtgcggcatcgccgtgtgcgagggcaacagcacctgcagcgagaacgaggtgtgcgtgagacccggcgagtgcagatgcagacacggctacttcggcgccaactgcgacaccaagtgccccagacagttctggggccccgactgcaaggagctgtgcagctgccacccccacggccagtgcgaggacgtgaccggccagtgcacctgccacgccagaagatggggcgccagatgcgagcacgcctgccagtgccagcacggcacctgccaccccagaagcggcgcctgcagatgcgagcccggctggtggggcgcccagtgcgccagcgcctgctactgcagcgccaccagcagatgcgacccccagaccggcgcctgcctgtgccacgccggctggtggggcagaagctgcaacaaccagtgcgcctgcaacagcagcccctgcgagcagcagagcggcagatgccagtgcagagagagaaccttcggcgccagatgcgacagatactgccagtgcttcagaggcagatgccaccccgtggacggcacctgcgcctgcgagcccggctacagaggcaagtactgcagagagccctgccccgccggcttctacggcctgggctgcagaagaagatgcggccagtgcaagggccagcagccctgcaccgtggccgagggcagatgcctgacctgcgagcccggctggaacggcaccaagtgcgaccagccctgcgccaccggcttctacggcgagggctgcagccacagatgccccccctgcagagacggccacgcctgcaaccacgtgaccggcaagtgcaccagatgcaacgccggctggatcggcgacagatgcgagaccaagtgcagcaacggcacctacggcgaggactgcgccttcgtgtgcgccgactgcggcagcggccactgcgacttccagagcggcagatgcctgtgcagccccggcgtgcacggcccccactgcaacgtgacctgcccccccggcctgcacggcgccgactgcgcccaggcctgcagctgccacgaggacacctgcgaccccgtgaccggcgcctgccacctggagaccaaccagagaaagggcgtgatgggcgccggcgccctgctggtgctgctggtgtgcctgctgctgagcctgctgggctgctgctgcgcctgcagaggcaaggaccccaccagaagagagctgagcctgggcagaaagaaggccccccacagactgtgcggcagattcagcagaatcagcatgaagctgcccagaatccccctgagaagacagaagctgcccaaggtggtggtggcccaccacgacctggacaacaccctgaactgcagcttcctggagccccccagcggcctggagcagcccagccccagctggagcagcagagccagcttcagcagcttcgacaccaccgacgagggccccgtgtactgcgtgccccacgaggaggcccccgccgagagcagagaccccgaggtgcccaccgtgcccgccgaggcccccgcccccagccccgtgcccctgaccacccccgccagcgccgaggaggccatccccctgcccgccagcagcgacagcgagagaagcgccagcagcgtggagggccccggcggcgccctgtacgccagagtggccagaagagaggccagacccgccagagccagaggcgagatcggcggcctgagcctgagccccagccccgagagaagaaagccccccccccccgaccccgccaccaagcccaaggtgagctggatccacggcaagcacagcgccgccgccgccggcagagcccccagcccccccccccccggcagcgaggccgcccccagccccagcaagagaaagagaacccccagcgacaagagcgcccacaccgtggagcacggcagccccagaaccagagaccccacccccagaccccccggcctgcccgaggaggccaccgccctggccgcccccagcccccccagagccagagccagagccagacccggcctgctggagcccaccgacgccggcggcccccccagaagcgcccccgccgccagcatgctggccgccgacgtgagaggcaagaccagaagcctgggcagagccgaggtggccctgggcgcccagggccccagagagaagcccgcccccccccagaaggccaagagaagcgtgccccccgccagccccgccagagccccccccgccaccgagacccccggccccgagaaggccgccaccgacctgcccgcccccgagacccccagaaagaagacccccatccagaagccccccagaaagaagagcagagaggccgccggcgagctgggcagagccggcgcccccaccctgtag

SEQ ID NO: 98113 - DNA, 2598 bp, synthetic construct
  misc_feature 1..2598: note = Description of Artificial Sequence: Synthetic coding sequence
  source 1..2598: mol_type = other DNA
atggagggcgccggccccagaggcgccggccccgccagaagaagaggcgccggcggcccccccagccccctgctgcccagcctgctgctgctgctgctgctgtggatgctgcccgacaccgtggccccccaggagctgaaccccagaggcagaaacgtgtgcagagcccccggcagccaggtgcccacctgctgcgccggctggagacagcagggcgacgagtgcggcatcgccgtgtgcgagggcaacagcacctgcagcgagaacgaggtgtgcgtgagacccggcgagtgcagatgcagacacggctacttcggcgccaactgcgacaccaagtgccccagacagttctggggccccgactgcaaggagctgtgcagctgccacccccacggccagtgcgaggacgtgaccggccagtgcacctgccacgccagaagatggggcgccagatgcgagcacgcctgccagtgccagcacggcacctgccaccccagaagcggcgcctgcagatgcgagcccggctggtggggcgcccagtgcgccagcgcctgctactgcagcgccaccagcagatgcgacccccagaccggcgcctgcctgtgccacgccggctggtggggcagaagctgcaacaaccagtgcgcctgcaacagcagcccctgcgagcagcagagcggcagatgccagtgcagagagagaaccttcggcgccagatgcgacagatactgccagtgcttcagaggcagatgccaccccgtggacggcacctgcgcctgcgagcccggctacagaggcaagtactgcagagagccctgccccgccggcttctacggcctgggctgcagaagaagatgcggccagtgcaagggccagcagccctgcaccgtggccgagggcagatgcctgacctgcgagcccggctggaacggcaccaagtgcgaccagccctgcgccaccggcttctacggcgagggctgcagccacagatgccccccctgcagagacggccacgcctgcaaccacgtgaccggcaagtgcaccagatgcaacgccggctggatcggcgacagatgcgagaccaagtgcagcaacggcacctacggcgaggactgcgccttcgtgtgcgccgactgcggcagcggccactgcgacttccagagcggcagatgcctgtgcagccccggcgtgcacggcccccactgcaacgtgacctgcccccccggcctgcacggcgccgactgcgcccaggcctgcagctgccacgaggacacctgcgaccccgtgaccggcgcctgccacctggagaccaaccagagaaagggcgtgatgggcgccggcgccctgctggtgctgctggtgtgcctgctgctgagcctgctgggctgctgctgcgcctgcagaggcaaggaccccaccagaagagagctgagcctgggcagaaagaaggccccccacagactgtgcggcagattcagcagaatcagcatgaagctgcccagaatccccctgagaagacagaagctgcccaaggtggtggtggcccaccacgacctggacaacaccctgaactgcagcttcctggagccccccagcggcctggagcagcccagccccagctggagcagcagagccagcttcagcagcttcgacaccaccgacgagggccccgtgtactgcgtgccccacgaggaggcccccgccgagagcagagaccccgaggtgcccaccgtgcccgccgaggcccccgcccccagccccgtgcccctgaccacccccgccagcgccgaggaggccatccccctgcccgccagcagcgacagcgagagaagcgccagcagcgtggagggccccggcggcgccctgtacgccagagtggccagaagagaggccagacccgccagagccagaggcgagatcggcggcctgagcctgagccccagccccgagagaagaaagccccccccccccgaccccgccaccaagcccaaggtgagctggatccacggcaagcacagcgccgccgccgccggcagagcccccagcccccccccccccggcagcgaggccgcccccagccccagcaagagaaagagaacccccagcgacaagagcgcccacaccgtggagcacggcagccccagaaccagagaccccacccccagaccccccggcctgcccgaggaggccaccgccctggccgcccccagcccccccagagccagagccagagccgcccccagacccctgggcgcccacggcagaagaagaagccccgccaagagagccgaggccgccagcatgctggccgccgacgtgagaggcaagaccagaagcctgggcagagccgaggtggccctgggcgcccagggccccagagagaagcccgcccccccccagaaggccaagagaagcgtgccccccgccagccccgccagagccccccccgccaccgagacccccggccccgagaaggccgccaccgacctgcccgcccccgagacccccagaaagaagacccccatccagaagccccccagaaagaagagcagagaggccgccggcgagctgggcagagccggcgcccccaccctgtag

SEQ ID NO: 98114 - DNA, 1728 bp, synthetic construct
  misc_feature 1..1728: note = Description of Artificial Sequence: Synthetic coding sequence
  source 1..1728: mol_type = other DNA
atgcacaaggaggccgagatgctgatcggcccccagctggacgagaagagatggggctggagactgggcgacggcagcgccgccccccccttcctgccccaggccctgagcttcctgctgctgctgcccctggccagcgccctgcagcccacccccctgcccttccaggagctgagactggtgggcggccccagcagatgcagaggcagactggaggtgatgcacggcggcagctggggcagcgtgtgcgacgacgactgggacgtggtggacgccaacgtggtgtgcagacagctgggctgcggcctggccctgcccgtgcccagacccctggccttcggccagggcagaggccccatcctgctggacaacgtggagtgcagaggccaggaggccgccctgagcgagtgcggcagcagaggctggggcgtgcacaactgcttccactacgaggacgtggccgtgctgtgcgacgagttcctgcccacccagccccccaccagaaagatgctgaccagcagagccccccccaccaccctgcccaacggcaagagcgagggcagcgtgagactggtgggcggcgccaacctgtgccagggcagagtggagatcctgcacagcggcctgtggggcaccgtgtgcgacgacgactggggcctgcccgacgccgccgtggtgtgcagacagctgggctgcggcgccgccatggccgccaccaccaacgccttcttcggctacggcaccggccacatcctgctggacaacgtgcactgcgagggcggcgagcccagactggccgcctgccagagcctgggctggggcgtgcacaactgcggccaccacgaggacgccggcgccctgtgcgccggcctgggcccccccaccctgaccgccctgcccagcagcgccaccagagaggactgggcctggcagaccgaccccagcgccaccggcgtgggcccccagcccagcagagagaccgccctgctgaccaccgccgcctgggccgccggcaagaagagcggcagactgagactggtgggcggccccggcccctgcagaggcagagtggaggtgctgcacgccggcggctggggcaccgtgtgcgacgacgactgggacttcgccgacgccagagtggcctgcagagaggccggctgcggccccgccctgggcgccaccggcctgggccacttcggctacggcagaggccccgtgctgctggacaacgtgggctgcgccggcaccgaggccagactgagcgactgcttccacctgggctggggccagcacaactgcggccaccacgaggacgccggcgccctgtgcgccggccccgaggagctgggcctgcaggtgcagcaggacggcagcgagaccaccagagtgcccacccccagacccagagacggccacctgagactggtgaacggcgcccacagatgcgagggcagagtggagctgtacctgggccagagatggggcaccgtgtgcgacgacgcctgggacctgagagccgccggcgtgctgtgcagacagctgggctgcggccaggccctggccgcccccggcgaggcccacttcggccccggcagaggccccatcctgctggacaacgtgaagtgcagaggcgaggagagcgccctgctgctgtgcagccacatcagatgggacgcccacaactgcgaccacagcgaggacgccagcgtgctgtgccagcccagctag

SEQ ID NO: 98115 - DNA, 849 bp, synthetic construct
  misc_feature 1..849: note = Description of Artificial Sequence: Synthetic coding sequence
  source 1..849: mol_type = other DNA
atgagcaacgtgaccctgagaaagatgagccccaccggcaacgagatgaagagcaccacccagggcaccaccagaaagcagcaggacttccacgaggtgaacaagagaagaaccttcctgcaggacaacagctggatcaagaagagacccgaggaggagaaggacgagaactacggcagagtggtgctgaacagacacaacagccacgacgccctggacagaaaggtgaacgagagagacgtgcccaaggccaccatcagcagatacagcagcgacgacaccctggacagaagcatgagcatgttcagaagcctggaggtgaccaagctgcagcccggcggcagcctgaacgccaacaccagcaacaccatcgccagcaccagcgccaccacccccgtgaagaagaagagacagagctggttccccccccccccccccggctacaacgccagcagcagcaccggcaccagaagaagagagcccggcgtgcacccccccatcccccccaagcccagcagccccgtgagcagccccaaccagctgagacaggacaacagacagatccacccccccaagcccggcgtgtacaccgagaccaacagaagcgccgagagaaacatcagcgaggagctggacaacctgatcaagatgaacaagagcctgaacagaaaccagggcctggacagcctgttcagagccaaccccaaggtggaggagagagagaagagagccaagagcctggagagcctgatctacatgagcaccagaaccgacaaggacggcaagggcatccagagcctgggcagccccatcaaggtgaaccagagaaccgacaagaacgagaagtag

SEQ ID NO: 98116 - DNA, 2067 bp, synthetic construct
  misc_feature 1..2067: note = Description of Artificial Sequence: Synthetic coding sequence
  source 1..2067: mol_type = other DNA
atgagcaacgtgaccctgagaaagatgagccccaccggcaacgagatgaagagcaccacccagggcaccaccagaaagcagcaggacttccacgaggtgaacaagagaagaaccttcctgcaggacaacagctggatcaagaagagacccgaggaggagaaggacgagaactacggcagagtggtgctgaacagacacaacagccacgacgccctggacagaaaggtgaacgagagagacgtgcccaaggccaccatcagcagatacagcagcgacgacaccctggacagaatcagcgacagaaacgacgccgccaagacctacaaggccaacaccctggacaaccagctgaccaacagaagcatgagcatgttcagaagcctggaggtgaccaagctgcagcccggcggcagcctgaacgccaacaccagcaacaccatcgccagcaccagcgccaccacccccgtgaagaagaagagacagagctggttccccccccccccccccggctacaacgccagcagcagcaccggcaccagaagaagagagcccggcgtgcacccccccatcccccccaagcccagcagccccgtgagcagccccaaccagctgagacaggacaacagacagatccacccccccaagcccggcgtgtacaccgagaccaacagaagcgccgagagaaacatcagaagccaggacctggacaacatcgtgaaggtggccaccagcctgcagagaagcgacaagggcgaggagctggacaacctgatcaagatgaacaagagcctgaacagaaaccagggcctggacagcctgttcagagccaaccccaaggtggaggagagagagaagagagccaagagcctggagagcctgatctacatgagcaccagaaccgacaaggacggcaagggcatccagagcctgggcagccccatcaaggtgaaccagagaaccgacaagaacgagaagggcagacagaacctggagagcgtggccaaggtgaacgccagaatgaacaagaccagcagaagaagcgaggacctggacaacgccaccgaggtgaaccccaagggccacgagaacaccaccggcaagaaggacctggacggcctgatcaaggtggaccccgagaccaacaagaacatcaccagaggccagagcctggacaacctgatcaaggtgacccccgaggtgaagagaagcaaccagggcagcaaggacctgaacaacttcatcaaggtgtaccccggcaccgagaagagcaccgagggcggccagagcctggacagcctgatcaaggtgacccccgagagaaacagaaccaaccagggcaaccaggacctggagaacctgatcaaggtgatccccagcgccaacaagagcagcgagcagggcctggacgagcacatcaacgtgagccccaaggccgtgaagaacaccgacggcaagcaggacctggacaagctgatcaaggtgaaccccgagatcttcaccaacaaccagagaaaccaggacctggccaacctgatcaaggtgaaccccgccgtgatcagaaacaaccagagccaggacctggacaacctgatcaaggtgaagcccagcgccctgagaaacaccaacagagaccagaacctggagaacctgatcgaggtgaacagccacgtgagcgagaacaagaacggcagcagcaacaccggcgccaagcaggccggcccccaggacaccgtggtgtacaccagaacctacgtggagaacagcaagagccccaaggacggctaccaggagaacatcagcggcaagtacatccagaccgtgtacagcaccagcgacagaagcgtgatcgagagagacatgtgcacctactgcagaaagcccctgggcgtggagaccaagatgatcctggacgagctgcagatctgctgccacagcacctgcttcaagtgcgagatctgcaagcagcccctggagaacctgcaggccggcgacagcatctggatctacagacagaccatccactgcgagccctgctacagcaagatcatggccaagtggatcccctag

SEQ ID NO: 98117 - DNA, 2007 bp, synthetic construct
  misc_feature 1..2007: note = Description of Artificial Sequence: Synthetic coding sequence
  source 1..2007: mol_type = other DNA
atgagcaacgtgaccctgagaaagatgagccccaccggcaacgagatgaagagcaccacccagggcaccaccagaaagcagcaggacttccacgaggtgaacaagagaagaaccttcctgcaggacaacagctggatcaagaagagacccgaggaggagaaggacgagaactacggcagagtggtgctgaacagacacaacagccacgacgccctggacagaaaggtgaacgagagagacgtgcccaaggccaccatcagcagatacagcagcgacgacaccctggacagaatcagcgacagaaacgacgccgccaagacctacaaggccaacaccctggacaaccagctgaccaacagaagcatgagcatgttcagaagcctggaggtgaccaagctgcagcccggcggcagcctgaacgccaacaccagcaacaccatcgccagcaccagcgccaccacccccgtgaagaagaagagacagagctggttccccccccccccccccggctacaacgccagcagcagcaccggcaccagaagaagagagcccggcgtgcacccccccatcccccccaagcccagcagccccgtgagcagccccaaccagctgagacaggacaacagacagatccacccccccaagcccggcgtgtacaccgagaccaacagaagcgccgagagaaacatcagcgaggagctggacaacctgatcaagatgaacaagagcctgaacagaaaccagggcctggacagcctgttcagagccaaccccaaggtggaggagagagagaagagagccaagagcctggagagcctgatctacatgagcaccagaaccgacaaggacggcaagggcatccagagcctgggcagccccatcaaggtgaaccagagaaccgacaagaacgagaagggcagacagaacctggagagcgtggccaaggtgaacgccagaatgaacaagaccagcagaagaagcgaggacctggacaacgccaccgaggtgaaccccaagggccacgagaacaccaccggcaagaaggacctggacggcctgatcaaggtggaccccgagaccaacaagaacatcaccagaggccagagcctggacaacctgatcaaggtgacccccgaggtgaagagaagcaaccagggcagcaaggacctgaacaacttcatcaaggtgtaccccggcaccgagaagagcaccgagggcggccagagcctggacagcctgatcaaggtgacccccgagagaaacagaaccaaccagggcaaccaggacctggagaacctgatcaaggtgatccccagcgccaacaagagcagcgagcagggcctggacgagcacatcaacgtgagccccaaggccgtgaagaacaccgacggcaagcaggacctggacaagctgatcaaggtgaaccccgagatcttcaccaacaaccagagaaaccaggacctggccaacctgatcaaggtgaaccccgccgtgatcagaaacaaccagagccaggacctggacaacctgatcaaggtgaagcccagcgccctgagaaacaccaacagagaccagaacctggagaacctgatcgaggtgaacagccacgtgagcgagaacaagaacggcagcagcaacaccggcgccaagcaggccggcccccaggacaccgtggtgtacaccagaacctacgtggagaacagcaagagccccaaggacggctaccaggagaacatcagcggcaagtacatccagaccgtgtacagcaccagcgacagaagcgtgatcgagagagacatgtgcacctactgcagaaagcccctgggcgtggagaccaagatgatcctggacgagctgcagatctgctgccacagcacctgcttcaagtgcgagatctgcaagcagcccctggagaacctgcaggccggcgacagcatctggatctacagacagaccatccactgcgagccctgctacagcaagatcatggccaagtggatcccctag

SEQ ID NO: 98118 - DNA, 1941 bp, synthetic construct
  misc_feature 1..1941: note = Description of Artificial Sequence: Synthetic coding sequence
  source 1..1941: mol_type = other DNA
atgagcaacgtgaccctgagaaagatgagccccaccggcaacgagatgaagagcaccacccagggcaccaccagaaagcagcaggacttccacgaggtgaacaagagaagaaccttcctgcaggacaacagctggatcaagaagagacccgaggaggagaaggacgagaactacggcagagtggtgctgaacagacacaacagccacgacgccctggacagaaaggtgaacgagagagacgtgcccaaggccaccatcagcagatacagcagcgacgacaccctggacagaatcagcgacagaaacgacgccgccaagacctacaaggccaacaccctggacaaccagctgaccaacagaagcatgagcatgttcagaagcctggaggtgaccaagctgcagcccggcggcagcctgaacgccaacaccagcaacaccatcgccagcaccagcgccaccacccccgtgaagaagaagagagagcccggcgtgcacccccccatcccccccaagcccagcagccccgtgagcagccccaaccagctgagacaggacaacagacagatccacccccccaagcccggcgtgtacaccgagaccaacagaagcgccgagagaaacatcagaagccaggacctggacaacatcgtgaaggtggccaccagcctgcagagaagcgacaagggcgaggagctggacaacctgatcaagatgaacaagagcctgaacagaaaccagggcctggacagcctgttcagagccaaccccaaggtggaggagagagagaagagagccaagagcctggagagcctgatctacatgagcaccagaaccgacaaggacggcaagggcatccagagcctgggcagccccatcaaggtgaaccagagaaccgacaagaacgagaagggcagacagaacctggagagcgtggccaaggtgaacgccagaatgaacaagaccagcagaagaagcgaggacctggacaacgccaccgaggtgaaccccaagggccacgagaacaccaccggcggccagagcctggacaacctgatcaaggtgacccccgaggtgaagagaagcaaccagggcagcaaggacctgaacaacttcatcaaggtgtaccccggcaccgagaagagcaccgagggcggccagagcctggacagcctgatcaaggtgacccccgagagaaacagaaccaaccagggcaaccaggacctggagaacctgatcaaggtgatccccagcgccaacaagagcagcgagcagggcctggacgagcacatcaacgtgagccccaaggccgtgaagaacaccgacggcaagcaggacctggacaagctgatcaaggtgaaccccgagatcttcaccaacaaccagagaaaccaggacctggccaacctgatcaaggtgaaccccgccgtgatcagaaacaaccagagccaggacctggacaacctgatcaaggtgaagcccagcgccctgagaaacaccaacagagaccagaacctggagaacctgatcgaggtgaacagccacgtgagcgagaacaagaacggcagcagcaacaccggcgccaagcaggccggcccccaggacaccgtggtgtacaccagaacctacgtggagaacagcaagagccccaaggacggctaccaggagaacatcagcggcaagtacatccagaccgtgtacagcaccagcgacagaagcgtgatcgagagagacatgtgcacctactgcagaaagcccctgggcgtggagaccaagatgatcctggacgagctgcagatctgctgccacagcacctgcttcaagtgcgagatctgcaagcagcccctggagaacctgcaggccggcgacagcatctggatctacagacagaccatccactgcgagccctgctacagcaagatcatggccaagtggatcccctag

SEQ ID NO: 98119 - DNA, 2148 bp, synthetic construct
  misc_feature 1..2148: note = Description of Artificial Sequence: Synthetic coding sequence
  source 1..2148: mol_type = other DNA
atggccagagagctgtaccacgaggagttcgccagagccggcaagcaggccggcctgcaggtgtggagaatcgagaagctggagctggtgcccgtgccccagagcgcccacggcgacttctacgtgggcgacgcctacctggtgctgcacaccgccaagaccagcagaggcttcacctaccacctgcacttctggctgggcaaggagtgcagccaggacgagagcaccgccgccgccatcttcaccgtgcagatggacgactacctgggcggcaagcccgtgcagaacagagagctgcagggctacgagagcaacgacttcgtgagctacttcaagggcggcctgaagtacaaggccggcggcgtggccagcggcctgaaccacgtgctgaccaacgacctgaccgccaagagactgctgcacgtgaagggcagaagagtggtgagagccaccgaggtgcccctgagctgggacagcttcaacaagggcgactgcttcatcatcgacctgggcaccgagatctaccagtggtgcggcagcagctgcaacaagtacgagagactgaaggccaaccaggtggccaccggcatcagatacaacgagagaaagggcagaagcgagctgatcgtggtggaggagggcagcgagcccagcgagctgatcaaggtgctgggcgagaagcccgagctgcccgacggcggcgacgacgacgacatcatcgccgacatcagcaacagaaagatggccaagctgtacatggtgagcgacgccagcggcagcatgagagtgaccgtggtggccgaggagaaccccttcagcatggccatgctgctgagcgaggagtgcttcatcctggaccacggcgccgccaagcagatcttcgtgtggaagggcaaggacgccaacccccaggagagaaaggccgccatgaagaccgccgaggagttcctgcagcagatgaactacagcaagaacacccagatccaggtgctgcccgagggcggcgagacccccatcttcaagcagttcttcaaggactggagagacaaggaccagagcgacggcttcggcaaggtgtacgtgaccgagaaggtggcccagatcaagcagatccccttcgacgccagcaagctgcacagcagcccccagatggccgcccagcacaacatggtggacgacggcagcggcaaggtggagatctggagagtggagaacaacggcagaatccaggtggaccagaacagctacggcgagttctacggcggcgactgctacatcatcctgtacacctaccccagaggccagatcatctacacctggcagggcgccaacgccaccagagacgagctgaccaccagcgccttcctgaccgtgcagctggacagaagcctgggcggccaggccgtgcagatcagagtgagccagggcaaggagcccgtgcacctgctgagcctgttcaaggacaagcccctgatcatctacaagaacggcaccagcaagaagggcggccaggcccccgccccccccaccagactgttccaggtgagaagaaacctggccagcatcaccagaatcgtggaggtggacgtggacgccaacagcctgaacagcaacgacgtgttcgtgctgaagctgccccagaacagcggctacatctgggtgggcaagggcgccagccaggaggaggagaagggcgccgagtacgtggccagcgtgctgaagtgcaagaccctgagaatccaggagggcgaggagcccgaggagttctggaacagcctgggcggcaagaaggactaccagaccagccccctgctggagacccaggccgaggaccacccccccagactgtacggctgcagcaacaagaccggcagattcgtgatcgaggagatccccggcgagttcacccaggacgacctggccgaggacgacgtgatgctgctggacgcctgggagcagatcttcatctggatcggcaaggacgccaacgaggtggagaagaaggagagcctgaagagcgccaagatgtacctggagaccgaccccagcggcagagacaagagaacccccatcgtgatcatcaagcagggccacgagccccccaccttcaccggctggttcctgggctgggacagcagcaagtggtag

SEQ ID NO: 98120 - DNA, 1407 bp, synthetic construct
  misc_feature 1..1407: note = Description of Artificial Sequence: Synthetic coding sequence
  source 1..1407: mol_type = other DNA
atggccaagctgtacatggtgagcgacgccagcggcagcatgagagtgaccgtggtggccgaggagaaccccttcagcatggccatgctgctgagcgaggagtgcttcatcctggaccacggcgccgccaagcagatcttcgtgtggaagggcaaggacgccaacccccaggagagaaaggccgccatgaagaccgccgaggagttcctgcagcagatgaactacagcaagaacacccagatccaggtgctgcccgagggcggcgagacccccatcttcaagcagttcttcaaggactggagagacaaggaccagagcgacggcttcggcaaggtgtacgtgaccgagaaggtggcccagatcaagcagatccccttcgacgccagcaagctgcacagcagcccccagatggccgcccagcacaacatggtggacgacggcagcggcaaggtggagatctggagagtggagaacaacggcagaatccaggtggaccagaacagctacggcgagttctacggcggcgactgctacatcatcctgtacacctaccccagaggccagatcatctacacctggcagggcgccaacgccaccagagacgagctgaccaccagcgccttcctgaccgtgcagctggacagaagcctgggcggccaggccgtgcagatcagagtgagccagggcaaggagcccgtgcacctgctgagcctgttcaaggacaagcccctgatcatctacaagaacggcaccagcaagaagggcggccaggcccccgccccccccaccagactgttccaggtgagaagaaacctggccagcatcaccagaatcgtggaggtggacgtggacgccaacagcctgaacagcaacgacgtgttcgtgctgaagctgccccagaacagcggctacatctgggtgggcaagggcgccagccaggaggaggagaagggcgccgagtacgtggccagcgtgctgaagtgcaagaccctgagaatccaggagggcgaggagcccgaggagttctggaacagcctgggcggcaagaaggactaccagaccagccccctgctggagacccaggccgaggaccacccccccagactgtacggctgcagcaacaagaccggcagattcgtgatcgaggagatccccggcgagttcacccaggacgacctggccgaggacgacgtgatgctgctggacgcctgggagcagatcttcatctggatcggcaaggacgccaacgaggtggagaagaaggagagcctgaagagcgccaagatgtacctggagaccgaccccagcggcagagacaagagaacccccatcgtgatcatcaagcagggccacgagccccccaccttcaccggctggttcctgggctgggacagcagcaagtggtag

SEQ ID NO: 98121 - DNA, 1407 bp, synthetic construct; identical to SEQ ID NO: 98120
  misc_feature 1..1407: note = Description of Artificial Sequence: Synthetic coding sequence
  source 1..1407: mol_type = other DNA

SEQ ID NO: 98122 - DNA, 3864 bp, synthetic construct
  misc_feature 1..3864: note = Description of Artificial Sequence: Synthetic coding sequence
  source 1..3864: mol_type = other DNA
atggagcccatctaccccttcgccagaccccagatgaacaccagattccccagcagcagaatggtgcccttccacttcccccccagcaagtgcgccctgtggaaccccacccccaccggcgacttcatctacctgcacctgagctactacagaaaccccaagctggtggtgaccgagaagaccatcagactggcctacagacacgccaagcagaacaagaagaacagcagctgcttcctgctgggcagcctgaccgccgacgaggacgaggagggcgtgaccctgaccgtggacagattcgaccccggcagagaggtgcccgagtgcctggagatcacccccaccgccagcctgcccggcgacttcctgatcccctgcaaggtgcacacccaggagctgtgcagcagagagatgatcgtgcacagcgtggacgacttcagcagcgccctgaaggccctgcagtgccacatctgcagcaaggacagcctggactgcggcaagctgctgagcctgagagtgcacatcaccagcagagagagcctggacagcgtggagttcgacctgcactgggccgccgtgaccctggccaacaacttcaagtgcacccccgtgaagcccatccccatcatccccaccgccctggccagaaacctgagcagcaacctgaacatcagccaggtgcagggcacctacaagtacggctacctgaccatggacgagaccagaaagctgctgctgctgctggagagcgaccccaaggtgtacagcctgcccctggtgggcatctggctgagcggcatcacccacatctacagcccccaggtgtgggcctgctgcctgagatacatcttcaacagcagcgtgcaggagagagtgttcagcgagagcggcaacttcatcatcgtgctgtacagcatgacccacaaggagcccgagttctacgagtgcttcccctgcgacggcaagatccccgacttcagattccagctgctgaccagcaaggagaccctgcacctgttcaagaacgtggagccccccgacaagaaccccatcagatgcgagctgagcgccgagagccagaacgccgagaccgagttcttcagcaaggccagcaagaacttcagcatcaagagaagcagccagaagctgagcagcggcaagatgcccatccacgaccacgacagcggcgtggaggacgaggacttcagccccagacccatccccagcccccaccccgtgagccagaagatcagcaagatccagcccagcgtgcccgagctgagcctggtgctggacggcaacttcatcgagagcaaccccctgcccacccccctggagatggtgaacaacgagaacccccccctgatcaaccacctggagcacctgaagcccctgcagccccagctgtacgacgagaagcacagccccgaggtggaggccggcgagcccagcctgagaggcatccccaaccagctgaaccaggacaagcccgccctgctgagacactgcaaggtgagacagccccccgcctacaagaagggcaacccccacaccagaaacagcatcaagcccagcagccacaacggccccagccacgacatcttcgagaagctgcagaccgtgagcgccggcaacgtgcagaacgaggagtaccccatcagacccagcaccctgaacagcagacagagcagcctggccccccagagccagccccacgacttcgtgttcagcccccacaacagcggcagacccatggagctgcagatccccaccccccccctgcccagctactgcagcaccaacgtgtgcagatgctgccagcaccacagccacatccagtacagccccctgaacagctggcagggcgccaacaccgtgggcagcatccaggacgtgcagagcgaggccctgcagaagcacagcctgttccaccccagcggctgccccgccctgtactgcaacgccttctgcagcagcagcagccccatcgccctgagaccccagggcgacatgggcagctgcagcccccacagcaacatcgagcccagccccgtggccagaccccccagccacatggacctgtgcaacccccagccctgcaccgtgtgcatgcacacccccaagaccgagagcgacaacggcatgatgggcctgagccccgacgcctacagattcctgaccgagcaggacagacagctgagactgctgcaggcccagatccagagactgctggaggcccagagcctgatgccctgcagccccaagaccaccgccgtggaggacaccgtgcaggccggcagacagatggagctggtgagcgtggaggcccagagcagccccggcctgcacatgagaaagggcgtgagcatcgccgtgagcaccggcgccagcctgttctggaacgccgccggcgaggaccaggagcccgacagccagatgaagcaggacgacaccaagatcagcagcgaggacatgaacttcagcgtggacatcaacaacgaggtgaccagcctgcccggcagcgccagcagcctgaaggccgtggacatccccagcttcgaggagagcaacatcgccgtggaggaggagttcaaccagcccctgagcgtgagcaacagcagcctggtggtgagaaaggagcccgacgtgcccgtgttcttccccagcggccagctggccgagagcgtgagcatgtgcctgcagaccggccccaccggcggcgccagcaacaacagcgagaccagcgaggagcccaagatcgagcacgtgatgcagcccctgctgcaccagcccagcgacaaccagaagatctaccaggacctgctgggccaggtgaaccacctgctgaacagcagcagcaaggagaccgagcagcccagcaccaaggccgtgatcatcagccacgagtgcaccagaacccagaacgtgtaccacaccaagaagaagacccaccacagcagactggtggacaaggactgcgtgctgaacgccaccctgaagcagctgagaagcctgggcgtgaagatcgacagccccaccaaggtgaagaagaacgcccacaacgtggaccacgccagcgtgctggcctgcatcagccccgaggccgtgatcagcggcctgaactgcatgagcttcgccaacgtgggcatgagcggcctgagccccaacggcgtggacctgagcatggaggccaacgccatcgccctgaagtacctgaacgagaaccagctgagccagctgagcgtgaccagaagcaaccagaacaactgcgaccccttcagcctgctgcacatcaacaccgacagaagcaccgtgggcctgagcctgatcagccccaacaacatgagcttcgccaccaagaagtacatgaagagatacggcctgctgcagagcagcgacaacagcgaggacgaggaggagccccccgacaacgccgacagcaagagcgagtacctgctgaaccagaacctgagaagcatccccgagcagctgggcggccagaaggagcccagcaagaacgaccacgagatcatcaactgcagcaactgcgagagcgtgggcaccaacgccgacacccccgtgctgagaaacatcaccaacgaggtgctgcagaccaaggccaagcagcagctgaccgagaagcccgccttcctggtgaagaacctgaagcccagccccgccgtgaacctgagaaccggcaaggccgagttcacccagcaccccgagaaggagaacgagggcgacatcaccatcttccccgagagcctgcagcccagcgagaccctgaagcagatgaacagcatgaacagcgtgggcaccttcctggacgtgaagagactgagacagctgcccaagctgttctag

SEQ ID NO: 98123 - DNA, 3864 bp, synthetic construct; identical to SEQ ID NO: 98122
  misc_feature 1..3864: note = Description of Artificial Sequence: Synthetic coding sequence
  source 1..3864: mol_type = other DNA

SEQ ID NO: 98124 - DNA, 3864 bp, synthetic construct; identical to SEQ ID NO: 98122
  misc_feature 1..3864: note = Description of Artificial Sequence: Synthetic coding sequence
  source 1..3864: mol_type = other DNA

SEQ ID NO: 98125 - DNA, 633 bp, synthetic construct
  misc_feature 1..633: note = Description of Artificial Sequence: Synthetic coding sequence
  source 1..633: mol_type = other DNA
cagctgtacgacgagaagcacagccccgaggtggaggccggcgagcccagcctgagaggcatccccaaccagctgaaccaggacaagcccgccctgctgagacactgcaagccctgcaccgtgtgcatgcacacccccaagaccgagagcgacaacggcatgatgggcctgagccccgacgcctacagattcctgaccgagcaggacagacagctgagactgctgcaggcccagatccagagactgctggaggcccagagcctgatgccctgcagccccaagaccaccgccgtggaggacaccgtgcaggccggcagacagatggagctggtgagcgtggaggcccagagcagccccggcctgcacatgagaaagggcgtgagcatcgccgtgagcaccggcgccagcctgttctggaacgccgccggcgaggaccaggagcccgacagccagatgaagcaggacgacaccaagatcagcagcgaggacatgaacttcagcgtggacatcaacaacgaggtgaccagcctgcccggcagcgccagcagcctgaaggccgtggacatccccagcttcgaggagagcaacatcgccgtggaggaggagttcaaccagcccctgagcgtgagctag

SEQ ID NO: 98126 - DNA, 3867 bp, synthetic construct
  misc_feature 1..3867: note = Description of Artificial Sequence: Synthetic coding sequence
  source 1..3867: mol_type = other DNA
atggagcccatctaccccttcgccagaccccagatgaacaccagattccccagcagcagaatggtgcccttccacttcccccccagcaagtgcgccctgtggaaccccacccccaccggcgacttcatctacctgcacctgagctactacagaaaccccaagctggtggtgaccgagaagaccatcagactggcctacagacacgccaagcagaacaagaagaacagcagctgcttcctgctgggcagcctgaccgccgacgaggacgaggagggcgtgaccctgaccgtggacagattcgaccccggcagagaggtgcccgagtgcctggagatcacccccaccgccagcctgcccggcgacttcctgatcccctgcaaggtgcacacccaggagctgtgcagcagagagatgatcgtgcacagcgtggacgacttcagcagcgccctgaaggccctgcagtgccacatctgcagcaaggacagcctggactgcggcaagctgctgagcctgagagtgcacatcaccagcagagagagcctggacagcgtggagttcgacctgcactgggccgccgtgaccctggccaacaacttcaagtgcacccccgtgaagcccatccccatcatccccaccgccctggccagaaacctgagcagcaacctgaacatcagccaggtgcagggcacctacaagtacggctacctgaccatggacgagaccagaaagctgctgctgctgctggagagcgaccccaaggtgtacagcctgcccctggtgggcatctggctgagcggcatcacccacatctacagcccccaggtgtgggcctgctgcctgagatacatcttcaacagcagcgtgcaggagagagtgttcagcgagagcggcaacttcatcatcgtgctgtacagcatgacccacaaggagcccgagttctacgagtgcttcccctgcgacggcaagatccccgacttcagattccagctgctgaccagcaaggagaccctgcacctgttcaagaacgtggagccccccgacaagaaccccatcagatgcgagctgagcgccgagagccagaacgccgagaccgagttcttcagcaaggccagcaagaacttcagcatcaagagaagcagccagaagctgagcagcggcaagatgcccatccacgaccacgacagcggcgtggaggacgaggacttcagccccagacccatccccagcccccaccccgtgagccagaagatcagcaagatccagcccagcgtgcccgagctgagcctggtgctggacggcaacttcatcgagagcaaccccctgcccacccccctggagatggtgaacaacgagaacccccccctgatcaaccacctggagcacctgaagcccctgcagccccagctgtacgacgagaagcacagccccgaggtggaggccggcgagcccagcctgagaggcatccccaaccagctgaaccaggacaagcccgccctgctgagacactgcaaggtgagacagccccccgcctacaagaagggcaacccccacaccagaaacagcatcaagcccagcagccacaacggccccagccacgacatcttcgagaagctgcagaccgtgagcgccggcaacgtgcagaacgaggagtaccccatcagacccagcaccctgaacagcagacagagcagcctggccccccagagccagccccacgacttcgtgttcagcccccacaacagcggcagacccatggagctgcagatccccaccccccccctgcccagctactgcagcaccaacgtgtgcagatgctgccagcaccacagccacatccagtacagccccctgaacagctggcagggcgccaacaccgtgggcagcatccaggacgtgcagagcgaggccctgcagaagcacagcctgttccaccccagcggctgccccgccctgtactgcaacgccttctgcagcagcagcagccccatcgccctgagaccccagggcgacatgggcagctgcagcccccacagcaacatcgagcccagccccgtggccagaccccccagccacatggacctgtgcaacccccagccctgcaccgtgtgcatgcacacccccaagaccgagagcgacaacggcatgatgggcctgagccccgacgcctacagattcctgaccgagcaggacagacagctgagactgctgcaggcccagatccagagactgctggaggcccagagcctgatgccctgcagccccaagaccaccgccgtggaggacaccgtgcaggccggcagacagatggagctggtgagcgtggaggcccagagcagccccggcctgcacatgagaaagggcgtgagcatcgccgtgagcaccggcgccagcctgttctggaacgccgccggcgaggaccaggagcccgacagccagatgaagcaggacgacaccaagatcagcagcgaggacatgaacttcagcgtggacatcaacaacgaggtgaccagcctgcccggcagcgccagcagcctgaaggccgtggacatccccagcttcgaggagagcaacatcgccgtggaggaggagttcaaccagcccctgagcgtgagcaacagcagcagcctggtggtgagaaaggagcccgacgtgcccgtgttcttccccagcggccagctggccgagagcgtgagcatgtgcctgcagaccggccccaccggcggcgccagcaacaacagcgagaccagcgaggagcccaagatcgagcacgtgatgcagcccctgctgcaccagcccagcgacaaccagaagatctaccaggacctgctgggccaggtgaaccacctgctgaacagcagcagcaaggagaccgagcagcccagcaccaaggccgtgatcatcagccacgagtgcaccagaacccagaacgtgtaccacaccaagaagaagacccaccacagcagactggtggacaaggactgcgtgctgaacgccaccctgaagcagctgagaagcctgggcgtgaagatcgacagccccaccaaggtgaagaagaacgcccacaacgtggaccacgccagcgtgctggcctgcatcagccccgaggccgtgatcagcggcctgaactgcatgagcttcgccaacgtgggcatgagcggcctgagccccaacggcgtggacctgagcatggaggccaacgccatcgccctgaagtacctgaacgagaaccagctgagccagctgagcgtgaccagaagcaaccagaacaactgcgaccccttcagcctgctgcacatcaacaccgacagaagcaccgtgggcctgagcctgatcagccccaacaacatgagcttcgccaccaagaagtacatgaagagatacggcctgctgcagagcagcgacaacagcgaggacgaggaggagccccccgacaacgccgacagcaagagcgagtacctgctgaaccagaacctgagaagcatccccgagcagctgggcggccagaaggagcccagcaagaacgaccacgagatcatcaactgcagcaactgcgagagcgtgggcaccaacgccgacacccccgtgctgagaaacatcaccaacgaggtgctgcagaccaaggccaagcagcagctgaccgagaagcccgccttcctggtgaagaacctgaagcccagccccgccgtgaacctgagaaccggcaaggccgagttcacccagcaccccgagaaggagaacgagggcgacatcaccatcttccccgagagcctgcagcccagcgagaccctgaagcagatgaacagcatgaacagcgtgggcaccttcctggacgtgaagagactgagacagctgcccaagctgttctag

SEQ ID NO: 98127 - DNA, 606 bp, synthetic construct
  misc_feature 1..606: note = Description of Artificial Sequence: Synthetic coding sequence
  source 1..606: mol_type = other DNA
atgagcttcgccaccctgagacccgccccccccggcagatacctgtaccccgaggtgagccccctgagcgaggacgaggacagaggcagcgacagcagcggcagcgacgagaagccctgcagagtgcacgccgccagatgcggcctgcagggcgccagaagaagagccggcggcagaagagccggcggcggcggccccggcggcagacccggcagagagcccagacagagacacaccgccaacgccagagagagagacagaaccaacagcgtgaacaccgccttcaccgccctgagaaccctgatccccaccgagcccgccgacagaaagctgagcaagatcgagaccctgagactggccagcagctacatcagccacctgggcaacgtgctgctggccggcgaggcctgcggcgacggccagccctgccacagcggccccgccttcttccacgccgccagagccggcagccccccccccccccccccccccccccccgccagagacggcgagaacacccagcccaagcagatctgcaccttctgcctgagcaaccagagaaagctgagcaaggacagagacagaaagaccgccatcagaagctag

SEQ ID NO: 98128 - DNA, 642 bp, synthetic construct
  misc_feature 1..642: note = Description of Artificial Sequence: Synthetic coding sequence
  source 1..642: mol_type = other DNA
atgcagctgcccctggccctgtgcctggtgtgcctgctggtgcacaccgccttcagagtggtggagggccagggctggcaggccttcaagaacgacgccaccgagatcatccccgagctgggcgagtaccccgagcccccccccgagctggagaacaacaagaccatgaacagagccgagaacggcggcagacccccccaccaccccttcgagaccaaggacgtgagcgagtacagctgcagagagctgcacttcaccagatacgtgaccgacggcccctgcagaagcgccaagcccgtgaccgagctggtgtgcagcggccagtgcggccccgccagactgctgcccaacgccatcggcagaggcaagtggtggagacccagcggccccgacttcagatgcatccccgacagatacagagcccagagagtgcagctgctgtgccccggcggcgaggcccccagagccagaaaggtgagactggtggccagctgcaagtgcaagagactgaccagattccacaaccagagcgagctgaaggacttcggcaccgaggccgccagaccccagaagggcagaaagcccagacccagagccagaagcgccaaggccaaccaggccgagctggagaacgcctactag

SEQ ID NO: 98129 - DNA, 906 bp, synthetic construct
  misc_feature 1..906: note = Description of Artificial Sequence: Synthetic coding sequence
  source 1..906: mol_type = other DNA
atggccatgctggtgctggtgcccggcagagtgatgagacccctgggcggccagctgtggagattcctgcccagaggcctggagttctggggccccgccgagggcaccgccagagtgctgctgagacagttctgcgccagacaggccgaggcctggagagccagcggcagacccggctactgcctgggcaccagacccctgagcaccgccagacccccccccccctggagccagaagggccccggcgacagcaccagacccagcaagcccggccccgtgagctggaagagcctggccatcaccttcgccatcggcggcgccctgctggccggcatgaagcacgtgaagaaggagaaggccgagaagctggagaaggagagacagagacacatcggcaagcccctgctgggcggccccttcagcctgaccacccacaccggcgagagaaagaccgacaaggactacctgggccagtggctgctgatctacttcggcttcacccactgccccgacgtgtgccccgaggagctggagaagatgatccaggtggtggacgagatcgacagcatcaccaccctgcccgacctgacccccctgttcatcagcatcgaccccgagagagacaccaaggaggccatcgccaactacgtgaaggagttcagccccaagctggtgggcctgaccggcaccagagaggaggtggaccaggtggccagagcctacagagtgtactacagccccggccccaaggacgaggacgaggactacatcgtggaccacaccatcatcatgtacctgatcggccccgacggcgagttcctggactacttcggccagaacaagagaaagggcgagatcgccgccagcatcgccacccacatgagaccctacagaaagaagagctag

SEQ ID NO: 98130 - DNA, 813 bp, synthetic construct
  misc_feature 1..813: note = Description of Artificial Sequence: Synthetic coding sequence
  source 1..813: mol_type = other DNA
atggccatgctggtgctggtgcccggcagagtgatgagacccctgggcggccagctgtggagattcctgcccagaggcctggagttctggggccccgccgagggcaccgccagagtgctgctgagacagttctgcgccagacaggccgaggcctggagagccagcggcagacccggctactgcctgggcaccagacccctgagcaccgccagacccccccccccctggagccagaagggccccggcgacagcaccagacccagcaagcccggccccgtgagctggaagagcctggccatcaccttcgccatcggcggcgccctgctggccggcatgaagcacgtgaagaaggagaaggccgagaagctggagaaggagagacagagacacatcggcaagcccctgctgggcggccccttcagcctgaccacccacaccggcgagagaaagaccgacaaggactacctggacagcatcaccaccctgcccgacctgacccccctgttcatcagcatcgaccccgagagagacaccaaggaggccatcgccaactacgtgaaggagttcagccccaagctggtgggcctgaccggcaccagagaggaggtggaccaggtggccagagcctacagagtgtactacagccccggccccaaggacgaggacgaggactacatcgtggaccacaccatcatcatgtacctgatcggccccgacggcgagttcctggactacttcggccagaacaagagaaagggcgagatcgccgccagcatcgccacccacatgagaccctacagaaagaagagctag

SEQ ID NO: 98131 - DNA, 801 bp, synthetic construct
  misc_feature 1..801: note = Description of Artificial Sequence: Synthetic coding sequence
  source 1..801: mol_type = other DNA
atgctgctgctgaccagaagccccaccgcctggcacagactgagccagctgaagcccagagtgctgcccggcaccctgggcggccaggccctgcacctgagaagctggctgctgagcagacagggccccgccgagaccggcggccagggccagccccagggccccggcctgagaaccagactgctgatcaccggcctgttcggcgccggcctgggcggcgcctggctggccctgagagccgagaaggagagactgcagcagcagaagagaaccgaggccctgagacaggccgccgtgggccagggcgacttccacctgctggaccacagaggcagagccagatgcaaggccgacttcagaggccagtgggtgctgatgtacttcggcttcacccactgccccgacatctgccccgacgagctggagaagctggtgcaggtggtgagacagctggaggccgagcccggcctgccccccgtgcagcccgtgttcatcaccgtggaccccgagagagacgacgtggaggccatggccagatacgtgcaggacttccaccccagactgctgggcctgaccggcagcaccaagcaggtggcccaggccagccacagctacagagtgtactacaacgccggccccaaggacgaggaccaggactacatcgtggaccacagcatcgccatctacctgctgaaccccgacggcctgttcaccgactactacggcagaagcagaagcgccgagcagatcagcgacagcgtgagaagacacatggccgccttcagaagcgtgctgagctag

SEQ ID NO: 98132 - DNA, 801 bp, synthetic construct; identical to SEQ ID NO: 98131
  misc_feature 1..801: note = Description of Artificial Sequence: Synthetic coding sequence
  source 1..801: mol_type = other DNA

SEQ ID NO: 98133 - DNA, 411 bp, synthetic construct
  misc_feature 1..411: note = Description of Artificial Sequence: Synthetic coding sequence
  source 1..411: mol_type = other DNA
atgctgctgctgaccagaagccccaccgcctggcacagactgagccagctgaagcccagagtgctgcccggcaccctgggcggccaggccctgcacctgagaagctggctgctgagcagacagggccccgccgagaccggcggccagggccagccccagggccccggcctgagaaccagactgctgatcaccggcctgttcggcgccggcctgggcggcgcctggctggccctgagagccgagaaggagagactgcagcagcagaagagaaccgaggccctgagacaggccgccgtgggccagggcgacttccacctgctggaccacagaggcagagccagatgcaaggccgacttcagaggccagtgggtgctgatgtacttcggcttcacccactgccccgacatctag

SEQ ID NO: 98134 - DNA, 411 bp, synthetic construct; identical to SEQ ID NO: 98133
  misc_feature 1..411: note = Description of Artificial Sequence: Synthetic coding sequence
  source 1..411: mol_type = other DNA

SEQ ID NO: 98135 - DNA, 801 bp, synthetic construct; identical to SEQ ID NO: 98131
  misc_feature 1..801: note = Description of Artificial Sequence: Synthetic coding sequence
  source 1..801: mol_type = other DNA

SEQ ID NO: 98136 - DNA, 801 bp, synthetic construct; identical to SEQ ID NO: 98131
  misc_feature 1..801: note = Description of Artificial Sequence: Synthetic coding sequence
  source 1..801: mol_type = other DNA

SEQ ID NO: 98137 - DNA, 1047 bp, synthetic construct
  misc_feature 1..1047: note = Description of Artificial Sequence: Synthetic coding sequence
  source 1..1047: mol_type = other DNA
atgcccagaagcttcctggtgaagaaggtgaagctggacgccttcagcagcgccgacctggagagcgcctacggcagagccagaagcgacctgggcgcccccctgcacgacaagggctacctgagcgactacgtgggccccagcagcgtgtacgacggcgacgccgaggccgccctgctgaagggccccagccccgagcccatgtacgccgccgccgtgagaggcgagctgggccccgccgccgccggcagcgcccccccccccacccccagacccgagctggccaccgccgccggcggctacatcaacggcgacgccgccgtgagcgagggctacgccgccgacgccttcttcatcaccgacggcagaagcagaagaaaggccagcaacgccggcagcgccgccgcccccagcaccgccagcgccgccgcccccgacggcgacgccggcggcggcggcggcgccggcggcagaagcctgggcagcggccccggcggcagaggcggcaccagagccggcgccggcaccgaggccagagccggccccggcgccgccggcgccggcggcagacacgcctgcggcgagtgcggcaagacctacgccaccagcagcaacctgagcagacacaagcagacccacagaagcctggacagccagctggccagaagatgccccacctgcggcaaggtgtacgtgagcatgcccgccatggccatgcacctgctgacccacgacctgagacacaagtgcggcgtgtgcggcaaggccttcagcagaccctggctgctgcagggccacatgagaagccacaccggcgagaagcccttcggctgcgcccactgcggcaaggccttcgccgacagaagcaacctgagagcccacatgcagacccacagcgccttcaagcacttccagtgcaagagatgcaagaagagcttcgccctgaagagctacctgaacaagcactacgagagcgcctgcttcaagggcggcgccggcggccccgccgcccccgcccccccccagctgagccccgtgcaggcctag

SEQ ID NO: 98138 - DNA, 4893 bp, synthetic construct
  misc_feature 1..4893: note = Description of Artificial Sequence: Synthetic coding sequence
  source 1..4893: mol_type = other DNA
atgctgaagtgcatccccctgtggagatgcaacagacacgtggagagcgtggacaagagacactgcagcctgcaggccgtgcccgaggagatctacagatacagcagaagcctggaggagctgctgctggacgccaaccagctgagagagctgcccaagcccttcttcagactgctgaacctgagaaagctgggcctgagcgacaacgagatccagagactgccccccgaggtggccaacttcatgcagctggtggagctggacgtgagcagaaacgacatccccgagatccccgagagcatcaagttctgcaaggccctggagatcgccgacttcagcggcaaccccctgagcagactgcccgacggcttcacccagctgagaagcctggcccacctggccctgaacgacgtgagcctgcaggccctgcccggcgacgtgggcaacctggccaacctggtgaccctggagctgagagagaacctgctgaagagcctgcccgccagcctgagcttcctggtgaagctggagcagctggacctgggcggcaacgacctggaggtgctgcccgacaccctgggcgccctgcccaacctgagagagctgtggctggacagaaaccagctgagcgccctgccccccgagctgggcaacctgagaagactggtgtgcctggacgtgagcgagaacagactggaggagctgcccgccgagctgggcggcctggtgctgctgaccgacctgctgctgagccagaacctgctgagaagactgcccgacggcatcggccagctgaagcagctgagcatcctgaaggtggaccagaacagactgtgcgaggtgaccgaggccatcggcgactgcgagaacctgagcgagctgatcctgaccgagaacctgctgatggccctgcccagaagcctgggcaagctgaccaagctgaccaacctgaacgtggacagaaaccacctggaggccctgccccccgagatcggcggctgcgtggccctgagcgtgctgagcctgagagacaacagactggccgtgctgccccccgagctggcccacaccaccgagctgcacgtgctggacgtggccggcaacagactgcagagcctgcccttcgccctgacccacctgaacctgaaggccctgtggctggccgagaaccaggcccagcccatgctgagattccagaccgaggacgacgccagaaccggcgagaaggtgctgacctgctacctgctgccccagcagcccccccccagcctggaggacgccggccagcagggcagcctgagcgagacctggagcgacgccccccccagcagagtgagcgtgatccagttcctggaggcccccatcggcgacgaggacgccgaggaggccgccgccgagaagagaggcctgcagagaagagccaccccccaccccagcgagctgaaggtgatgaagagaagcatcgagggcagaagaagcgaggcctgcccctgccagcccgacagcggcagccccctgcccgccgaggaggagaagagactgagcgccgagagcggcctgagcgaggacagcagacccagcgccagcaccgtgagcgaggccgagcccgagggccccagcgccgaggcccagggcggcagccagcaggaggccaccaccgccggcggcgaggaggacgccgaggaggactaccaggagcccaccgtgcacttcgccgaggacgccctgctgcccggcgacgacagagagatcgaggagggccagcccgaggccccctggaccctgcccggcggcagacagagactgatcagaaaggacaccccccactacaagaagcacttcaagatcagcaagctgccccagcccgaggccgtggtggccctgctgcagggcatgcagcccgacggcgagggccccgtggcccccggcggctggcacaacggcccccacgccccctgggcccccagagcccagaaggaggaggaggaggaggaggagggcagcccccaggaggaggaggtggaggaggaggaggagaacagagccgaggaggaggaggccagcaccgaggaggaggacaaggagggcgccgtggtgagcgcccccagcgtgaagggcgtgagcttcgaccaggccaacaacctgctgatcgagcccgccagaatcgaggaggaggagctgaccctgaccatcctgagacagaccggcggcctgggcatcagcatcgccggcggcaagggcagcaccccctacaagggcgacgacgagggcatcttcatcagcagagtgagcgaggagggccccgccgccagagccggcgtgagagtgggcgacaagctgctggaggtgaacggcgtggccctgcagggcgccgagcaccacgaggccgtggaggccctgagaggcgccggcaccgccgtgcagatgagagtgtggagagagagaatggtggagcccgagaacgccgtgaccatcacccccctgagacccgaggacgactacagccccagagagagaagaggcggcggcctgagactgcccctgctgccccccgagagccccggccccctgagacagagacacgtggcctgcctggccagaagcgagagaggcctgggcttcagcatcgccggcggcaagggcagcaccccctacagagccggcgacgccggcatcttcgtgagcagaatcgccgagggcggcgccgcccacagagccggcaccctgcaggtgggcgacagagtgctgagcatcaacggcgtggacgtgaccgaggccagacacgaccacgccgtgagcctgctgaccgccgccagccccaccatcgccctgctgctggagagagaggccggcggccccctgccccccagccccctgccccacagcagcccccccaccgccgccgtggccaccaccagcatcaccaccgccacccccggcgtgcccggcctgcccagcctggcccccagcctgctggccgccgccctggagggcccctaccccgtggaggagatcagactgcccagagccggcggccccctgggcctgagcatcgtgggcggcagcgaccacagcagccaccccttcggcgtgcaggagcccggcgtgttcatcagcaaggtgctgcccagaggcctggccgccagaagcggcctgagagtgggcgacagaatcctggccgtgaacggccaggacgtgagagacgccacccaccaggaggccgtgagcgccctgctgagaccctgcctggagctgagcctgctggtgagaagagaccccgccccccccggcctgagagagctgtgcatccagaaggcccccggcgagagactgggcatcagcatcagaggcggcgccagaggccacgccggcaaccccagagaccccaccgacgagggcatcttcatcagcaaggtgagccccaccggcgccgccggcagagacggcagactgagagtgggcctgagactgctggaggtgaaccagcagagcctgctgggcctgacccacggcgaggccgtgcagctgctgagaagcgtgggcgacaccctgaccgtgctggtgtgcgacggcttcgaggccagcaccgacgccgccctggaggtgagccccggcgtgatcgccaaccccttcgccgccggcatcggccacagaaacagcctggagagcatcagcagcatcgacagagagctgagccccgagggccccggcaaggagaaggagctgcccggccagaccctgcactggggccccgaggccaccgaggccgccggcagaggcctgcagcccctgaagctggactacagagccctggccgccgtgcccagcgccggcagcgtgcagagagtgcccagcggcgccgccggcggcaagatggccgagagcccctgcagccccagcggccagcagccccccagcccccccagccccgacgagctgcccgccaacgtgaagcaggcctacagagccttcgccgccgtgcccaccagccacccccccgaggacgcccccgcccagccccccacccccggccccgccgccagccccgagcagctgagcttcagagagagacagaagtacttcgagctggaggtgagagtgccccaggccgagggcccccccaagagagtgagcctggtgggcgccgacgacctgagaaagatgcaggaggaggaggccagaaagctgcagcagaagagagcccagatgctgagagaggccgccgaggccggcgccgaggccagactggccctggacggcgagaccctgggcgaggaggagcaggaggacgagcagcccccctgggccagccccagccccaccagcagacagagccccgccagccccccccccctgggcggcggcgcccccgtgagaaccgccaaggccgagagaagacaccaggagagactgagagtgcagagccccgagccccccgcccccgagagagccctgagccccgccgagctgagagccctggaggccgagaagagagccctgtggagagccgccagaatgaagagcctggagcaggacgccctgagagcccagatggtgctgagcagaagccaggagggcagaggcaccagaggccccctggagagactggccgaggcccccagccccgcccccacccccagccccacccccgtggaggacctgggcccccagaccagcaccagccccggcagactgagccccgacttcgccgaggagctgagaagcctggagcccagccccagccccggcccccaggaggaggacggcgaggtggccctggtgctgctgggcagacccagccccggcgccgtgggccccgaggacgtggccctgtgcagcagcagaagacccgtgagacccggcagaagaggcctgggccccgtgcccagctag

SEQ ID NO: 98139 - DNA, 4650 bp, synthetic construct
  misc_feature 1..4650: note = Description of Artificial Sequence: Synthetic coding sequence
  source 1..4650: mol_type = other DNA
atgcagctggtggagctggacgtgagcagaaacgacatccccgagatccccgagagcatcaagttctgcaaggccctggagatcgccgacttcagcggcaaccccctgagcagactgcccgacggcttcacccagctgagaagcctggcccacctggccctgaacgacgtgagcctgcaggccctgcccggcgacgtgggcaacctggccaacctggtgaccctggagctgagagagaacctgctgaagagcctgcccgccagcctgagcttcctggtgaagctggagcagctggacctgggcggcaacgacctggaggtgctgcccgacaccctgggcgccctgcccaacctgagagagctgtggctggacagaaaccagctgagcgccctgccccccgagctgggcaacctgagaagactggtgtgcctggacgtgagcgagaacagactggaggagctgcccgccgagctgggcggcctggtgctgctgaccgacctgctgctgagccagaacctgctgagaagactgcccgacggcatcggccagctgaagcagctgagcatcctgaaggtggaccagaacagactgtgcgaggtgaccgaggccatcggcgactgcgagaacctgagcgagctgatcctgaccgagaacctgctgatggccctgcccagaagcctgggcaagctgaccaagctgaccaacctgaacgtggacagaaaccacctggaggccctgccccccgagatcggcggctgcgtggccctgagcgtgctgagcctgagagacaacagactggccgtgctgccccccgagctggcccacaccaccgagctgcacgtgctggacgtggccggcaacagactgcagagcctgcccttcgccctgacccacctgaacctgaaggccctgtggctggccgagaaccaggcccagcccatgctgagattccagaccgaggacgacgccagaaccggcgagaaggtgctgacctgctacctgctgccccagcagcccccccccagcctggaggacgccggccagcagggcagcctgagcgagacctggagcgacgccccccccagcagagtgagcgtgatccagttcctggaggcccccatcggcgacgaggacgccgaggaggccgccgccgagaagagaggcctgcagagaagagccaccccccaccccagcgagctgaaggtgatgaagagaagcatcgagggcagaagaagcgaggcctgcccctgccagcccgacagcggcagccccctgcccgccgaggaggagaagagactgagcgccgagagcggcctgagcgaggacagcagacccagcgccagcaccgtgagcgaggccgagcccgagggccccagcgccgaggcccagggcggcagccagcaggaggccaccaccgccggcggcgaggaggacgccgaggaggactaccaggagcccaccgtgcacttcgccgaggacgccctgctgcccggcgacgacagagagatcgaggagggccagcccgaggccccctggaccctgcccggcggcagacagagactgatcagaaaggacaccccccactacaagaagcacttcaagatcagcaagctgccccagcccgaggccgtggtggccctgctgcagggcatgcagcccgacggcgagggccccgtggcccccggcggctggcacaacggcccccacgccccctgggcccccagagcccagaaggaggaggaggaggaggaggagggcagcccccaggaggaggaggtggaggaggaggaggagaacagagccgaggaggaggaggccagcaccgaggaggaggacaaggagggcgccgtggtgagcgcccccagcgtgaagggcgtgagcttcgaccaggccaacaacctgctgatcgagcccgccagaatcgaggaggaggagctgaccctgaccatcctgagacagaccggcggcctgggcatcagcatcgccggcggcaagggcagcaccccctacaagggcgacgacgagggcatcttcatcagcagagtgagcgaggagggccccgccgccagagccggcgtgagagtgggcgacaagctgctggaggtgaacggcgtggccctgcagggcgccgagcaccacgaggccgtggaggccctgagaggcgccggcaccgccgtgcagatgagagtgtggagagagagaatggtggagcccgagaacgccgtgaccatcacccccctgagacccgaggacgactacagccccagagagagaagaggcggcggcctgagactgcccctgctgccccccgagagccccggccccctgagacagagacacgtggcctgcctggccagaagcgagagaggcctgggcttcagcatcgccggcggcaagggcagcaccccctacagagccggcgacgccggcatcttcgtgagcagaatcgccgagggcggcgccgcccacagagccggcaccctgcaggtgggcgacagagtgctgagcatcaacggcgtggacgtgaccgaggccagacacgaccacgccgtgagcctgctgaccgccgccagccccaccatcgccctgctgctggagagagaggccggcggccccctgccccccagccccctgccccacagcagcccccccaccgccgccgtggccaccaccagcatcaccaccgccacccccggcgtgcccggcctgcccagcctggcccccagcctgctggccgccgccctggagggcccctaccccgtggaggagatcagactgcccagagccggcggccccctgggcctgagcatcgtgggcggcagcgaccacagcagccaccccttcggcgtgcaggagcccggcgtgttcatcagcaaggtgctgcccagaggcctggccgccagaagcggcctgagagtgggcgacagaatcctggccgtgaacggccaggacgtgagagacgccacccaccaggaggccgtgagcgccctgctgagaccctgcctggagctgagcctgctggtgagaagagaccccgccccccccggcctgagagagctgtgcatccagaaggcccccggcgagagactgggcatcagcatcagaggcggcgccagaggccacgccggcaaccccagagaccccaccgacgagggcatcttcatcagcaaggtgagccccaccggcgccgccggcagagacggcagactgagagtgggcctgagactgctggaggtgaaccagcagagcctgctgggcctgacccacggcgaggccgtgcagctgctgagaagcgtgggcgacaccctgaccgtgctggtgtgcgacggcttcgaggccagcaccgacgccgccctggaggtgagccccggcgtgatcgccaaccccttcgccgccggcatcggccacagaaacagcctggagagcatcagcagcatcgacagagagctgagccccgagggccccggcaaggagaaggagctgcccggccagaccctgcactggggccccgaggccaccgaggccgccggcagaggcctgcagcccctgaagctggactacagagccctggccgccgtgcccagcgccggcagcgtgcagagagtgcccagcggcgccgccggcggcaagatggccgagagcccctgcagccccagcggccagcagccccccagcccccccagccccgacgagctgcccgccaacgtgaagcaggcctacagagccttcgccgccgtgcccaccagccacccccccgaggacgcccccgcccagccccccacccccggccccgccgccagccccgagcagctgagcttcagagagagacagaagtacttcgagctggaggtgagagtgccccaggccgagggcccccccaagagagtgagcctggtgggcgccgacgacctgagaaagatgcaggaggaggaggccagaaagctgcagcagaagagagcccagatgctgagagaggccgccgaggccggcgccgaggccagactggccctggacggcgagaccctgggcgaggaggagcaggaggacgagcagcccccctgggccagccccagccccaccagcagacagagccccgccagccccccccccctgggcggcggcgcccccgtgagaaccgccaaggccgagagaagacaccaggagagactgagagtgcagagccccgagccccccgcccccgagagagccctgagccccgccgagctgagagccctggaggccgagaagagagccctgtggagagccgccagaatgaagagcctggagcaggacgccctgagagcccagatggtgctgagcagaagccaggagggcagaggcaccagaggccccctggagagactggccgaggcccccagccccgcccccacccccagccccacccccgtggaggacctgggcccccagaccagcaccagccccggcagactgagccccgacttcgccgaggagctgagaagcctggagcccagccccagccccggcccccaggaggaggacggcgaggtggccctggtgctgctgggcagacccagccccggcgccgtgggccccgaggacgtggccctgtgcagcagcagaagacccgtgagacccggcagaagaggcctgggccccgtgcccagctag

SEQ ID NO: 98140 - DNA, 2268 bp, synthetic construct
  misc_feature 1..2268: note = Description of Artificial Sequence: Synthetic coding sequence
  source 1..2268: mol_type = other DNA
atgcagcccgacggcgagggccccgtggcccccggcggctggcacaacggcccccacgccccctgggcccccagagcccagaaggaggaggaggaggaggaggagggcagcccccaggaggaggaggtggaggaggaggaggagaacagagccgaggaggaggaggccagcaccgaggaggaggacaaggagggcgccgtggtgagcgcccccagcgtgaagggcgtgagcttcgaccaggccaacaacctgctgatcgagcccgccagaatcgaggaggaggagctgaccctgaccatcctgagacagaccggcggcctgggcatcagcatcgccggcggcaagggcagcaccccctacaagggcgacgacgagggcatcttcatcagcagagtgagcgaggagggccccgccgccagagccggcgtgagagtgggcgacaagctgctggaggtgaacggcgtggccctgcagggcgccgagcaccacgaggccgtggaggccctgagaggcgccggcaccgccgtgcagatgagagtgtggagagagagaatggtggagcccgagaacgccgtgaccatcacccccctgagacccgaggacgactacagccccagagagagaagaggcggcggcctgagactgcccctgctgccccccgagagccccggccccctgagacagagacacgtggcctgcctggccagaagcgagagaggcctgggcttcagcatcgccggcggcaagggcagcaccccctacagagccggcgacgccggcatcttcgtgagcagaatcgccgagggcggcgccgcccacagagccggcaccctgcaggtgggcgacagagtgctgagcatcaacggcgtggacgtgaccgaggccagacacgaccacgccgtgagcctgctgaccgccgccagccccaccatcgccctgctgctggagagagaggccggcggccccctgccccccagccccctgccccacagcagcccccccaccgccgccgtggccaccaccagcatcaccaccgccacccccggcgtgcccggcctgcccagcctggcccccagcctgctggccgccgccctggagggcccctaccccgtggaggagatcagactgcccagagccggcggccccctgggcctgagcatcgtgggcggcagcgaccacagcagccaccccttcggcgtgcaggagcccggcgtgttcatcagcaaggtgctgcccagaggcctggccgccagaagcggcctgagagtgggcgacagaatcctggccgtgaacggccaggacgtgagagacgccacccaccaggaggccgtgagcgccctgctgagaccctgcctggagctgagcctgctggtgagaagagaccccgccccccccggcctgagagagctgtgcatccagaaggcccccggcgagagactgggcatcagcatcagaggcggcgccagaggccacgccggcaaccccagagaccccaccgacgagggcatcttcatcagcaaggtgagccccaccggcgccgccggcagagacggcagactgagagtgggcctgagactgctggaggtgaaccagcagagcctgctgggcctgacccacggcgaggccgtgcagctgctgagaagcgtgggcgacaccctgaccgtgctggtgtgcgacggcttcgaggccagcaccgacgccgccctggaggtgagccccggcgtgatcgccaaccccttcgccgccggcatcggccacagaaacagcctggagagcatcagcagcatcgacagagagctgagccccgagggccccggcaaggagaaggagctgcccggccagaccctgcactggggccccgaggccaccgaggccgccggcagaggcctgcagcccctgaagctggactacagagccctggccgccgtgcccagcgccggcagcgtgcagagagtgcccagcggcgccgccggcggcaagatggccgagagcccctgcagccccagcggccagcagccccccagcccccccagccccgacgagctgcccgccaacgtgaagcaggcctacagagccttcgccgccgtgcccaccagccacccccccgaggacgcccccgcccagccccccacccccggccccgccgccagccccgagcagctgagcttcagagagagacagaagtacttcgagctggaggtgagagtgccccaggccgagggccccctgagacccggcagaagaggcctgggccccgtgcccagctag

SEQ ID NO: 98141 - DNA, 4968 bp, synthetic construct
  misc_feature 1..4968: note = Description of Artificial Sequence: Synthetic coding sequence
  source 1..4968: mol_type = other DNA
atgctgaagtgcatccccctgtggagatgcaacagacacgtggagagcgtggacaagagacactgcagcctgcaggccgtgcccgaggagatctacagatacagcagaagcctggaggagctgctgctggacgccaaccagctgagagagctgcccaagcccttcttcagactgctgaacctgagaaagctgggcctgagcgacaacgagatccagagactgccccccgaggtggccaacttcatgcagctggtggagctggacgtgagcagaaacgacatccccgagatccccgagagcatcaagttctgcaaggccctggagatcgccgacttcagcggcaaccccctgagcagactgcccgacggcttcacccagctgagaagcctggcccacctggccctgaacgacgtgagcctgcaggccctgcccggcgacgtgggcaacctggccaacctggtgaccctggagctgagagagaacctgctgaagagcctgcccgccagcctgagcttcctggtgaagctggagcagctggacctgggcggcaacgacctggaggtgctgcccgacaccctgggcgccctgcccaacctgagagagctgtggctggacagaaaccagctgagcgccctgccccccgagctgggcaacctgagaagactggtgtgcctggacgtgagcgagaacagactggaggagctgcccgccgagctgggcggcctggtgctgctgaccgacctgctgctgagccagaacctgctgagaagactgcccgacggcatcggccagctgaagcagctgagcatcctgaaggtggaccagaacagactgtgcgaggtgaccgaggccatcggcgactgcgagaacctgagcgagctgatcctgaccgagaacctgctgatggccctgcccagaagcctgggcaagctgaccaagctgaccaacctgaacgtggacagaaaccacctggaggccctgccccccgagatcggcggctgcgtggccctgagcgtgctgagcctgagagacaacagactggccgtgctgccccccgagctggcccacaccaccgagctgcacgtgctggacgtggccggcaacagactgcagagcctgcccttcgccctgacccacctgaacctgaaggccctgtggctggccgagaaccaggcccagcccatgctgagattccagaccgaggacgacgccagaaccggcgagaaggtgctgacctgctacctgctgccccagcagcccccccccagcctggaggacgccggccagcagggcagcctgagcgagacctggagcgacgccccccccagcagagtgagcgtgatccagttcctggaggcccccatcggcgacgaggacgccgaggaggccgccgccgagaagagaggcctgcagagaagagccaccccccaccccagcgagctgaaggtgatgaagagaagcatcgagggcagaagaagcgaggcctgcccctgccagcccgacagcggcagccccctgcccgccgaggaggagaagagactgagcgccgagagcggcctgagcgaggacagcagacccagcgccagcaccgtgagcgaggccgagcccgagggccccagcgccgaggcccagggcggcagccagcaggaggccaccaccgccggcggcgaggaggacgccgaggaggactaccaggagcccaccgtgcacttcgccgaggacgccctgctgcccggcgacgacagagagatcgaggagggccagcccgaggccccctggaccctgcccggcggcagacagagactgatcagaaaggacaccccccactacaagaagcacttcaagatcagcaagctgccccagcccgaggccgtggtggccctgctgcagggcatgcagcccgacggcgagggccccgtggcccccggcggctggcacaacggcccccacgccccctgggcccccagagcccagaaggaggaggaggaggaggaggagggcagcccccaggaggaggaggtggaggaggaggaggagaacagagccgaggaggaggaggccagcaccgaggaggaggacaaggagggcgccgtggtgagcgcccccagcgtgaagggcgtgagcttcgaccaggccaacaacctgctgatcgagcccgccagaatcgaggaggaggagctgaccctgaccatcctgagacagaccggcggcctgggcatcagcatcgccggcggcaagggcagcaccccctacaagggcgacgacgagggcatcttcatcagcagagtgagcgaggagggccccgccgccagagccggcgtgagagtgggcgacaagctgctggaggtgaacggcgtggccctgcagggcgccgagcaccacgaggccgtggaggccctgagaggcgccggcaccgccgtgcagatgagagtgtggagagagagaatggtggagcccgagaacgccgtgaccatcacccccctgagacccgaggacgactacagccccagagagagaagaggcggcggcctgagactgcccctgctgccccccgagagccccggccccctgagacagagacacgtggcctgcctggccagaagcgagagaggcctgggcttcagcatcgccggcggcaagggcagcaccccctacagagccggcgacgccggcatcttcgtgagcagaatcgccgagggcggcgccgcccacagagccggcaccctgcaggtgggcgacagagtgctgagcatcaacggcgtggacgtgaccgaggccagacacgaccacgccgtgagcctgctgaccgccgccagccccaccatcgccctgctgctggagagagaggccggcggccccctgccccccagccccctgccccacagcagcccccccaccgccgccgtggccaccaccagcatcaccaccgccacccccggcgtgcccggcctgcccagcctggcccccagcctgctggccgccgccctggagggcccctaccccgtggaggagatcagactgcccagagccggcggccccctgggcctgagcatcgtgggcggcagcgaccacagcagccaccccttcggcgtgcaggagcccggcgtgttcatcagcaaggtgctgcccagaggcctggccgccagaagcggcctgagagtgggcgacagaatcctggccgtgaacggccaggacgtgagagacgccacccaccaggaggccgtgagcgccctgctgagaccctgcctggagctgagcctgctggtgagaagagaccccgccccccccggcctgagagagctgtgcatccagaaggcccccggcgagagactgggcatcagcatcagaggcggcgccagaggccacgccggcaaccccagagaccccaccgacgagggcatcttcatcagcaaggtgagccccaccggcgccgccggcagagacggcagactgagagtgggcctgagactgctggaggtgaaccagcagagcctgctgggcctgacccacggcgaggccgtgcagctgctgagaagcgtgggcgacaccctgaccgtgctggtgtgcgacggcttcgaggccagcaccgacgccgccctggaggtgagccccggcgtgatcgccaaccccttcgccgccggcatcggccacagaaacagcctggagagcatcagcagcatcgacagagagctgagccccgagggccccggcaaggagaaggagctgcccggccagaccctgcactggggccccgaggccaccgaggccgccggcagaggcctgcagcccctgaagctggactacagagccctggccgccgtgcccagcgccggcagcgtgcagagagtgcccagcggcgccgccggcggcaagatggccgagagcccctgcagccccagcggccagcagccccccagcccccccagccccgacgagctgcccgccaacgtgaagcaggcctacagagccttcgccgccgtgcccaccagccacccccccgaggacgcccccgcccagccccccacccccggccccgccgccagccccgagcagctgagcttcagagagagacagaagtacttcgagctggaggtgagagtgccccaggccgagggcccccccaagagagtgagcctggtgggcgccgacgacctgagaaagatgcaggaggaggaggccagaaagctgcagcagaagagagcccagatgctgagagaggccgccgaggccggcgccgaggccagactggccctggacggcgagaccctgggcgaggaggagcaggaggacgagcagcccccctgggccagccccagccccaccagcagacagagccccgccagccccccccccctgggcggcggcgcccccgtgagaaccgccaaggccgagagaagacaccaggagagactgagagtgcagagccccgagccccccgcccccgagagagccctgagccccgccgagctgagagccctggaggccgagaagagagccctgtggagagccgccagaatgaagagcctggagcaggacgccctgagagcccagatggtgctgagcagaagccaggagggcagaggcaccagaggccccctggagagactggccgaggcccccagccccgcccccacccccagccccacccccgtggaggacctgggcccccagaccagcaccagccccggcagactgcccctgagcggcaagaagttcgactacagagccttcgccgccctgcccagcagcagacccgtgtacgacatccagagccccgacttcgccgaggagctgagaagcctggagcccagccccagccccggcccccaggaggaggacggcgaggtggccctggtgctgctgggcagacccagccccggcgccgtgggccccgaggacgtggccctgtgcagcagcagaagacccgtgagacccggcagaagaggcctgggccccgtgcccagctag

SEQ ID NO: 98142 - DNA, 2427 bp, synthetic construct
  misc_feature 1..2427: note = Description of Artificial Sequence: Synthetic coding sequence
  source 1..2427: mol_type = other DNA
atgtggttcttcgccagagaccccgtgagagacttccccttcgagctgatccccgagccccccgagggcggcctgcccggcccctgggccctgcacagaggcagaaagaaggccaccggcagccccgtgagcatcttcgtgtacgacgtgaagcccggcgccgaggagcagacccaggtggccaaggccgccttcaagagattcaagaccctgagacaccccaacatcctggcctacatcgacggcctggagaccgagaagtgcctgcacgtggtgaccgaggccgtgacccccctgggcatctacctgaaggccagagtggaggccggcggcctgaaggagctggagatcagctggggcctgcaccagatcgtgaaggccctgagcttcctggtgaacgactgcagcctgatccacaacaacgtgtgcatggccgccgtgttcgtggacagagccggcgagtggaagctgggcggcctggactacatgtacagcgcccagggcaacggcggcggcccccccagaaagggcatccccgagctggagcagtacgacccccccgagctggccgacagcagcggcagagtggtgagagagaagtggagcgccgacatgtggagactgggctgcctgatctgggaggtgttcaacggccccctgcccagagccgccgccctgagaaaccccggcaagatccccaagaccctggtgccccactactgcgagctggtgggcgccaaccccaaggtgagacccaaccccgccagattcctgcagaactgcagagcccccggcggcttcatgagcaacagattcgtggagaccaacctgttcctggaggagatccagatcaaggagcccgccgagaagcagaagttcttccaggagctgagcaagagcctggacgccttccccgaggacttctgcagacacaaggtgctgccccagctgctgaccgccttcgagttcggcaacgccggcgccgtggtgctgacccccctgttcaaggtgggcaagttcctgagcgccgaggagtaccagcagaagatcatccccgtggtggtgaagatgttcagcagcaccgacagagccatgagaatcagactgctgcagcagatggagcagttcatccagtacctggacgagcccaccgtgaacacccagatcttcccccacgtggtgcacggcttcctggacaccaaccccgccatcagagagcagaccgtgaagagcatgctgctgctggcccccaagctgaacgaggccaacctgaacgtggagctgatgaagcacttcgccagactgcaggccaaggacgagcagggccccatcagatgcaacaccaccgtgtgcctgggcaagatcggcagctacctgagcgccagcaccagacacagagtgctgaccagcgccttcagcagagccaccagagaccccttcgcccccagcagagtggccggcgtgctgggcttcgccgccacccacaacctgtacagcatgaacgactgcgcccagaagatcctgcccgtgctgtgcggcctgaccgtggaccccgagaagagcgtgagagaccaggccttcaaggccatcagaagcttcctgagcaagctggagagcgtgagcgaggaccccacccagctggaggaggtggagaaggacgtgcacgccgccagcagccccggcatgggcggcgccgccgccagctgggccggctgggccgtgaccggcgtgagcagcctgaccagcaagctgatcagaagccaccccaccaccgcccccaccgagaccaacatcccccagagacccacccccgagggcgtgcccgcccccgcccccacccccgtgcccgccacccccaccaccagcggccactgggagacccaggaggaggacaaggacaccgccgaggacagcagcaccgccgacagatgggacgacgaggactggggcagcctggagcaggaggccgagagcgtgctggcccagcaggacgactggagcaccggcggccaggtgagcagagccagccaggtgagcaacagcgaccacaagagcagcaagagccccgagagcgactggagcagctgggaggccgagggcagctgggagcagggctggcaggagcccagcagccaggagcccccccccgacggcaccagactggccagcgagtacaactggggcggccccgagagcagcgacaagggcgaccccttcgccaccctgagcgccagacccagcacccagcccagacccgacagctggggcgaggacaactgggagggcctggagaccgacagcagacaggtgaaggccgagctggccagaaagaagagagaggagagaagaagagagatggaggccaagagagccgagagaaaggtggccaagggccccatgaagctgggcgccagaaagctggactag

SEQ ID NO: 98143 - DNA, 2346 bp, synthetic construct
  misc_feature 1..2346: note = Description of Artificial Sequence: Synthetic coding sequence
  source 1..2346: mol_type = other DNA
atgtggttcttcgccagagaccccgtgagagacttccccttcgagctgatccccgagccccccgagggcggcctgcccggcccctgggccctgcacagaggcagaaagaaggccaccggcagccccgtgagcatcttcgtgtacgacgtgaagcccggcgccgaggagcagacccaggtggccaaggccgccttcaagagattcaagaccctgagacaccccaacatcctggcctacatcgacggcctggagaccgagaagtgcctgcacgtggtgaccgaggccgtgacccccctgggcatctacctgaaggccagagtggaggccggcggcctgaaggagctggagatcagctggggcctgcaccagatcgtgaaggccctgagcttcctggtgaacgactgcagcctgatccacaacaacgtgtgcatggccgccgtgttcgtggacagagccggcgagtggaagctgggcggcctggactacatgtacagcgcccagggcaacggcggcggcccccccagaaagggcatccccgagctggagcagtacgacccccccgagctggccgacagcagcggcagagtggtgagagagaagtggagcgccgacatgtggagactgggctgcctgatctgggaggtgttcaacggccccctgcccagagccgccgccctgagaaaccccggcaagatccccaagaccctggtgccccactactgcgagctggtgggcgccaaccccaaggtgagacccaaccccgccagattcctgcagaactgcagagcccccggcggcttcatgagcaacagattcgtggagaccaacctgttcctggaggagatccagatcaaggagcccgccgagaagcagaagttcttccaggagctgagcaagagcctggacgccttccccgaggacttctgcagacacaaggtgctgccccagctgctgaccgccttcgagttcggcaacgccggcgccgtggtgctgacccccctgttcaaggtgggcaagttcctgagcgccgaggagtaccagcagaagatcatccccgtggtggtgaagatgttcagcagcaccgacagagccatgagaatcagactgctgcagcagatggagcagttcatccagtacctggacgagcccaccgtgaacacccagatcttcccccacgtggtgcacggcttcctggacaccaaccccgccatcagagagcagaccgtgaagagcatgctgctgctggcccccaagctgaacgaggccaacctgaacgtggagctgatgaagcacttcgccagactgcaggccaaggacgagcagggccccatcagatgcaacaccaccgtgtgcctgggcaagatcggcagctacctgagcgccagcaccagacacagagtgctgaccagcgccttcagcagagccaccagagaccccttcgcccccagcagagtggccggcgtgctgggcttcgccgccacccacaacctgtacagcatgaacgactgcgcccagaagatcctgcccgtgctgtgcggcctgaccgtggaccccgagaagagcgtgagagaccaggccttcaaggccatcagaagcttcctgagcaagctggagagcgtgagcgaggaccccacccagctggaggaggtggagaaggacgtgcacgccgccagcagccccggcatgggcggcgccgccgccagctgggccggctgggccgtgaccggcgtgagcagcctgaccagcaagctgatcagaagccaccccaccaccgcccccaccgagaccaacatcccccagagacccacccccgagggcgtgcccgcccccgcccccacccccgtgcccgccacccccaccaccagcggccactgggagacccaggaggaggacaaggacaccgccgaggacagcagcaccgccgacagatgggacgacgaggactggggcagcctggagcaggaggccgagagcgtgctggcccagcaggacgactggagcaccggcggccaggtgagcagagccagccaggtgagcaacagcgaccacaagagcagcaagagccccgagagcgactggagcagctgggaggccgagggcagctgggagcagggctggcaggagcccagcagccaggagcccccccccgacggcaccagactggccagcgagtacaactggggcggccccgagagcagcgacaagggcgaccccttcgccaccctgagcgccagacccagcacccaggacagaagcagactgagctggcccggcagaagcgccagaagcggcggcggcagatggagacccaacgcccccagaggcagatggcccagagccccctag

SEQ ID NO: 98144 - DNA, 2124 bp, synthetic construct
  misc_feature 1..2124: note = Description of Artificial Sequence: Synthetic coding sequence
  source 1..2124: mol_type = other DNA
atgtggttcttcgccagagaccccgtgagagacttccccttcgagctgatccccgagccccccgagggcggcctgcccggcccctgggccctgcacagaggcagaaagaaggccaccggcagccccgtgagcatcttcgtgtacgacgtgaagcccggcgccgaggagcagacccaggtggccaaggccgccttcaagagattcaagaccctgagacaccccaacatcctggcctacatcgacggcctggagaccgagaagtgcctgcacgtggtgaccgaggccgtgacccccctgggcatctacctgaaggccagagtggaggccggcggcctgaaggagctggagatcagctggggcctgcaccagatcgtgaaggccctgagcttcctggtgaacgactgcagcctgatccacaacaacgtgtgcatggccgccgtgttcgtggacagagccggcgagtggaagctgggcggcctggactacatgtacagcgcccagggcaacggcggcggcccccccagaaagggcatccccgagctggagcagtacgacccccccgagctggccgacagcagcggcagagtggtgagagagaagtggagcgccgacatgtggagactgggctgcctgatctgggaggtgttcaacggccccctgcccagagccgccgccctgagaaaccccggcaagatccccaagaccctggtgccccactactgcgagctggtgggcgccaaccccaaggtgagacccaaccccgccagattcctgcagaactgcagagcccccggcggcttcatgagcaacagattcgtggagaccaacctgttcctggaggagatccagatcaaggagcccgccgagaagcagaagttcttccaggagctgagcaagagcctggacgccttccccgaggacttctgcagacacaaggtgctgccccagctgctgaccgccttcgagttcggcaacgccggcgccgtggtgctgacccccctgttcaaggtgggcaagttcctgagcgccgaggagtaccagcagaagatcatccccgtggtggtgaagatgttcagcagcaccgacagagccatgagaatcagactgctgcagcagatggagcagttcatccagtacctggacgagcccaccgtgaacacccagatcttcccccacgtggtgcacggcttcctggacaccaaccccgccatcagagagcagaccgtgaagagcatgctgctgctggcccccaagctgaacgaggccaacctgaacgtggagctgatgaagcacttcgccagactgcaggccaaggacgagcagggccccatcagatgcaacaccaccgtgtgcctgggcaagatcggcagctacctgagcgccagcaccagacacagagtgctgaccagcgccttcagcagagccaccagagaccccttcgcccccagcagagtggccggcgtgctgggcttcgccgccacccacaacctgtacagcatgaacgactgcgcccagaagatcctgcccgtgctgtgcggcctgaccgtggaccccgagaagagcgtgagagaccaggccttcaaggccatcagaagcttcctgagcaagctggagagcgtgagcgaggaccccacccagctggaggaggtggagaaggacgtgcacgccgccagcagccccggcatgggcggcgccgccgccagctgggccggctgggccgtgaccggcgtgagcagcctgaccagcaagctgatcagaagccaccccaccaccgcccccaccgagaccaacatcccccagagacccacccccgagggccactgggagacccaggagcccccccccgacggcaccagactggccagcgagtacaactggggcggccccgagagcagcgacaagggcgaccccttcgccaccctgagcgccagacccagcacccagcccagacccgacagctggggcgaggacaactgggagggcctggagaccgacagcagacaggtgaaggccgagctggccagaaagaagagagaggagagaagaagagagatggaggccaagagagccgagagaaaggtggccaagggccccatgaagctgggcgccagaaagctggactag

SEQ ID NO: 98145 - DNA, 1071 bp, synthetic construct
  misc_feature 1..1071: note = Description of Artificial Sequence: Synthetic coding sequence
  source 1..1071: mol_type = other DNA
atgtggttcttcgccagagaccccgtgagagacttccccttcgagctgatccccgagccccccgagggcggcctgcccggcccctgggccctgcacagaggcagaaagaaggccaccggcagccccgtgagcatcttcgtgtacgacgtgaagcccggcgccgaggagcagacccaggtggccaaggccgccttcaagagattcaagaccctgagacaccccaacatcctggcctacatcgacggcctggagaccgagaagtgcctgcacgtggtgaccgaggccgtgacccccctgggcatctacctgaaggccagagtggaggccggcggcctgaaggagctggagatcagctggggcctgcaccagatcgtgaaggccctgagcttcctggtgaacgactgcagcctgatccacaacaacgtgtgcatggccgccgtgttcgtggacagagccggcgagtggaagctgggcggcctggactacatgtacagcgcccagggcaacggcggcggcccccccagaaagggcatccccgagctggagcagtacgacccccccgagctggccgacagcagcggcagagtggtgagagagaagtggagcgccgacatgtggagactgggctgcctgatctgggaggtgttcaacggccccctgcccagagccgccgccctgagaaaccccggcaagatccccaagaccctggtgccccactactgcgagctggtgggcgccaaccccaaggtgagacccaaccccgccagattcctgcagaactgcagagcccccggcggcttcatgagcaacagattcgtggagaccaacctgttcctggaggagatccagcccaaggaccccagactgaaggagttcctgccccagcccccccccctgttcctgccccccctgcagccccaggccaccggcagaagaagaagaagaaccagaacccagcagagaaccgccgccctgctgaccgacggcaccaccaagaccggcgccgcctggagcagaagacccagcctgtgctggcccagcagaaccaccggcgcccccggcgccaagtag

SEQ ID NO: 98146 - DNA, 2376 bp, synthetic construct
  misc_feature 1..2376: note = Description of Artificial Sequence: Synthetic coding sequence
  source 1..2376: mol_type = other DNA
atgtggttcttcgccagagaccccgtgagagacttccccttcgagctgatccccgagccccccgagggcggcctgcccggcccctgggccctgcacagaggcagaaagaaggccaccggcagccccgtgagcatcttcgtgtacgacgtgaagcccggcgccgaggagcagacccaggtggccaaggccgccttcaagagattcaagaccctgagacaccccaacatcctggcctacatcgacggcctggagaccgagaagtgcctgcacgtggtgaccgaggccgtgacccccctgggcatctacctgaaggccagagtggaggccggcggcctgaaggagctggagatcagctggggcctgcaccagatcgtgaaggccctgagcttcctggtgaacgactgcagcctgatccacaacaacgtgtgcatggccgccgtgttcgtggacagagccggcgagtggaagctgggcggcctggactacatgtacagcgcccagggcaacggcggcggcccccccagaaagggcatccccgagctggagcagtacgacccccccgagctggccgacagcagcggcagagtggtgagagagaagtggagcgccgacatgtggagactgggctgcctgatctgggaggtgttcaacggccccctgcccagagccgccgccctgagaaaccccggcaagatccccaagaccctggtgccccactactgcgagctggtgggcgccaaccccaaggtgagacccaaccccgccagattcctgcagaactgcagagcccccggcggcttcatgagcaacagattcgtggagaccaacctgttcctggaggagatccagatcaaggagcccgccgagaagcagaagttcttccaggagctgagcaagagcctggacgccttccccgaggacttctgcagacacaaggtgctgccccagctgctgaccgccttcgagttcggcaacgccggcgccgtggtgctgacccccctgttcaaggtgggcaagttcctgagcgccgaggagtaccagcagaagatcatccccgtggtggtgaagatgttcagcagcaccgacagagccatgagaatcagactgctgcagcagatggagcagttcatccagtacctggacgagcccaccgtgaacacccagatcttcccccacgtggtgcacggcttcctggacaccaaccccgccatcagagagcagaccgtgaagagcatgctgctgctggcccccaagctgaacgaggccaacctgaacgtggagctgatgaagcacttcgccagactgcaggccaaggacgagcagggccccatcagatgcaacaccaccgtgtgcctgggcaagatcggcagctacctgagcgccagcaccagacacagagtgctgaccagcgccttcagcagagccaccagagaccccttcgcccccagcagagtggccggcgtgctgggcttcgccgccacccacaacctgtacagcatgaacgactgcgcccagaagatcctgcccgtgctgtgcggcctgaccgtggaccccgagaagagcgtgagagaccaggccttcaaggccatcagaagcttcctgagcaagctggagagcgtgagcgaggaccccacccagctggaggaggtggagaaggacgtgcacgccgccagcagccccggcatgggcggcgccgccgccagctgggccggctgggccgtgaccggcgtgagcagcctgaccagcaagctgatcagaagccaccccaccaccgcccccaccgagaccaacatcccccagagacccacccccgagggccactgggagacccaggaggaggacaaggacaccgccgaggacagcagcaccgccgacagatgggacgacgaggactggggcagcctggagcaggaggccgagagcgtgctggcccagcaggacgactggagcaccggcggccaggtgagcagagccagccaggtgagcaacagcgaccacaagagcagcaagagccccgagagcgactggagcagctgggaggccgagggcagctgggagcagggctggcaggagcccagcagccaggagcccccccccgacggcaccagactggccagcgagtacaactggggcggccccgagagcagcgacaagggcgaccccttcgccaccctgagcgccagacccagcacccagcccagacccgacagctggggcgaggacaactgggagggcctggagaccgacagcagacaggtgaaggccgagctggccagaaagaagagagaggagagaagaagagagatggaggccaagagagccgagagaaaggtggccaagggccccatgaagctgggcgccagaaagctggactag

SEQ ID NO: 98147 - DNA, 2343 bp, synthetic construct
  misc_feature 1..2343: note = Description of Artificial Sequence: Synthetic coding sequence
  source 1..2343: mol_type = other DNA
atgtggttcttcgccagagaccccgtgagagacttccccttcgagctgatccccgagccccccgagggcggcctgcccggcccctgggccctgcacagaggcagaaagaaggccaccggcagccccgtgagcatcttcgtgtacgacgtgaagcccggcgccgaggagcagacccaggtggccaaggccgccttcaagagattcaagaccctgagacaccccaacatcctggcctacatcgacggcctggagaccgagaagtgcctgcacgtggtgaccgaggccgtgacccccctgggcatctacctgaaggccagagtggaggccggcggcctgaaggagctggagatcagctggggcctgcaccagatcgtgaaggccctgagcttcctggtgaacgactgcagcctgatccacaacaacgtgtgcatggccgccgtgttcgtggacagagccggcgagtggaagctgggcggcctggactacatgtacagcgcccagggcaacggcggcggcccccccagaaagggcatccccgagctggagcagtacgacccccccgagctggccgacagcagcggcagagtggtgagagagaagtggagcgccgacatgtggagactgggctgcctgatctgggaggtgttcaacggccccctgcccagagccgccgccctgagaaaccccggcaagatccccaagaccctggtgccccactactgcgagctggtgggcgccaaccccaaggtgagacccaaccccgccagattcctgcagaactgcagagcccccggcggcttcatgagcaacagattcgtggagaccaacctgttcctggaggagatccagatcaaggagcccgccgagaagcagaagttcttccaggagctgagcaagagcctggacgccttccccgaggacttctgcagacacaaggtgctgccccagctgctgaccgccttcgagttcggcaacgccggcgccgtggtgctgacccccctgttcaaggtgggcaagttcctgagcgccgaggagtaccagcagaagatcatccccgtggtggtgaagatgttcagcagcaccgacagagccatgagaatcagactgctgcagcagatggagcagttcatccagtacctggacgagcccaccgtgaacacccagatcttcccccacgtggtgcacggcttcctggacaccaaccccgccatcagagagcagaccgtgaagagcatgctgctgctggcccccaagctgaacgaggccaacctgaacgtggagctgatgaagcacttcgccagactgcaggccaaggacgagcagggccccatcagatgcaacaccaccgtgtgcctgggcaagatcggcagctacctgagcgccagcaccagacacagagtgctgaccagcgccttcagcagagccaccagagaccccttcgcccccagcagagtggccggcgtgctgggcttcgccgccacccacaacctgtacagcatgaacgactgcgcccagaagatcctgcccgtgctgtgcggcctgaccgtggaccccgagaagagcgtgagagaccaggccttcaaggccatcagaagcttcctgagcaagctggagagcgtgagcgaggaccccacccagctggaggaggtggagaaggacgtgcacgccgccagcagccccggcatgggcggcgccgccgccagctgggccggctgggccgtgaccggcgtgagcagcctgaccagcaagctgatcagaagccaccccaccaccgcccccaccgagaccaacatcccccagagacccacccccgagggcgtgcccgcccccgcccccacccccgtgcccgccacccccaccaccagcggccactgggagacccaggaggaggacaaggacaccgccgaggacagcagcaccgccgacagatgggacgacgaggactggggcagcctggaggaggccgagagcgtgctggcccagcaggacgactggagcaccggcggccaggtgagcagagccagccaggtgagcaacagcgaccacaagagcagcaagagccccgagagcgactggagcagctgggaggccgagggcagctgggagcagggctggcaggagcccagcagccaggagcccccccccgacggcaccagactggccagcgagtacaactggggcggccccgagagcagcgacaagggcgaccccttcgccaccctgagcgccagacccagcacccaggacagaagcagactgagctggcccggcagaagcgccagaagcggcggcggcagatggagacccaacgcccccagaggcagatggcccagagccccctag

SEQ ID NO: 98148 - DNA, 2124 bp, synthetic construct; identical to SEQ ID NO: 98144
  misc_feature 1..2124: note = Description of Artificial Sequence: Synthetic coding sequence
  source 1..2124: mol_type = other DNA

SEQ ID NO: 98149 - DNA, 2364 bp, synthetic construct
  misc_feature 1..2364: note = Description of Artificial Sequence: Synthetic coding sequence
  source 1..2364: mol_type = other DNA
atgtggttcttcgccagagaccccgtgagagacttccccttcgagctgatccccgagccccccgagggcggcctgcccggcccctgggccctgcacagaggcagaaagaaggccaccggcagccccgtgagcatcttcgtgtacgacgtgaagcccggcgccgaggagcagacccaggtggccaaggccgccttcaagagattcaagaccctgagacaccccaacatcctggcctacatcgacggcctggagaccgagaagtgcctgcacgtggtgaccgaggccgtgacccccctgggcatctacctgaaggccagagtggaggccggcggcctgaaggagctggagatcagctggggcctgcaccagatcgtgaaggccctgagcttcctggtgaacgactgcagcctgatccacaacaacgtgtgcatggccgccgtgttcgtggacagagccggcgagtggaagctgggcggcctggactacatgtacagcgcccagggcaacggcggcggcccccccagaaagggcatccccgagctggagcagtacgacccccccgagctggccgacagcagcggcagagtggtgagagagaagtggagcgccgacatgtggagactgggctgcctgatctgggaggtgttcaacggccccctgcccagagccgccgccctgagaaaccccggcaagatccccaagaccctggtgccccactactgcgagctggtgggcgccaaccccaaggtgagacccaaccccgccagattcctgcagaactgcagagcccccggcggcttcatgagcaacagattcgtggagaccaacctgttcctggaggagatccagatcaaggagcccgccgagaagcagaagttcttccaggagctgagcaagagcctggacgccttccccgaggacttctgcagacacaaggtgctgccccagctgctgaccgccttcgagttcggcaacgccggcgccgtggtgctgacccccctgttcaaggtgggcaagttcctgagcgccgaggagtaccagcagaagatcatccccgtggtggtgaagatgttcagcagcaccgacagagccatgagaatcagactgctgcagcagatggagcagttcatccagtacctggacgagcccaccgtgaacacccagatcttcccccacgtggtgcacggcttcctggacaccaaccccgccatcagagagcagaccgtgaagagcatgctgctgctggcccccaagctgaacgaggccaacctgaacgtggagctgatgaagcacttcgccagactgcaggccaaggacgagcagggccccatcagatgcaacaccaccgtgtgcctgggcaagatcggcagctacctgagcgccagcaccagacacagagtgctgaccagcgccttcagcagagccaccagagaccccttcgcccccagcagagtggccggcgtgctgggcttcgccgccacccacaacctgtacagcatgaacgactgcgcccagaagatcctgcccgtgctgtgcggcctgaccgtggaccccgagaagagcgtgagagaccaggccttcaaggccatcagaagcttcctgagcaagctggagagcgtgagcgaggaccccacccagctggaggaggtggagaaggacgtgcacgccgccagcagccccggcatgggcggcgccgccgccagctgggccggctgggccgtgaccggcgtgagcagcctgaccagcaagctgatcagaagccaccccaccaccgcccccaccgagaccaacatcccccagagacccacccccgagggcgtgcccgcccccgcccccacccccgtgcccgccacccccaccaccagcggccactgggagacccaggaggaggacaaggacaccgccgaggacagcagcaccgccgacagatgggacgacgaggactggggcagcctggagcaggaggccgagagcgtgctggcccagcaggacgactggagcaccggcggccaggtgagcagagccagccagagccccaccggcgccgccggcaagctgagagcccccggcaacagagccggcagaagccaggcccccagaagccacctgctgaccgtgcacggctggcccgccagcatcaccggcgtggcccagagccccgccaccagagccacccccagcctgccctgcctgcacgtgcccgcccccagcagaggccagaccctgggcgtgagaaccaccggcagagccagcagactgaccgtggacagaagcagactgagctggcccggcagaagcgccagaagcggcggcggcagatggagacccaacgcccccagaggcagatggcccagagccccctag

SEQ ID NO: 98150 - DNA, 663 bp, synthetic construct
  misc_feature 1..663: note = Description of Artificial Sequence: Synthetic coding sequence
  source 1..663: mol_type = other DNA
atgatcaagcccaagtggggcggcctggtgtgggcccagtggcacggccccctggccagacccagcggcaccctgcccttcgccagcagcatgcccagccccgtggacgccagcagcgccgacggcggcagcggcctgggcagccacagaagaaagagaaccaccttcagcaagggccagctgctggagctggagagagccttcgccgcctggccctaccccaacatcagcacccacgagcacctggcctgggtgacctgcctgcccgaggccaaggtgcaggtgtggttccagaagagatgggccaagatcatcaagaacagaaagagcggcatcctgagccccggcagcgagtgcccccagagcagctgcagcctgcccgacaccctgcagcagccctgggacccccagatgcccggccagcccccccccagcagcggcaccccccagagaaccagcgtgtgcagacacagcagctgccccgcccccggcctgagccccagacagggctgggagggcgccaaggccgtggccccctggggcagcgccggcgccagcgaggtgcaccccagcctggagagagccaccccccagaccagcctgggcagcctgagcgacctgatctacgccctggccatcgtggtgaacgtggaccacagctag

SEQ ID NO: 98151 - DNA, 651 bp, synthetic construct
  misc_feature 1..651: note = Description of Artificial Sequence: Synthetic coding sequence
  source 1..651: mol_type = other DNA
atgggcggcagcggcgtgggcaccgcctggcacggccccctggccagacccagcggcaccctgcccttcgccagcagcatgcccagccccgtggacgccagcagcgccgacggcggcagcggcctgggcagccacagaagaaagagaaccaccttcagcaagggccagctgctggagctggagagagccttcgccgcctggccctaccccaacatcagcacccacgagcacctggcctgggtgacctgcctgcccgaggccaaggtgcaggtgtggttccagaagagatgggccaagatcatcaagaacagaaagagcggcatcctgagccccggcagcgagtgcccccagagcagctgcagcctgcccgacaccctgcagcagccctgggacccccagatgcccggccagcccccccccagcagcggcaccccccagagaaccagcgtgtgcagacacagcagctgccccgcccccggcctgagccccagacagggctgggagggcgccaaggccgtggccccctggggcagcgccggcgccagcgaggtgcaccccagcctggagagagccaccccccagaccagcctgggcagcctgagcgacctgatctacgccctggccatcgtggtgaacgtggaccacagctag

SEQ ID NO: 98152 - DNA, 648 bp, synthetic construct
  misc_feature 1..648: note = Description of Artificial Sequence: Synthetic coding sequence
  source 1..648: mol_type = other DNA
atgatgaccaccggctggaccggcctgtgcctgccccccgtgaaccccagcagagtgagcagcagcagcctggagaccagcaccaccgagagcatcttcgcccacgacggcggcagcggcctgggcagccacagaagaaagagaaccaccttcagcaagggccagctgctggagctggagagagccttcgccgcctggccctaccccaacatcagcacccacgagcacctggcctgggtgacctgcctgcccgaggccaaggtgcaggtgtggttccagaagagatgggccaagatcatcaagaacagaaagagcggcatcctgagccccggcagcgagtgcccccagagcagctgcagcctgcccgacaccctgcagcagccctgggacccccagatgcccggccagcccccccccagcagcggcaccccccagagaaccagcgtgtgcagacacagcagctgccccgcccccggcctgagccccagacagggctgggagggcgccaaggccgtggccccctggggcagcgccggcgccagcgaggtgcaccccagcctggagagagccaccccccagaccagcctgggcagcctgagcgacctgatctacgccctggccatcgtggtgaacgtggaccacagctag

SEQ ID NO: 98153 - DNA, 648 bp, synthetic construct; identical to SEQ ID NO: 98152
  misc_feature 1..648: note = Description of Artificial Sequence: Synthetic coding sequence
  source 1..648: mol_type = other DNA

SEQ ID NO: 98154 - DNA, 1212 bp, synthetic construct
  misc_feature 1..1212: note = Description of Artificial Sequence: Synthetic coding sequence
  source 1..1212: mol_type = other DNA
atgagcggcagagtgggcgacctgagccccagacagaaggaggccctggccaagttcagagagaacgtgcaggacgtgctgcccgccctgcccaaccccgacgactacttcctgctgagatggctgagagccagaagcttcgacctgcagaagagcgaggccatgctgagaaagcacgtggagttcagaaagcagaaggacatcgacaacatcatcagctggcagccccccgaggtgatccagcagtacctgagcggcggcatgtgcggctacgacctggacggctgccccgtgtggtacgacatcatcggccccctggacgccaagggcctgctgttcagcgccagcaagcaggacctgctgagaaccaagatgagagagtgcgagctgctgctgcaggagtgcgcccaccagaccaccaagctgggcagaaaggtggagaccatcaccatcatctacgactgcgagggcctgggcctgaagcacctgtggaagcccgccgtggaggcctacggcgagttcctgtgcatgttcgaggagaactaccccgagaccctgaagagactgttcgtggtgaaggcccccaagctgttccccgtggcctacaacctgatcaagcccttcctgagcgaggacaccagaaagaagatcatggtgctgggcgccaactggaaggaggtgctgctgaagcacatcagccccgaccaggtgcccgtggagtacggcggcaccatgaccgaccccgacggcaaccccaagtgcaagagcaagatcaactacggcggcgacatccccagaaagtactacgtgagagaccaggtgaagcagcagtacgagcacagcgtgcagatcagcagaggcagcagccaccaggtggagtacgagatcctgttccccggctgcgtgctgagatggcagttcatgagcgacggcgccgacgtgggcttcggcatcttcctgaagaccaagatgggcgagagacagagagccggcgagatgaccgaggtgctgcccaaccagagatacaacagccacctggtgcccgaggacggcaccctgacctgcagcgaccccggcatctacgtgctgagattcgacaacacctacagcttcatccacgccaagaaggtgaacttcaccgtggaggtgctgctgcccgacaaggccagcgaggagaagatgaagcagctgggcgccggcacccccaagtag

SEQ ID NO: 98155 - DNA, 963 bp, synthetic construct
  misc_feature 1..963: note = Description of Artificial Sequence: Synthetic coding sequence
  source 1..963: mol_type = other DNA
atgagcggcagagtgggcgacctgagccccagacagaaggaggccctggccaagttcagagagaacgtgcaggacgtgctgcccgccctgcccaaccccgacgactacttcctgctgagatggctgagagccagaagcttcgacctgcagaagagcgaggccatgctgagaaagctgggcagaaaggtggagaccatcaccatcatctacgactgcgagggcctgggcctgaagcacctgtggaagcccgccgtggaggcctacggcgagttcctgtgcatgttcgaggagaactaccccgagaccctgaagagactgttcgtggtgaaggcccccaagctgttccccgtggcctacaacctgatcaagcccttcctgagcgaggacaccagaaagaagatcatggtgctgggcgccaactggaaggaggtgctgctgaagcacatcagccccgaccaggtgcccgtggagtacggcggcaccatgaccgaccccgacggcaaccccaagtgcaagagcaagatcaactacggcggcgacatccccagaaagtactacgtgagagaccaggtgaagcagcagtacgagcacagcgtgcagatcagcagaggcagcagccaccaggtggagtacgagatcctgttccccggctgcgtgctgagatggcagttcatgagcgacggcgccgacgtgggcttcggcatcttcctgaagaccaagatgggcgagagacagagagccggcgagatgaccgaggtgctgcccaaccagagatacaacagccacctggtgcccgaggacggcaccctgacctgcagcgaccccggcatctacgtgctgagattcgacaacacctacagcttcatccacgccaagaaggtgaacttcaccgtggaggtgctgctgcccgacaaggccagcgaggagaagatgaagcagctgggcgccggcacccccaagtag

SEQ ID NO: 98156 - DNA, 990 bp, synthetic construct
  misc_feature 1..990: note = Description of Artificial Sequence: Synthetic coding sequence
  source 1..990: mol_type = other DNA
atgctgagaaaggtgatccagcagtacctgagcggcggcatgtgcggctacgacctggacggctgccccgtgtggtacgacatcatcggccccctggacgccaagggcctgctgttcagcgccagcaagcaggacctgctgagaaccaagatgagagagtgcgagctgctgctgcaggagtgcgcccaccagaccaccaagctgggcagaaaggtggagaccatcaccatcatctacgactgcgagggcctgggcctgaagcacctgtggaagcccgccgtggaggcctacggcgagttcctgtgcatgttcgaggagaactaccccgagaccctgaagagactgttcgtggtgaaggcccccaagctgttccccgtggcctacaacctgatcaagcccttcctgagcgaggacaccagaaagaagatcatggtgctgggcgccaactggaaggaggtgctgctgaagcacatcagccccgaccaggtgcccgtggagtacggcggcaccatgaccgaccccgacggcaaccccaagtgcaagagcaagatcaactacggcggcgacatccccagaaagtactacgtgagagaccaggtgaagcagcagtacgagcacagcgtgcagatcagcagaggcagcagccaccaggtggagtacgagatcctgttccccggctgcgtgctgagatggcagttcatgagcgacggcgccgacgtgggcttcggcatcttcctgaagaccaagatgggcgagagacagagagccggcgagatgaccgaggtgctgcccaaccagagatacaacagccacctggtgcccgaggacggcaccctgacctgcagcgaccccggcatctacgtgctgagattcgacaacacctacagcttcatccacgccaagaaggtgaacttcaccgtggaggtgctgctgcccgacaaggccagcgaggagaagatgaagcagctgggcgccggcacccccaagtag

SEQ ID NO: 98157 - DNA, 1179 bp, synthetic construct
  misc_feature 1..1179: note = Description of Artificial Sequence: Synthetic coding sequence
  source 1..1179: mol_type = other DNA
atgagcggcagagtgggcgacctgagccccagacagaaggaggccctggccaagttcagagagaacgtgcaggacgtgctgcccgccctgcccaaccccgacgactacttcctgctgagatggctgagagccagaagcttcgacctgcagaagagcgaggccatgctgagaaagcacgtggagttcagaaagcagaaggacatcgacaacatcatcagctggcagccccccgaggtgatccagcagtacctgagcggcggcatgtgcggctacgacctggacggctgccccgtgtggtacgacatcatcggccccctggacgccaagggcctgctgttcagcgccagcaagcaggacctgctgagaaccaagatgagagagtgcgagctgctgctgcaggagtgcgcccaccagaccaccaagctgggcagaaaggtggagaccatcaccatcatctacgactgcgagggcctgggcctgaagcacctgtggaagcccgccgtggaggcctacggcgagttcctgtgcatgttcgaggagaactaccccgagaccctgaagagactgttcgtggtgaaggcccccaagctgttccccgtggcctacaacctgatcaagcccttcctgagcgaggacaccagaaagaagatcatggtgctgggcgccaactggaaggaggtgctgctgaagcacatcagccccgaccaggtgcccgtggagtacggcggcaccatgaccgaccccgacggcaaccccaagtgcaagagcaagatcaactacggcggcgacatccccagaaagtactacgtgagagaccaggtgaagcagcagtacgagcacagcgtgcagatcagcagaggcagcagccaccaggtggagtacgagatcctgttccccggctgcgtgctgagatggcagttcatgagcgacggcgccgacgtgggcttcggcatcttcctgaagaccaagatgggcgagagacagagagccggcgagatgaccgaggtgctgcccaaccagagatacaacagccacctggtgcccgaggacggcaccctgacctgcagcgaccccggcatctgcaagtacctgtgcctgggcaacgccctgaagccccacgtgcagctgagcgcctgcgaggtgcccctgcccccctggatcttcggcagcgagtgctag

SEQ ID NO: 98158 - DNA, 1119 bp, synthetic construct
  misc_feature 1..1119: note = Description of Artificial Sequence: Synthetic coding sequence
  source 1..1119: mol_type = other DNA
atgagcaaggccttcggcctgctgagacagatctgccagagcatcctggccgagagcagccagagccccgccgacctggaggagaagaaggaggaggacagcaacatgaagagagagcagcccagagagagacccagagcctgggactacccccacggcctggtgggcctgcacaacatcggccagacctgctgcctgaacagcctgatccaggtgttcgtgatgaacgtggacttcaccagaatcctgaagagaatcaccgtgcccagaggcgccgacgagcagagaagaagcgtgcccttccagatgctgctgctgctggagaagatgcaggacagcagacagaaggccgtgagacccctggagctggcctactgcctgcagaagtgcaacgtgcccctgttcgtgcagcacgacgccgcccagctgtacctgaagctgtggaacctgatcaaggaccagatcaccgacgtgcacctggtggagagactgcaggccctgtacaccatcagagtgaaggacagcctgatctgcgtggactgcgccatggagagcagcagaaacagcagcatgctgaccctgcccctgagcctgttcgacgtggacagcaagcccctgaagaccctggaggacgccctgcactgcttcttccagcccagagagctgagcagcaagagcaagtgcttctgcgagaactgcggcaagaagaccagaggcaagcaggtgctgaagctgacccacctgccccagaccctgaccatccacctgatgagattcagcatcagaaacagccagaccagaaagatctgccacagcctgtacttcccccagagcctggacttcagccagatcctgcccatgaagagagagagctgcgacgccgaggagcagagcggcggccagtacgagctgttcgccgtgatcgcccacgtgggcatggccgacagcggccactactgcgtgtacatcagaaacgccgtggacggcaagtggttctgcttcaacgacagcaacatctgcctggtgagctgggaggacatccagtgcacctacggcaaccccaactaccactggcaggagaccgcctacctgctggtgtacatgaagatggagtgctag

SEQ ID NO: 98159 - DNA, 1062 bp, synthetic construct
  misc_feature 1..1062: note = Description of Artificial Sequence: Synthetic coding sequence
  source 1..1062: mol_type = other DNA
atggagttcagaaagaccatggacatcgaccacatcctggactggcagccccccgaggtgatccagaagtacatgcccggcggcctgtgcggctacgacagagacggctgccccgtgtggtacgacatcatcggccccctggaccccaagggcctgctgttcagcgtgaccaagcaggacctgctgaagaccaagatgagagactgcgagagaatcctgcacgagtgcgacctgcagaccgagagactgggcaagaagatcgagaccatcgtgatgatcttcgactgcgagggcctgggcctgaagcacttctggaagcccctggtggaggtgtaccaggagttcttcggcctgctggaggagaactaccccgagaccctgaagttcatgctgatcgtgaaggccaccaagctgttccccgtgggctacaacctgatgaagcccttcctgagcgaggacaccagaagaaagatcatcgtgctgggcaacaactggaaggagggcctgctgaagctgatcagccccgaggagctgcccgcccagttcggcggcaccctgaccgaccccgacggcaaccccaagtgcctgaccaagatcaactacggcggcgagatccccaagagcatgtacgtgagagaccaggtgaagacccagtacgagcacagcgtgcagatcaacagaggcagcagccaccaggtggagtacgagatcctgttccccggctgcgtgctgagatggcagttcagcagcgacggcgccgacatcggcttcggcgtgttcctgaagaccaagatgggcgagagacagagagccggcgagatgaccgacgtgctgcccagccagagatacaacgcccacatggtgcccgaggacggcaacctgacctgcagcgaggccggcgtgtacgtggagagcgagagcggcaagagctgctgccacctgcccgtgatcatctgcagccacgagctgcagaacagccacagcaacagccaggtgatggcctaccagatggtgagaaagtgcaagctgagcagacccctgcccctgcccgccagcaactag

SEQ ID NO: 98160 - DNA, 1026 bp, synthetic construct
  misc_feature 1..1026: note = Description of Artificial Sequence: Synthetic coding sequence
  source 1..1026: mol_type = other DNA
atggagttcagaaagaccatggacatcgaccacatcctggactggcagccccccgaggtgatccagaagtacatgcccggcggcctgtgcggctacgacagagacggctgccccgtgtggtacgacatcatcggccccctggaccccaagggcctgctgttcagcgtgaccaagcaggacctgctgaagaccaagatgagagactgcgagagaatcctgcacgagtgcgacctgcagaccgagagactgggcaagaagatcgagaccatcgtgatgatcttcgactgcgagggcctgggcctgaagcacttctggaagcccctggtggaggtgtaccaggagttcttcggcctgctggaggagaactaccccgagaccctgaagttcatgctgatcgtgaaggccaccaagctgttccccgtgggctacaacctgatgaagcccttcctgagcgaggacaccagaagaaagatcatcgtgctgggcaacaactggaaggagggcctgctgaagctgatcagccccgaggagctgcccgcccagttcggcggcaccctgaccgaccccgacggcaaccccaagtgcctgaccaagatcaactacggcggcgagatccccaagagcatgtacgtgagagaccaggtgaagacccagtacgagcacagcgtgcagatcaacagaggcagcagccaccaggtggagtacgagatcctgttccccggctgcgtgctgagatggcagttcagcagcgacggcgccgacatcggcttcggcgtgttcctgaagaccaagatgggcgagagacagagagccggcgagatgaccgacgtgctgcccagccagagatacaacgcccacatggtgcccgaggacggcaacctgacctgcagcgaggccggcgtgtacgtgctgagattcgacaacacctacagcttcgtgcacgccaagaaggtgagcttcaccgtggaggtgctgctgcccgacgagggcatgcagaagtacgacaaggagctgacccccgtgtag

SEQ ID NO: 98161 - DNA, 972 bp, synthetic construct
  misc_feature 1..972: note = Description of Artificial Sequence: Synthetic coding sequence
  source 1..972: mol_type = other DNA
atggtgatccagaagtacatgcccggcggcctgtgcggctacgacagagacggctgccccgtgtggtacgacatcatcggccccctggaccccaagggcctgctgttcagcgtgaccaagcaggacctgctgaagaccaagatgagagactgcgagagaatcctgcacgagtgcgacctgcagaccgagagactgggcaagaagatcgagaccatcgtgatgatcttcgactgcgagggcctgggcctgaagcacttctggaagcccctggtggaggtgtaccaggagttcttcggcctgctggaggagaactaccccgagaccctgaagttcatgctgatcgtgaaggccaccaagctgttccccgtgggctacaacctgatgaagcccttcctgagcgaggacaccagaagaaagatcatcgtgctgggcaacaactggaaggagggcctgctgaagctgatcagccccgaggagctgcccgcccagttcggcggcaccctgaccgaccccgacggcaaccccaagtgcctgaccaagatcaactacggcggcgagatccccaagagcatgtacgtgagagaccaggtgaagacccagtacgagcacagcgtgcagatcaacagaggcagcagccaccaggtggagtacgagatcctgttccccggctgcgtgctgagatggcagttcagcagcgacggcgccgacatcggcttcggcgtgttcctgaagaccaagatgggcgagagacagagagccggcgagatgaccgacgtgctgcccagccagagatacaacgcccacatggtgcccgaggacggcaacctgacctgcagcgaggccggcgtgtacgtgctgagattcgacaacacctacagcttcgtgcacgccaagaaggtgagcttcaccgtggaggtgctgctgcccgacgagggcatgcagaagtacgacaaggagctgacccccgtgtag

SEQ ID NO: 98162 - DNA, 972 bp, synthetic construct; identical to SEQ ID NO: 98161
  misc_feature 1..972: note = Description of Artificial Sequence: Synthetic coding sequence
  source 1..972: mol_type = other DNA

SEQ ID NO: 98163 - DNA, 1221 bp, synthetic construct
  misc_feature 1..1221: note = Description of Artificial Sequence: Synthetic coding sequence
  source 1..1221: mol_type = other DNA
atgagcagcagagtgggcgacctgagcccccagcagcaggaggccctggccagattcagagagaacctgcaggacctgctgcccatcctgcccaacgccgacgactacttcctgctgagatggctgagagccagaaacttcgacctgcagaagagcgaggacatgctgagaagacacatggagttcagaaagcagcaggacctggacaacatcgtgacctggcagccccccgaggtgatccagctgtacgacagcggcggcctgtgcggctacgactacgagggctgccccgtgtacttcaacatcatcggcagcctggaccccaagggcctgctgctgagcgccagcaagcaggacatgatcagaaagagaatcaaggtgtgcgagctgctgctgcacgagtgcgagctgcagacccagaagctgggcagaaagatcgagatggccctgatggtgttcgacatggagggcctgagcctgaagcacctgtggaagcccgccgtggaggtgtaccagcagttcttcagcatcctggaggccaactaccccgagaccctgaagaacctgatcgtgatcagagcccccaagctgttccccgtggccttcaacctggtgaagagcttcatgagcgaggagaccagaagaaagatcgtgatcctgggcgacaactggaagcaggagctgaccaagttcatcagccccgaccagctgcccgtggagttcggcggcaccatgaccgaccccgacggcaaccccaagtgcctgaccaagatcaactacggcggcgaggtgcccaagagctactacctgtgcgagcaggtgagactgcagtacgagcacaccagaagcgtgggcagaggcagcagcctgcaggtggagaacgagatcctgttccccggctgcgtgctgagatggcagttcgccagcgacggcggcgacatcggcttcggcgtgttcctgaagaccaagatgggcgagcagcagagcgccagagagatgaccgaggtgctgcccagccagagatacaacgcccacatggtgcccgaggacggcagcctgacctgcctgcaggccggcgtgtacgtgctgagattcgacaacacctacagcagaatgcacgccaagaagctgagctacaccgtggaggtgctgctgcccgacaaggccagcgaggagaccctgcagagcctgaaggccatgagacccagccccacccagtag

SEQ ID NO: 98164 - DNA, 1083 bp, synthetic construct
  misc_feature 1..1083: note = Description of Artificial Sequence: Synthetic coding sequence
  source 1..1083: mol_type = other DNA
atgagcagcagagtgggcgacctgagcccccagcagcaggaggccctggccagattcagagagaacctgcaggacctgctgcccatcctgcccaacgccgacgactacttcctgctgagatggctgagagccagaaacttcgacctgcagaagagcgaggacatgctgagaagacacatggagttcagaaagcagcaggacctggacaacatcgtgacctggcagccccccgaggtgatccagctgtacgacagcggcggcctgtgcggctacgactacgagggctgccccgtgtacttcaacatcatcggcagcctggaccccaagggcctgctgctgagcgccagcaagcaggacatgatcagaaagagaatcaaggtgtgcgagctgctgctgcacgagtgcgagctgcagacccagaagctgggcagaaagatcgagatggccctgatggtgttcgacatggagggcctgagcctgaagcacctgtggaagcccgccgtggaggtgtaccagcagttcttcagcatcctggaggccaactaccccgagaccctgaagaacctgatcgtgatcagagcccccaagctgttccccgtggccttcaacctggtgaagagcttcatgagcgaggagaccagaagaaagatcgtgatcctgggcgacaactggaagcaggagctgaccaagttcatcagccccgaccagctgcccgtggagttcggcggcaccatgaccgaccccgacggcaaccccaagtgcctgaccaagatcaactacggcggcgaggtgcccaagagctactacctgtgcgagcaggtgagactgcagtacgagcacaccagaagcgtgggcagaggcagcagcctgcaggtggagaacgagatcctgttccccggctgcgtgctgagatggcagttcgccagcgacggcggcgacatcggcttcggcgtgttcctgaagaccaagatgggcgagcagcagagcgccagagagatgaccgaggtgctgcccagccagagatacaacgcccacatggtgcccgaggacggcagcctgacctgcctgcaggccggcgtgtag

SEQ ID NO: 98165 - DNA, 1083 bp, synthetic construct
  misc_feature 1..1083: note = Description of Artificial Sequence: Synthetic coding sequence
  source 1..1083: mol_type = other DNA
atgctgagaagacacatggagttcagaaagcagcaggacctggacaacatcgtgacctggcagccccccgaggtgatccagctgtacgacagcggcggcctgtgcggctacgactacgagggctgccccgtgtacttcaacatcatcggcagcctggaccccaagggcctgctgctgagcgccagcaagcaggacatgatcagaaagagaatcaaggtgtgcgagctgctgctgcacgagtgcgagctgcagacccagaagctgggcagaaagatcgagatggccctgatggtgttcgacatggagggcctgagcctgaagcacctgtggaagcccgccgtggaggtgtaccagcagttcttcagcatcctggaggccaactaccccgagaccctgaagaacctgatcgtgatcagagcccccaagctgttccccgtggccttcaacctggtgaagagcttcatgagcgaggagaccagaagaaagatcgtgatcctgggcgacaactggaagcaggagctgaccaagttcatcagccccgaccagctgcccgtggagttcggcggcaccatgaccgaccccgacggcaaccccaagtgcctgaccaagatcaactacggcggcgaggtgcccaagagctactacctgtgcgagcaggtgagactgcagtacgagcacaccagaagcgtgggcagaggcagcagcctgcaggtggagaacgagatcctgttccccggctgcgtgctgagatggcagttcgccagcgacggcggcgacatcggcttcggcgtgttcctgaagaccaagatgggcgagcagcagagcgccagagagatgaccgaggtgctgcccagccagagatacaacgcccacatggtgcccgaggacggcagcctgacctgcctgcaggccggcgtgtacgtgagaggcctgtgcagcctgatcaccagccccagcctgcagatgagctgcgccagcaccacccccaccgccggctgcatgcccagaagcagcgccaccctgtggagatgctgcttccccaccagacccctgagaagaagatgcagagtgagcagaagatag

SEQ ID NO: 98166 - DNA, 1176 bp, synthetic construct
  misc_feature 1..1176: note = Description of Artificial Sequence: Synthetic coding sequence
  source 1..1176: mol_type = other DNA
atgctgatgaccaccagcagctgcgccggctgcgagctggagaccctgacctgcagaaaccccaagacctgcagcgagggccccaagagcccccagcccaccagctgcccccacgccctgagagcctggcacatggagttcagaaagcagcaggacctggacaacatcgtgacctggcagccccccgaggtgatccagctgtacgacagcggcggcctgtgcggctacgactacgagggctgccccgtgtacttcaacatcatcggcagcctggaccccaagggcctgctgctgagcgccagcaagcaggacatgatcagaaagagaatcaaggtgtgcgagctgctgctgcacgagtgcgagctgcagacccagaagctgggcagaaagatcgagatggccctgatggtgttcgacatggagggcctgagcctgaagcacctgtggaagcccgccgtggaggtgtaccagcagttcttcagcatcctggaggccaactaccccgagaccctgaagaacctgatcgtgatcagagcccccaagctgttccccgtggccttcaacctggtgaagagcttcatgagcgaggagaccagaagaaagatcgtgatcctgggcgacaactggaagcaggagctgaccaagttcatcagccccgaccagctgcccgtggagttcggcggcaccatgaccgaccccgacggcaaccccaagtgcctgaccaagatcaactacggcggcgaggtgcccaagagctactacctgtgcgagcaggtgagactgcagtacgagcacaccagaagcgtgggcagaggcagcagcctgcaggtggagaacgagatcctgttccccggctgcgtgctgagatggcagttcgccagcgacggcggcgacatcggcttcggcgtgttcctgaagaccaagatgggcgagcagcagagcgccagagagatgaccgaggtgctgcccagccagagatacaacgcccacatggtgcccgaggacggcagcctgacctgcctgcaggccggcgtgtacgtgctgagattcgacaacacctacagcagaatgcacgccaagaagctgagctacaccgtggaggtgctgctgcccgacaaggccagcgaggagaccctgcagagcctgaaggccatgagacccagccccacccagtag

SEQ ID NO: 98167 - DNA, 2256 bp, synthetic construct
  misc_feature 1..2256: note = Description of Artificial Sequence: Synthetic coding sequence
  source 1..2256: mol_type = other DNA
cccgccgccgccgccagcagcctggagagagagaccgagagattcagagagctgctgctgtacggcagaaagaaggacgccctggagagcgccatgaagaacggcctgtggggccacgccctgctgctggccagcaagatggacagcagaacccacgccagagtgatgaccagattcgccaacagcctgcccatcaacgaccccctgcagaccgtgtaccagctgatgagcggcagaatgcccgccgccagcacctgctgcggcgacgagaagtggggcgactggagaccccacctggccatggtgctgagcaacctgaacaacaacatggacgtggagagcagaaccatggccaccatgggcgacaccctggccagcagaggcctgctggacgccgcccacttctgctacctgatggcccaggccggcttcggcgtgtacaccaagaagaccaccaagctggtgctgatcggcagcaaccacagcctgcccttcctgaagttcgccaccaacgaggccatccagagaaccgaggcctacgagtacgcccagagcctgggcgccgagacctgccccctgcccagcttccaggtgttcaagttcatctacagctgcagactggccgagatgggcctggccacccaggccttccactactgcgaggccatcgccaagagcatcctgacccagccccacctgtacagccccgtgctgatcagccagctggtgcagatggccagccagctgagactgttcgacccccagctgaaggagaagcccgaggaggagagcctggccgcccccacctggctggtgcacctgcagcaggtggagagacagatcaaggagggcgccggcgtgtggcaccaggacggcgccctgccccagcagtgccccggcacccccagcagcgagatggagcagctggacagacccggcctgagccagcccggcgccctgggcatcgccaaccccctgctggccgtgcccgcccccagccccgagcacagcagccccagcgtgagactgctgcccagcgccccccagaccctgcccgacggccccctggccagccccgccagagtgcccatgttccccgtgcccctgccccccggccccctggagcccggccccggctgcgtgacccccggccccgccctgggcttcctggagcccagcggccccggcctgccccccggcgtgccccccctgcaggagagaagacacctgctgcaggaggccagaagccccgaccccggcatcgtgccccaggaggcccccgtgggcaacagcctgagcgagctgagcgaggagaacttcgacggcaagttcgccaacctgacccccagcagaaccgtgcccgacagcgaggccccccccggctgggacagagccgacagcggccccacccagccccccctgagcctgagccccgcccccgagaccaagagacccggccaggccgccaagaaggagaccaaggagcccaagaagggcgagagctggttcttcagatggctgcccggcaagaagaagaccgaggcctacctgcccgacgacaagaacaagagcatcgtgtgggacgagaagaagaaccagtgggtgaacctgaacgagcccgaggaggagaagaaggcccccccccccccccccaccagcatgcccaagaccgtgcaggccgccccccccgccctgcccggcccccccggcgcccccgtgaacatgtacagcagaagagccgccggcaccagagccagatacgtggacgtgctgaaccccagcggcacccagagaagcgagcccgccctggcccccgccgacttcgtggcccccctggcccccctgcccatccccagcaacctgttcgtgcccacccccgacgccgaggagccccagctgcccgacggcaccggcagagagggccccgccgccgccagaggcctggccaaccccgagcccgcccccgagcccaaggtgctgagcagcgccgccagcctgcccggcagcgagctgcccagcagcagacccgagggcagccagggcggcgagctgagcagatgcagcagcatgagcagcctgagcagagaggtgagccagcacttcaaccaggcccccggcgacctgcccgccgccggcggcccccccagcggcgccatgcccttctacaaccccgcccagctggcccaggcctgcgccaccagcggcagcagcagactgggcagaatcggccagagaaagcacctggtgctgaactag

SEQ ID NO: 98168 - DNA, 6480 bp, synthetic construct
  misc_feature 1..6480: note = Description of Artificial Sequence: Synthetic coding sequence
  source 1..6480: mol_type = other DNA
atgcccggcctggacagacccctgagcagacagaacccccacgacggcgtggtgacccccgccgccagccccagcctgccccagcccggcctgcagatgcccggccagtggggccccgtgcagggcggcccccagcccagcggccagcacagaagcccctgccccgagggccccgtgcccagcggcgtgccctgcgccaccagcgtgccccacttccccacccccagcatcctgcaccagggccccggccacgagcagcacagccccctggtggccccccccgccgccctgcccagcgacggcagagacgaggtgagccacctgcagagcggcagccacctggccaacaacagcgaccccgagagcaccttcagacagaaccccagaatcgtgaaccactgggccagccccgagctgagacagaaccccggcgtgaagaacgagcacagacccgccagcgccctggtgaaccccctggccagaggcgacagccccgagaacagaacccaccaccccctgggcgccggcgccggcagcggctgcgcccccctggaggccgacagcggcgccagcggcgccctggccatgttcttccagggcggcgagaccgagaacgaggagaacctgagcagcgagaaggccggcctgagcggccaggccgacttcgacgacttctgcagcagccccggcctgggcagaccccccgcccccacccacgtgggcgccggcagcctgtgccaggccctgctgcccggccccagcaacgaggccgccggcgacgtgtggggcgacaccgccagcaccggcgtgcccgacgccagcggcagccagtacgagaacgtggagaacctggagttcgtgcagaaccaggaggtgctgcccagcgagcccctgaacctggaccccagcagccccagcgaccagttcagatacggccccctgcccggccccgccgtgcccagacacggcgccgtgtgccacaccggcgcccccgacgccaccctgcacaccgtgcaccccgacagcgtgagcagcagctacagcagcagaagccacggcagactgagcggcagcgccagaccccaggagctggtgggcaccttcatccagcaggaggtgggcaagcccgaggacgaggccagcggcagcttcttcaagcagatcgacagcagccccgtgggcggcgagaccgacgagaccaccgtgagccagaactacagaggcagcgtgagccagcccagcacccccagcccccccaagcccaccggcatcttccagaccagcgccaacagcagcttcgagcccgtgaagagccacctggtgggcgtgaagcccttcgaggccgacagagccaacgtggtgggcgaggtgagagagacctgcgtgagacagaagcagtgcagacccgccgccgccctgcccgacgccagccccggcaacctggagcagccccccgacaacatggagaccctgtgcgccccccaggtgtgccccctgcccctgaacagcaccaccgaggccgtgcacatgctgccccacgccggcgccccccccctggacaccgtgtaccccgcccccgagaagagacccagcgccagaacccagggccccgtgaagtgcgagagccccgccaccaccctgtgggcccagagcgagctgcccgacttcggcggcaacgtgctgctggcccccgccgcccccgccctgtacgtgtgcgccaagccccagccccccgtggtgcagccccccgaggaggccatgagcggccagcagagcagaaaccccagcagcgccgcccccgtgcagagcagaggcggcatcggcgccagcgagaacctggagaacccccccaagatgggcgaggaggaggccctgcagagccaggccagcagcggctacgccagcctgctgagcagcccccccaccgagagcctgcagaacccccccgtgctgatcgcccagcccgaccacagctacaacctggcccagcccatcaacttcagcgtgagcctgagcaacagccacgagaagaaccagagctggagagaggccctggtgggcgacagacccgccgtgagcagctgggccctgggcggcgacagcggcgagaacaccagcctgagcggcatccccaccagcagcgtgctgagcctgagcctgcccagcagcgtggcccagagcaacttcccccagggcagcggcgccagcgagatggtgagcaaccagcccgccaacctgctggtgcagccccccagccagcccgtgcccgagaacctggtgcccgagagccagaaggacagaaaggccggcagcgccctgcccggcttcgccaacagccccgccggcagcaccagcgtggtgctggtgccccccgcccacggcaccctggtgcccgacggcaacaaggccaaccacagcagccaccaggaggacacctacggcgccctggacttcaccctgagcagaaccctggagaaccccgtgaacgtgtacaaccccagccacagcgacagcctggccagccagcagagcgtggccagccaccccagacagagcggccccggcgcccccaacctggacagattctaccagcaggtgaccaaggacgcccagggccagcccggcctggagagagcccagcaggagctggtgcccccccagcagcaggccagccccccccagctgcccaaggccatgttcagcgagctgagcaaccccgagagcctgcccgcccagggccaggcccagaacagcgcccagagccccgccagcctggtgctggtggacgccggccagcagctgccccccagacccccccagagcagcagcgtgagcctggtgagcagcggcagcggccaggccgccgtgcccagcgagcagccctggccccagcccgtgcccgccctggcccccggcccccccccccaggacctggccgcctactactactacagacccctgtacgacgcctaccagccccagtacagcctgccctacccccccgagcccggcgccgccagcctgtactaccaggacgtgtacagcctgtacgagcccagatacagaccctacgacggcgccgccagcgcctacgcccagaactacagataccccgagcccgagagacccagcagcagagccagccacagcagcgagagacccccccccagacagggctaccccgagggctactacagcagcaagagcggctggagcagccagagcgactactacgccagctactacagcagccagtacgactacggcgaccccggccactgggacagataccactacagcgccagagtgagagaccccagaacctacgacagaagatactggtgcgacgccgagtacgacgcctacagaagagagcacagcgccttcggcgacagacccgagaagagagacaacaactggagatacgaccccagattcaccggcagcttcgacgacgaccccgacccccacagagacccctacggcgaggaggtggacagaagaagcgtgcacagcgagcacagcgccagaagcctgcacagcgcccacagcctggccagcagaagaagcagcctgagcagccacagccaccagagccagatctacagaagccacaacgtggccgccggcagctacgaggcccccctgccccccggcagcttccacggcgacttcgcctacggcacctacagaagcaacttcagcagcggccccggcttccccgagtacggctaccccgccgacaccgtgtggcccgccatggagcaggtgagcagcagacccaccagccccgagaagttcagcgtgccccacgtgtgcgccagattcggccccggcggccagctgatcaaggtgatccccaacctgcccagcgagggccagcccgccctggtggaggtgcacagcatggaggccctgctgcagcacaccagcgagcaggaggagatgagagccttccccggccccctggccaaggacgacacccacaaggtggacgtgatcaacttcgcccagaacaaggccatgaagtgcctgcagaacgagaacctgatcgacaaggagagcgccagcctgctgtggaacttcatcgtgctgctgtgcagacagaacggcaccgtggtgggcaccgacatcgccgagctgctgctgagagaccacagaaccgtgtggctgcccggcaagagccccaacgaggccaacctgatcgacttcaccaacgaggccgtggagcaggtggaggaggaggagagcggcgaggcccagctgagcttcctgaccggcggccccgccgccgccgccagcagcctggagagagagaccgagagattcagagagctgctgctgtacggcagaaagaaggacgccctggagagcgccatgaagaacggcctgtggggccacgccctgctgctggccagcaagatggacagcagaacccacgccagagtgatgaccagattcgccaacagcctgcccatcaacgaccccctgcagaccgtgtaccagctgatgagcggcagaatgcccgccgccagcacctgctgcggcgacgagaagtggggcgactggagaccccacctggccatggtgctgagcaacctgaacaacaacatggacgtggagagcagaaccatggccaccatgggcgacaccctggccagcagaggcctgctggacgccgcccacttctgctacctgatggcccaggccggcttcggcgtgtacaccaagaagaccaccaagctggtgctgatcggcagcaaccacagcctgcccttcctgaagttcgccaccaacgaggccatccagagaaccgaggcctacgagtacgcccagagcctgggcgccgagacctgccccctgcccagcttccaggtgttcaagttcatctacagctgcagactggccgagatgggcctggccacccaggccttccactactgcgaggccatcgccaagagcatcctgacccagccccacctgtacagccccgtgctgatcagccagctggtgcagatggccagccagctgagactgttcgacccccagctgaaggagaagcccgaggaggagagcctggccgcccccacctggctggtgcacctgcagcaggtggagagacagatcaaggagggcgccggcgtgtggcaccaggacggcgccctgccccagcagtgccccggcacccccagcagcgagatggagcagctggacagacccggcctgagccagcccggcgccctgggcatcgccaaccccctgctggccgtgcccgcccccagccccgagcacagcagccccagcgtgagactgctgcccagcgccccccagaccctgcccgacggccccctggccagccccgccagagtgcccatgttccccgtgcccctgccccccggccccctggagcccggccccggctgcgtgacccccggccccgccctgggcttcctggagcccagcggccccggcctgccccccggcgtgccccccctgcaggagagaagacacctgctgcaggaggccagaagccccgaccccggcatcgtgccccaggaggcccccgtgggcaacagcctgagcgagctgagcgaggagaacttcgacggcaagttcgccaacctgacccccagcagaaccgtgcccgacagcgaggccccccccggctgggacagagccgacagcggccccacccagccccccctgagcctgagccccgcccccgagaccaagagacccggccaggccgccaagaaggagaccaaggagcccaagaagggcgagagctggttcttcagatggctgcccggcaagaagaagaccgaggcctacctgcccgacgacaagaacaagagcatcgtgtgggacgagaagaagaaccagtgggtgaacctgaacgagcccgaggaggagaagaaggcccccccccccccccccaccagcatgcccaagaccgtgcaggccgccccccccgccctgcccggcccccccggcgcccccgtgaacatgtacagcagaagagccgccggcaccagagccagatacgtggacgtgctgaaccccagcggcacccagagaagcgagcccgccctggcccccgccgacttcgtggcccccctggcccccctgcccatccccagcaacctgttcgtgcccacccccgacgccgaggagccccagctgcccgacggcaccggcagagagggccccgccgccgccagaggcctggccaaccccgagcccgcccccgagcccaaggtgctgagcagcgccgccagcctgcccggcagcgagctgcccagcagcagacccgagggcagccagggcggcgaggcccccggcgacctgcccgccgccggcggcccccccagcggcgccatgcccttctacaaccccgcccagctggcccaggcctgcgccaccagcggcagcagcagactgggcagaatcggccagagaaagcacctggtgctgaactag

SEQ ID NO: 98169 - DNA, 7074 bp, synthetic construct
  misc_feature 1..7074: note = Description of Artificial Sequence: Synthetic coding sequence
  source 1..7074: mol_type = other DNA
atgcagccccccccccagaccgtgcccagcggcatggccggccccccccccgccggcaaccccagaagcgtgttctgggccagcagcccctacagaagaagagccaacaacaacgccgccgtggcccccaccacctgccccctgcagcccgtgaccgaccccttcgccttcagcagacaggccctgcagagcacccccctgggcagcagcagcaagagcagcccccccgtgctgcagggccccgcccccgccggcttcagccagcaccccggcctgctggtgccccacacccacgccagagacagcagccagggcccctgcgagcccctgcccggccccctgacccagcccagagcccacgccagccccttcagcggcgccctgacccccagcgccccccccggccccgagatgaacagaagcgccgaggtgggccccagcagcgagcccgaggtgcagaccctgccctacctgccccactacatccccggcgtggaccccgagaccagccacggcggccacccccacggcaacatgcccggcctggacagacccctgagcagacagaacccccacgacggcgtggtgacccccgccgccagccccagcctgccccagcccggcctgcagatgcccggccagtggggccccgtgcagggcggcccccagcccagcggccagcacagaagcccctgccccgagggccccgtgcccagcggcgtgccctgcgccaccagcgtgccccacttccccacccccagcatcctgcaccagggccccggccacgagcagcacagccccctggtggccccccccgccgccctgcccagcgacggcagagacgaggtgagccacctgcagagcggcagccacctggccaacaacagcgaccccgagagcaccttcagacagaaccccagaatcgtgaaccactgggccagccccgagctgagacagaaccccggcgtgaagaacgagcacagacccgccagcgccctggtgaaccccctggccagaggcgacagccccgagaacagaacccaccaccccctgggcgccggcgccggcagcggctgcgcccccctggaggccgacagcggcgccagcggcgccctggccatgttcttccagggcggcgagaccgagaacgaggagaacctgagcagcgagaaggccggcctgagcggccaggccgacttcgacgacttctgcagcagccccggcctgggcagaccccccgcccccacccacgtgggcgccggcagcctgtgccaggccctgctgcccggccccagcaacgaggccgccggcgacgtgtggggcgacaccgccagcaccggcgtgcccgacgccagcggcagccagtacgagaacgtggagaacctggagttcgtgcagaaccaggaggtgctgcccagcgagcccctgaacctggaccccagcagccccagcgaccagttcagatacggccccctgcccggccccgccgtgcccagacacggcgccgtgtgccacaccggcgcccccgacgccaccctgcacaccgtgcaccccgacagcgtgagcagcagctacagcagcagaagccacggcagactgagcggcagcgccagaccccaggagctggtgggcaccttcatccagcaggaggtgggcaagcccgaggacgaggccagcggcagcttcttcaagcagatcgacagcagccccgtgggcggcgagaccgacgagaccaccgtgagccagaactacagaggcagcgtgagccagcccagcacccccagcccccccaagcccaccggcatcttccagaccagcgccaacagcagcttcgagcccgtgaagagccacctggtgggcgtgaagcccttcgaggccgacagagccaacgtggtgggcgaggtgagagagacctgcgtgagacagaagcagtgcagacccgccgccgccctgcccgacgccagccccggcaacctggagcagccccccgacaacatggagaccctgtgcgccccccaggtgtgccccctgcccctgaacagcaccaccgaggccgtgcacatgctgccccacgccggcgccccccccctggacaccgtgtaccccgcccccgagaagagacccagcgccagaacccagggccccgtgaagtgcgagagccccgccaccaccctgtgggcccagagcgagctgcccgacttcggcggcaacgtgctgctggcccccgccgcccccgccctgtacgtgtgcgccaagccccagccccccgtggtgcagccccccgaggaggccatgagcggccagcagagcagaaaccccagcagcgccgcccccgtgcagagcagaggcggcatcggcgccagcgagaacctggagaacccccccaagatgggcgaggaggaggccctgcagagccaggccagcagcggctacgccagcctgctgagcagcccccccaccgagagcctgcagaacccccccgtgctgatcgcccagcccgaccacagctacaacctggcccagcccatcaacttcagcgtgagcctgagcaacagccacgagaagaaccagagctggagagaggccctggtgggcgacagacccgccgtgagcagctgggccctgggcggcgacagcggcgagaacaccagcctgagcggcatccccaccagcagcgtgctgagcctgagcctgcccagcagcgtggcccagagcaacttcccccagggcagcggcgccagcgagatggtgagcaaccagcccgccaacctgctggtgcagccccccagccagcccgtgcccgagaacctggtgcccgagagccagaaggacagaaaggccggcagcgccctgcccggcttcgccaacagccccgccggcagcaccagcgtggtgctggtgccccccgcccacggcaccctggtgcccgacggcaacaaggccaaccacagcagccaccaggaggacacctacggcgccctggacttcaccctgagcagaaccctggagaaccccgtgaacgtgtacaaccccagccacagcgacagcctggccagccagcagagcgtggccagccaccccagacagagcggccccggcgcccccaacctggacagattctaccagcaggtgaccaaggacgcccagggccagcccggcctggagagagcccagcaggagctggtgcccccccagcagcaggccagccccccccagctgcccaaggccatgttcagcgagctgagcaaccccgagagcctgcccgcccagggccaggcccagaacagcgcccagagccccgccagcctggtgctggtggacgccggccagcagctgccccccagacccccccagagcagcagcgtgagcctggtgagcagcggcagcggccaggccgccgtgcccagcgagcagccctggccccagcccgtgcccgccctggcccccggcccccccccccaggacctggccgcctactactactacagacccctgtacgacgcctaccagccccagtacagcctgccctacccccccgagcccggcgccgccagcctgtactaccaggacgtgtacagcctgtacgagcccagatacagaccctacgacggcgccgccagcgcctacgcccagaactacagataccccgagcccgagagacccagcagcagagccagccacagcagcgagagacccccccccagacagggctaccccgagggctactacagcagcaagagcggctggagcagccagagcgactactacgccagctactacagcagccagtacgactacggcgaccccggccactgggacagataccactacagcgccagagtgagagaccccagaacctacgacagaagatactggtgcgacgccgagtacgacgcctacagaagagagcacagcgccttcggcgacagacccgagaagagagacaacaactggagatacgaccccagattcaccggcagcttcgacgacgaccccgacccccacagagacccctacggcgaggaggtggacagaagaagcgtgcacagcgagcacagcgccagaagcctgcacagcgcccacagcctggccagcagaagaagcagcctgagcagccacagccaccagagccagatctacagaagccacaacgtggccgccggcagctacgaggcccccctgccccccggcagcttccacggcgacttcgcctacggcacctacagaagcaacttcagcagcggccccggcttccccgagtacggctaccccgccgacaccgtgtggcccgccatggagcaggtgagcagcagacccaccagccccgagaagttcagcgtgccccacgtgtgcgccagattcggccccggcggccagctgatcaaggtgatccccaacctgcccagcgagggccagcccgccctggtggaggtgcacagcatggaggccctgctgcagcacaccagcgagcaggaggagatgagagccttccccggccccctggccaaggacgacacccacaaggtggacgtgatcaacttcgcccagaacaaggccatgaagtgcctgcagaacgagaacctgatcgacaaggagagcgccagcctgctgtggaacttcatcgtgctgctgtgcagacagaacggcaccgtggtgggcaccgacatcgccgagctgctgctgagagaccacagaaccgtgtggctgcccggcaagagccccaacgaggccaacctgatcgacttcaccaacgaggccgtggagcaggtggaggaggaggagagcggcgaggcccagctgagcttcctgaccggcggccccgccgccgccgccagcagcctggagagagagaccgagagattcagagagctgctgctgtacggcagaaagaaggacgccctggagagcgccatgaagaacggcctgtggggccacgccctgctgctggccagcaagatggacagcagaacccacgccagagtgatgaccagattcgccaacagcctgcccatcaacgaccccctgcagaccgtgtaccagctgatgagcggcagaatgcccgccgccagcacctgctgcggcgacgagaagtggggcgactggagaccccacctggccatggtgctgagcaacctgaacaacaacatggacgtggagagcagaaccatggccaccatgggcgacaccctggccagcagaggcctgctggacgccgcccacttctgctacctgatggcccaggccggcttcggcgtgtacaccaagaagaccaccaagctggtgctgatcggcagcaaccacagcctgcccttcctgaagttcgccaccaacgaggccatccagagaaccgaggcctacgagtacgcccagagcctgggcgccgagacctgccccctgcccagcttccaggtgttcaagttcatctacagctgcagactggccgagatgggcctggccacccaggccttccactactgcgaggccatcgccaagagcatcctgacccagccccacctgtacagccccgtgctgatcagccagctggtgcagatggccagccagctgagactgttcgacccccagctgaaggagaagcccgaggaggagagcctggccgcccccacctggctggtgcacctgcagcaggtggagagacagatcaaggagggcgccggcgtgtggcaccaggacggcgccctgccccagcagtgccccggcacccccagcagcgagatggagcagctggacagacccggcctgagccagcccggcgccctgggcatcgccaaccccctgctggccgtgcccgcccccagccccgagcacagcagccccagcgtgagactgctgcccagcgccccccagaccctgcccgacggccccctggccagccccgccagagtgcccatgttccccgtgcccctgccccccggccccctggagcccggccccggctgcgtgacccccggccccgccctgggcttcctggagcccagcggccccggcctgccccccggcgtgccccccctgcaggagagaagacacctgctgcaggaggccagaagccccgaccccggcatcgtgccccaggaggcccccgtgggcaacagcctgagcgagctgagcgaggagaacttcgacggcaagttcgccaacctgacccccagcagaaccgtgcccgacagcgaggccccccccggctgggacagagccgacagcggccccacccagccccccctgagcctgagccccgcccccgagaccaagagacccggccaggccgccaagaaggagaccaaggagcccaagaagggcgagagctggttcttcagatggctgcccggcaagaagaagaccgaggcctacctgcccgacgacaagaacaagagcatcgtgtgggacgagaagaagaaccagtgggtgaacctgaacgagcccgaggaggagaagaaggcccccccccccccccccaccagcatgcccaagaccgtgcaggccgccccccccgccctgcccggcccccccggcgcccccgtgaacatgtacagcagaagagccgccggcaccagagccagatacgtggacgtgctgaaccccagcggcacccagagaagcgagcccgccctggcccccgccgacttcgtggcccccctggcccccctgcccatccccagcaacctgttcgtgcccacccccgacgccgaggagccccagctgcccgacggcaccggcagagagggccccgccgccgccagaggcctggccaaccccgagcccgcccccgagcccaaggtgctgagcagcgccgccagcctgcccggcagcgagctgcccagcagcagacccgagggcagccagggcggcgagctgagcagatgcagcagcatgagcagcctgagcagagaggtgagccagcacttcaaccaggcccccggcgacctgcccgccgccggcggcccccccagcggcgccatgcccttctacaaccccgcccagctggcccaggcctgcgccaccagcggcagcagcagactgggcagaatcggccagagaaagcacctggtgctgaactag

SEQ ID NO: 98170 - DNA, 1158 bp, synthetic construct
  misc_feature 1..1158: note = Description of Artificial Sequence: Synthetic coding sequence
  source 1..1158: mol_type = other DNA
atggacctgctgcccaccagcatcctgctggccagcctgtggatctgcagccacctgcacccccccggcgtgagcgtggacctgccccccaccagcatcctgctggtgagcctgtggatctgcagccacctgcacccccccggcgtgagcgtggacagaccccccccccccagcagctggtgcctgtgcggcagcccccccaccagcatcctgctggtgagcctgtggatctgcagccccccccccagcagctggtgcctgtgcggcagcgcccccaccagcatcctgctggtgagcctgtggatctggagactgtggggcctgaccgagggcgagagctggttcttcagatggctgcccggcaagaagaagaccgaggcctacctgcccgacgacaagaacaagagcatcgtgtgggacgagaagaagaaccagtgggtgaacctgaacgagcccgaggaggagaagaaggcccccccccccccccccaccagcatgcccaagaccgtgcaggccgccccccccgccctgcccggcccccccggcgcccccgtgaacatgtacagcagaagagccgccggcaccagagccagatacgtggacgtgctgaaccccagcggcacccagagaagcgagcccgccctggcccccgccgacttcgtggcccccctggcccccctgcccatccccagcaacctgttcgtgcccacccccgtgagcagcgtgagaccccagggcagaagcggcagaaacgacggcctgctggccctgagcagccccgacgccgaggagccccagctgcccgacggcaccggcagagagggccccgccgccgccagaggcctggccaaccccgagcccgcccccgagcccaaggtgctgagcagcgccgccagcctgcccggcagcgagctgcccagcagcagacccgagggcagccagggcggcgagctgagcagatgcagcagcatgagcagcctgagcagagaggtgagccagcacttcaaccaggcccccggcgacctgcccgccgccggcggcccccccagcggcgccatgcccttctacaaccccgcccagctggcccaggcctgcgccaccagcggcagcagcagactgggcagaatcggccagagaaagcacctggtgctgaactag

SEQ ID NO: 98171 - DNA, 6405 bp, synthetic construct
  misc_feature 1..6405: note = Description of Artificial Sequence: Synthetic coding sequence
  source 1..6405: mol_type = other DNA
atgcccggcctggacagacccctgagcagacagaacccccacgacggcgtggtgacccccgccgccagccccagcctgccccagcccggcctgcagatgcccggccagtggggccccgtgcagggcggcccccagcccagcggccagcacagaagcccctgccccgagggccccgtgcccagcggcgtgccctgcgccaccagcgtgccccacttccccacccccagcatcctgcaccagggccccggccacgagcagcacagccccctggtggccccccccgccgccctgcccagcgacggcagagacgaggtgagccacctgcagagcggcagccacctggccaacaacagcgaccccgagagcaccttcagacagaaccccagaatcgtgaaccactgggccagccccgagctgagacagaaccccggcgtgaagaacgagcacagacccgccagcgccctggtgaaccccctggccagaggcgacagccccgagaacagaacccaccaccccctgggcgccggcgccggcagcggctgcgcccccctggaggccgacagcggcgccagcggcgccctggccatgttcttccagggcggcgagaccgagaacgaggagaacctgagcagcgagaaggccggcctgagcggccaggccgacttcgacgacttctgcagcagccccggcctgggcagaccccccgcccccacccacgtgggcgccggcagcctgtgccaggccctgctgcccggccccagcaacgaggccgccggcgacgtgtggggcgacaccgccagcaccggcgtgcccgacgccagcggcagccagtacgagaacgtggagaacctggagttcgtgcagaaccaggaggtgctgcccagcgagcccctgaacctggaccccagcagccccagcgaccagttcagatacggccccctgcccggccccgccgtgcccagacacggcgccgtgtgccacaccggcgcccccgacgccaccctgcacaccgtgcaccccgacagcgtgagcagcagctacagcagcagaagccacggcagactgagcggcagcgccagaccccaggagctggtgggcaccttcatccagcaggaggtgggcaagcccgaggacgaggccagcggcagcttcttcaagcagatcgacagcagccccgtgggcggcgagaccgacgagaccaccgtgagccagaactacagaggcagcgtgagccagcccagcacccccagcccccccaagcccaccggcatcttccagaccagcgccaacagcagcttcgagcccgtgaagagccacctggtgggcgtgaagcccttcgaggccgacagagccaacgtggtgggcgaggtgagagagacctgcgtgagacagaagcagtgcagacccgccgccgccctgcccgacgccagccccggcaacctggagcagccccccgacaacatggagaccctgtgcgccccccaggtgtgccccctgcccctgaacagcaccaccgaggccgtgcacatgctgccccacgccggcgccccccccctggacaccgtgtaccccgcccccgagaagagacccagcgccagaacccagggccccgtgaagtgcgagagccccgccaccaccctgtgggcccagagcgagctgcccgacttcggcggcaacgtgctgctggcccccgccgcccccgccctgtacgtgtgcgccaagccccagccccccgtggtgcagccccccgaggaggccatgagcggccagcagagcagaaaccccagcagcgccgcccccgtgcagagcagaggcggcatcggcgccagcgagaacctggagaacccccccaagatgggcgaggaggaggccctgcagagccaggccagcagcggctacgccagcctgctgagcagcccccccaccgagagcctgcagaacccccccgtgctgatcgcccagcccgaccacagctacaacctggcccagcccatcaacttcagcgtgagcctgagcaacagccacgagaagaaccagagctggagagaggccctggtgggcgacagacccgccgtgagcagctgggccctgggcggcgacagcggcgagaacaccagcctgagcggcatccccaccagcagcgtgctgagcctgagcctgcccagcagcgtggcccagagcaacttcccccagggcagcggcgccagcgagatggtgagcaaccagcccgccaacctgctggtgcagccccccagccagcccgtgcccgagaacctggtgcccgagagccagaaggacagaaaggccggcagcgccctgcccggcttcgccaacagccccgccggcagcaccagcgtggtgctggtgccccccgcccacggcaccctggtgcccgacggcaacaaggccaaccacagcagccaccaggaggacacctacggcgccctggacttcaccctgagcagaaccctggagaaccccgtgaacgtgtacaaccccagccacagcgacagcctggccagccagcagagcgtggccagccaccccagacagagcggccccggcgcccccaacctggacagattctaccagcaggtgaccaaggacgcccagggccagcccggcctggagagagcccagcaggagctggtgcccccccagcagcaggccagccccccccagctgcccaaggccatgttcagcgagctgagcaaccccgagagcctgcccgcccagggccaggcccagaacagcgcccagagccccgccagcctggtgctggtggacgccggccagcagctgccccccagacccccccagagcagcagcgtgagcctggtgagcagcggcagcggccaggccgccgtgcccagcgagcagccctggccccagcccgtgcccgccctggcccccggcccccccccccaggacctggccgcctactactactacagacccctgtacgacgcctaccagccccagtacagcctgccctacccccccgagcccggcgccgccagcctgtactaccaggacgtgtacagcctgtacgagcccagatacagaccctacgacggcgccgccagcgcctacgcccagaactacagataccccgagcccgagagacccagcagcagagccagccacagcagcgagagacccccccccagacagggctaccccgagggctactacagcagcaagagcggctggagcagccagagcgactactacgccagctactacagcagccagtacgactacggcgaccccggccactgggacagataccactacagcgccagagtgagagaccccagaacctacgacagaagatactggtgcgacgccgagtacgacgcctacagaagagagcacagcgccttcggcgacagacccgagaagagagacaacaactggagatacgaccccagattcaccggcagcttcgacgacgaccccgacccccacagagacccctacggcgaggaggtggacagaagaagcgtgcacagcgagcacagcgccagaagcctgcacagcgcccacagcctggccagcagaagaagcagcctgagcagccacagccaccagagccagatctacagaagccacaacgtggccgccggcagctacgaggcccccctgccccccggcagcttccacggcgacttcgcctacggcacctacagaagcaacttcagcagcggccccggcttccccgagtacggctaccccgccgacaccgtgtggcccgccatggagcaggtgagcagcagacccaccagccccgagaagttcagcgtgccccacgtgtgcgccagattcggccccggcggccagctgatcaaggtgatccccaacctgcccagcgagggccagcccgccctggtggaggtgcacagcatggaggccctgctgcagcacaccagcgagcaggaggagatgagagccttccccggccccctggccaaggacgacacccacaaggtggacgtgatcaacttcgcccagaacaaggccatgaagtgcctgcagaacgagaacctgatcgacaaggagagcgccagcctgctgtggaacttcatcgtgctgctgtgcagacagaacggcaccgtggtgggcaccgacatcgccgagctgctgctgagagaccacagaaccgtgtggctgcccggcaagagccccaacgaggccaacctgatcgacttcaccaacgaggccgtggagcaggtggaggaggaggagagcggcgaggcccagctgagcttcctgaccggcggccccgccgccgccgccagcagcctggagagagagaccgagagattcagagagctgctgctgtacggcagaaagaaggacgccctggagagcgccatgaagaacggcctgtggggccacgccctgctgctggccagcaagatggacagcagaacccacgccagagtgatgaccagattcgccaacagcctgcccatcaacgaccccctgcagaccgtgtaccagctgatgagcggcagaatgcccgccgccagcacctgctgcggcgacgagaagtggggcgactggagaccccacctggccatggtgctgagcaacctgaacaacaacatggacgtggagagcagaaccatggccaccatgggcgacaccctggccagcagaggcctgctggacgccgcccacttctgctacctgatggcccaggccggcttcggcgtgtacaccaagaagaccaccaagctggtgctgatcggcagcaaccacagcctgcccttcctgaagttcgccaccaacgaggccatccagagaaccgaggcctacgagtacgcccagagcctgggcgccgagacctgccccctgcccagcttccaggtgttcaagttcatctacagctgcagactggccgagatgggcctggccacccaggccttccactactgcgaggccatcgccaagagcatcctgacccagccccacctgtacagccccgtgctgatcagccagctggtgcagatggccagccagctgagactgttcgacccccagctgaaggagaagcccgaggaggagagcctggccgcccccacctggctggtgcacctgcagcaggtggagagacagatcaaggagggcgccggcgtgtggcaccaggacggcgccctgccccagcagtgccccggcacccccagcagcgagatggagcagctggacagacccggcctgagccagcccggcgccctgggcatcgccaaccccctgctggccgtgcccgcccccagccccgagcacagcagccccagcgtgagactgctgcccagcgccccccagaccctgcccgacggccccctggccagccccgccagagtgcccatgttccccgtgcccctgccccccggccccctggagcccggccccggctgcgtgacccccggccccgccctgggcttcctggagcccagcggccccggcctgccccccggcgtgccccccctgcaggagagaagacacctgctgcaggaggccagaagccccgaccccggcatcgtgccccaggaggcccccgtgggcaacagcctgagcgagctgagcgaggagaacttcgacggcaagttcgccaacctgacccccagcagaaccgtgcccgacagcgaggccccccccggctgggacagagccgacagcggccccacccagccccccctgagcctgagccccgcccccgagaccaagagacccggccaggccgccaagaaggagaccaaggagcccaagaagggcgagagctggttcttcagatggctgcccggcaagaagaagaccgaggcctacctgcccgacgacaagaacaagagcatcgtgtgggacgagaagaagaaccagtgggtgaacctgaacgagcccgaggaggagaagaaggcccccccccccccccccaccagcatgcccaagaccgtgcaggccgccccccccgccctgcccggcccccccggcgcccccgtgaacatgtacagcagaagagccgccggcaccagagccagatacgtggacgtgctgaaccccagcggcacccagagaagcgagcccgccctggcccccgccgacttcgtggcccccctggcccccctgcccatccccagcaacctgttcgtgcccacccccgacgccgaggagccccagctgcccgacggcaccggcagagagggccccgccgccgccagaggcctggccaaccccgagcccgcccccgagcccaaggcccccggcgacctgcccgccgccggcggcccccccagcggcgccatgcccttctacaaccccgcccagctggcccaggcctgcgccaccagcggcagcagcagactgggcagaatcggccagagaaagcacctggtgctgaactag

SEQ ID NO: 98172 - DNA, 423 bp, synthetic construct
  misc_feature 1..423: note = Description of Artificial Sequence: Synthetic coding sequence
  source 1..423: mol_type = other DNA
atggacctgctgcccaccagcatcctgctggccagcctgtggatctgcagccacctgcacccccccggcgtgagcgtggacctgccccccaccagcatcctgctggtgagcctgtggatctgcagccacctgcacccccccggcgtgagcgtggacagaccccccccccccagcagctggtgcctgtgcggcagcccccccaccagcatcctgctggtgagcctgtggatctgcagccccccccccagcagctggtgcctgtgcggcagcgcccccaccagcatcctgctggtgagcctgtggatctggagactgtggggcctgaccgaggtgggccacgtggagttcgtgttcctgccctggctgatcagctggaacatcatgttcagcaagctgttcagctgcttcctgtacctgggctag

SEQ ID NO: 98173 - DNA, 2205 bp, synthetic construct
  misc_feature 1..2205: note = Description of Artificial Sequence: Synthetic coding sequence
  source 1..2205: mol_type = other DNA
atgttcagcgagctgagcaaccccgagagcctgcccgcccagggccaggcccagaacagcgcccagagccccgccagcctggtgctggtggacgccggccagcagctgccccccagacccccccagagcagcagcgtgagcctggtgagcagcggcagcggccaggccgccgtgcccagcgagcagccctggccccagcccgtgcccgccctggcccccggcccccccccccaggacctggccgcctactactactacagacccctgtacgacgcctaccagccccagtacagcctgccctacccccccgagcccggcgccgccagcctgtactaccaggacgtgtacagcctgtacgagcccagatacagaccctacgacggcgccgccagcgcctacgcccagaactacagataccccgagcccgagagacccagcagcagagccagccacagcagcgagagacccccccccagacagggctaccccgagggctactacagcagcaagagcggctggagcagccagagcgactactacgccagctactacagcagccagtacgactacggcgaccccggccactgggacagataccactacagcgccagagtgagagaccccagaacctacgacagaagatactggtgcgacgccgagtacgacgcctacagaagagagcacagcgccttcggcgacagacccgagaagagagacaacaactggagatacgaccccagattcaccggcagcttcgacgacgaccccgacccccacagagacccctacggcgaggaggtggacagaagaagcgtgcacagcgagcacagcgccagaagcctgcacagcgcccacagcctggccagcagaagaagcagcctgagcagccacagccaccagagccagatctacagaagccacaacgtggccgccggcagctacgaggcccccctgccccccggcagcttccacggcgacttcgcctacggcacctacagaagcaacttcagcagcggccccggcttccccgagtacggctacagacccgccctgggcttcctggagcccagcggccccggcctgccccccggcgtgccccccctgcaggagagaagacacctgctgcaggaggccagaagccccgaccccggcatcgtgccccaggaggcccccgtgggcaacagcctgagcgagctgagcgaggagaacttcgacggcaagttcgccaacctgacccccagcagaaccgtgcccgacagcgaggccccccccggctgggacagagccgacagcggccccacccagccccccctgagcctgagccccgcccccgagaccaagagacccggccaggccgccaagaaggagaccaaggagcccaagaagggcgagagctggttcttcagatggctgcccggcaagaagaagaccgaggcctacctgcccgacgacaagaacaagagcatcgtgtgggacgagaagaagaaccagtgggtgaacctgaacgagcccgaggaggagaagaaggcccccccccccccccccaccagcatgcccaagaccgtgcaggccgccccccccgccctgcccggcccccccggcgcccccgtgaacatgtacagcagaagagccgccggcaccagagccagatacgtggacgtgctgaaccccagcggcacccagagaagcgagcccgccctggcccccgccgacttcgtggcccccctggcccccctgcccatccccagcaacctgttcgtgcccacccccgtgagaccccagggcagaagcggcagaaacgacggcctgctggccctgagcagccccgacgccgaggagccccagctgcccgacggcaccggcagagagggccccgccgccgccagaggcctggccaaccccgagcccgcccccgagcccaaggtgctgagcagcgccgccagcctgcccggcagcgagctgcccagcagcagacccgagggcagccagggcggcgagctgagcagatgcagcagcatgagcagcctgagcagagaggtgagccagcacttcaaccaggcccccggcgacctgcccgccgccggcggcccccccagcggcgccatgcccttctacaaccccgcccagctggcccaggcctgcgccaccagcggcagcagcagactgggcagaatcggccagagaaagcacctggtgctgaactag

SEQ ID NO: 98174 - DNA, 5184 bp, synthetic construct
  misc_feature 1..5184: note = Description of Artificial Sequence: Synthetic coding sequence
  source 1..5184: mol_type = other DNA
atgttcttccagggcggcgagaccgagaacgaggagaacctgagcagcgagaaggccggcctgagcggccaggccgacttcgacgacttctgcagcagccccggcctgggcagaccccccgcccccacccacgtgggcgccggcagcctgtgccaggccctgctgcccggccccagcaacgaggccgccggcgacgtgtggggcgacaccgccagcaccggcgtgcccgacgccagcggcagccagtacgagaacgtggagaacctggagttcgtgcagaaccaggaggtgctgcccagcgagcccctgaacctggaccccagcagccccagcgaccagttcagatacggccccctgcccggccccgccgtgcccagacacggcgccgtgtgccacaccggcgcccccgacgccaccctgcacaccgtgcaccccgacagcgtgagcagcagctacagcagcagaagccacggcagactgagcggcagcgccagaccccaggagctggtgggcaccttcatccagcaggaggtgggcaagcccgaggacgaggccagcggcagcttcttcaagcagatcgacagcagccccgtgggcggcgagaccgacgagaccaccgtgagccagaactacagaggcagcgtgagccagcccagcacccccagcccccccaagcccaccggcatcttccagaccagcgccaacagcagcttcgagcccgtgaagagccacctggtgggcgtgaagcccttcgaggccgacagagccaacgtggtgggcgaggtgagagagacctgcgtgagacagaagcagtgcagacccgccgccgccctgcccgacgccagccccggcaacctggagcagccccccgacaacatggagaccctgtgcgccccccaggtgtgccccctgcccctgaacagcaccaccgaggccgtgcacatgctgccccacgccggcgccccccccctggacaccgtgtaccccgcccccgagaagagacccagcgccagaacccagggccccgtgaagtgcgagagccccgccaccaccctgtgggcccagagcgagctgcccgacttcggcggcaacgtgctgctggcccccgccgcccccgccctgtacgtgtgcgccaagccccagccccccgtggtgcagccccccgaggaggccatgagcggccagcagagcagaaaccccagcagcgccgcccccgtgcagagcagaggcggcatcggcgccagcgagaacctggagaacccccccaagatgggcgaggaggaggccctgcagagccaggtgaccaaggacgcccagggccagcccggcctggagagagcccagcaggagctggtgcccccccagcagcaggccagccccccccagctgcccaaggccatgttcagcgagctgagcaaccccgagagcctgcccgcccagggccaggcccagaacagcgcccagagccccgccagcctggtgctggtggacgccggccagcagctgccccccagacccccccagagcagcagcgtgagcctggtgagcagcggcagcggccaggccgccgtgcccagcgagcagccctggccccagcccgtgcccgccctggcccccggcccccccccccaggacctggccgcctactactactacagacccctgtacgacgcctaccagccccagtacagcctgccctacccccccgagcccggcgccgccagcctgtactaccaggacgtgtacagcctgtacgagcccagatacagaccctacgacggcgccgccagcgcctacgcccagaactacagataccccgagcccgagagacccagcagcagagccagccacagcagcgagagacccccccccagacagggctaccccgagggctactacagcagcaagagcggctggagcagccagagcgactactacgccagctactacagcagccagtacgactacggcgaccccggccactgggacagataccactacagcgccagagtgagagaccccagaacctacgacagaagatactggtgcgacgccgagtacgacgcctacagaagagagcacagcgccttcggcgacagacccgagaagagagacaacaactggagatacgaccccagattcaccggcagcttcgacgacgaccccgacccccacagagacccctacggcgaggaggtggacagaagaagcgtgcacagcgagcacagcgccagaagcctgcacagcgcccacagcctggccagcagaagaagcagcctgagcagccacagccaccagagccagatctacagaagccacaacgtggccgccggcagctacgaggcccccctgccccccggcagcttccacggcgacttcgcctacggcacctacagaagcaacttcagcagcggccccggcttccccgagtacggctaccccgccgacaccgtgtggcccgccatggagcaggtgagcagcagacccaccagccccgagaagttcagcgtgccccacgtgtgcgccagattcggccccggcggccagctgatcaaggtgatccccaacctgcccagcgagggccagcccgccctggtggaggtgcacagcatggaggccctgctgcagcacaccagcgagcaggaggagatgagagccttccccggccccctggccaaggacgacacccacaaggtggacgtgatcaacttcgcccagaacaaggccatgaagtgcctgcagaacgagaacctgatcgacaaggagagcgccagcctgctgtggaacttcatcgtgctgctgtgcagacagaacggcaccgtggtgggcaccgacatcgccgagctgctgctgagagaccacagaaccgtgtggctgcccggcaagagccccaacgaggccaacctgatcgacttcaccaacgaggccgtggagcaggtggaggaggaggagagcggcgaggcccagctgagcttcctgaccggcggccccgccgccgccgccagcagcctggagagagagaccgagagattcagagagctgctgctgtacggcagaaagaaggacgccctggagagcgccatgaagaacggcctgtggggccacgccctgctgctggccagcaagatggacagcagaacccacgccagagtgatgaccagattcgccaacagcctgcccatcaacgaccccctgcagaccgtgtaccagctgatgagcggcagaatgcccgccgccagcacctgctgcggcgacgagaagtggggcgactggagaccccacctggccatggtgctgagcaacctgaacaacaacatggacgtggagagcagaaccatggccaccatgggcgacaccctggccagcagaggcctgctggacgccgcccacttctgctacctgatggcccaggccggcttcggcgtgtacaccaagaagaccaccaagctggtgctgatcggcagcaaccacagcctgcccttcctgaagttcgccaccaacgaggccatccagagaaccgaggcctacgagtacgcccagagcctgggcgccgagacctgccccctgcccagcttccaggtgttcaagttcatctacagctgcagactggccgagatgggcctggccacccaggccttccactactgcgaggccatcgccaagagcatcctgacccagccccacctgtacagccccgtgctgatcagccagctggtgcagatggccagccagctgagactgttcgacccccagctgaaggagaagcccgaggaggagagcctggccgcccccacctggctggtgcacctgcagcaggtggagagacagatcaaggagggcgccggcgtgtggcaccaggacggcgccctgccccagcagtgccccggcacccccagcagcgagatggagcagctggacagacccggcctgagccagcccggcgccctgggcatcgccaaccccctgctggccgtgcccgcccccagccccgagcacagcagccccagcgtgagactgctgcccagcgccccccagaccctgcccgacggccccctggccagccccgccagagtgcccatgttccccgtgcccctgccccccggccccctggagcccggccccggctgcgtgacccccggccccgccctgggcttcctggagcccagcggccccggcctgccccccggcgtgccccccctgcaggagagaagacacctgctgcaggaggccagaagccccgaccccggcatcgtgccccaggaggcccccgtgggcaacagcctgagcgagctgagcgaggagaacttcgacggcaagttcgccaacctgacccccagcagaaccgtgcccgacagcgaggccccccccggctgggacagagccgacagcggccccacccagccccccctgagcctgagccccgcccccgagaccaagagacccggccaggccgccaagaaggagaccaaggagcccaagaagggcgagagctggttcttcagatggctgcccggcaagaagaagaccgaggcctacctgcccgacgacaagaacaagagcatcgtgtgggacgagaagaagaaccagtgggtgaacctgaacgagcccgaggaggagaagaaggcccccccccccccccccaccagcatgcccaagaccgtgcaggccgccccccccgccctgcccggcccccccggcgcccccgtgaacatgtacagcagaagagccgccggcaccagagccagatacgtggacgtgctgaaccccagcggcacccagagaagcgagcccgccctggcccccgccgacttcgtggcccccctggcccccctgcccatccccagcaacctgttcgtgcccacccccgacgccgaggagccccagctgcccgacggcaccggcagagagggccccgccgccgccagaggcctggccaaccccgagcccgcccccgagcccaaggtgctgagcagcgccgccagcctgcccggcagcgagctgcccagcagcagacccgagggcagccagggcggcgaggcccccggcgacctgcccgccgccggcggcccccccagcggcgccatgcccttctacaaccccgcccagctggcccaggcctgcgccaccagcggcagcagcagactgggcagaatcggccagagaaagcacctggtgctgaactag

SEQ ID NO: 98175 - DNA, 6465 bp, synthetic construct
  misc_feature 1..6465: note = Description of Artificial Sequence: Synthetic coding sequence
  source 1..6465: mol_type = other DNA
atgcccggcctggacagacccctgagcagacagaacccccacgacggcgtggtgacccccgccgccagccccagcctgccccagcccggcctgcagatgcccggccagtggggccccgtgcagggcggcccccagcccagcggccagcacagaagcccctgccccgagggccccgtgcccagcggcgtgccctgcgccaccagcgtgccccacttccccacccccagcatcctgcaccagggccccggccacgagcagcacagccccctggtggccccccccgccgccctgcccagcgacggcagagacgaggtgagccacctgcagagcggcagccacctggccaacaacagcgaccccgagagcaccttcagacagaaccccagaatcgtgaaccactgggccagccccgagctgagacagaaccccggcgtgaagaacgagcacagacccgccagcgccctggtgaaccccctggccagaggcgacagccccgagaacagaacccaccaccccctgggcgccggcgccggcagcggctgcgcccccctggaggccgacagcggcgccagcggcgccctggccatgttcttccagggcggcgagaccgagaacgaggagaacctgagcagcgagaaggccggcctgagcggccaggccgacttcgacgacttctgcagcagccccggcctgggcagaccccccgcccccacccacgtgggcgccggcagcctgtgccaggccctgctgcccggccccagcaacgaggccgccggcgacgtgtggggcgacaccgccagcaccggcgtgcccgacgccagcggcagccagtacgagaacgtggagaacctggagttcgtgcagaaccaggaggtgctgcccagcgagcccctgaacctggaccccagcagccccagcgaccagttcagatacggccccctgcccggccccgccgtgcccagacacggcgccgtgtgccacaccggcgcccccgacgccaccctgcacaccgtgcaccccgacagcgtgagcagcagctacagcagcagaagccacggcagactgagcggcagcgccagaccccaggagctggtgggcaccttcatccagcaggaggtgggcaagcccgaggacgaggccagcggcagcttcttcaagcagatcgacagcagccccgtgggcggcgagaccgacgagaccaccgtgagccagaactacagaggcagcgtgagccagcccagcacccccagcccccccaagcccaccggcatcttccagaccagcgccaacagcagcttcgagcccgtgaagagccacctggtgggcgtgaagcccttcgaggccgacagagccaacgtggtgggcgaggtgagagagacctgcgtgagacagaagcagtgcagacccgccgccgccctgcccgacgccagccccggcaacctggagcagccccccgacaacatggagaccctgtgcgccccccaggtgtgccccctgcccctgaacagcaccaccgaggccgtgcacatgctgccccacgccggcgccccccccctggacaccgtgtaccccgcccccgagaagagacccagcgccagaacccagggccccgtgaagtgcgagagccccgccaccaccctgtgggcccagagcgagctgcccgacttcggcggcaacgtgctgctggcccccgccgcccccgccctgtacgtgtgcgccaagccccagccccccgtggtgcagccccccgaggaggccatgagcggccagcagagcagaaaccccagcagcgccgcccccgtgcagagcagaggcggcatcggcgccagcgagaacctggagaacccccccaagatgggcgaggaggaggccctgcagagccaggccagcagcggctacgccagcctgctgagcagcccccccaccgagagcctgcagaacccccccgtgctgatcgcccagcccgaccacagctacaacctggcccagcccatcaacttcagcgtgagcctgagcaacagccacgagaagaaccagagctggagagaggccctggtgggcgacagacccgccgtgagcagctgggccctgggcggcgacagcggcgagaacaccagcctgagcggcatccccaccagcagcgtgctgagcctgagcctgcccagcagcgtggcccagagcaacttcccccagggcagcggcgccagcgagatggtgagcaaccagcccgccaacctgctggtgcagccccccagccagcccgtgcccgagaacctggtgcccgagagccagaaggacagaaaggccggcagcgccctgcccggcttcgccaacagccccgccggcagcaccagcgtggtgctggtgccccccgcccacggcaccctggtgcccgacggcaacaaggccaaccacagcagccaccaggaggacacctacggcgccctggacttcaccctgagcagaaccctggagaaccccgtgaacgtgtacaaccccagccacagcgacagcctggccagccagcagagcgtggccagccaccccagacagagcggccccggcgcccccaacctggacagattctaccagcaggtgaccaaggacgcccagggccagcccggcctggagagagcccagcaggagctggtgcccccccagcagcaggccagccccccccagctgcccaaggccatgttcagcgagctgagcaaccccgagagcctgcccgcccagggccaggcccagaacagcgcccagagccccgccagcctggtgctggtggacgccggccagcagctgccccccagacccccccagagcagcagcgtgagcctggtgagcagcggcagcggccaggccgccgtgcccagcgagcagccctggccccagcccgtgcccgccctggcccccggcccccccccccaggacctggccgcctactactactacagacccctgtacgacgcctaccagccccagtacagcctgccctacccccccgagcccggcgccgccagcctgtactaccaggacgtgtacagcctgtacgagcccagatacagaccctacgacggcgccgccagcgcctacgcccagaactacagataccccgagcccgagagacccagcagcagagccagccacagcagcgagagacccccccccagacagggctaccccgagggctactacagcagcaagagcggctggagcagccagagcgactactacgccagctactacagcagccagtacgactacggcgaccccggccactgggacagataccactacagcgccagagtgagagaccccagaacctacgacagaagatactggtgcgacgccgagtacgacgcctacagaagagagcacagcgccttcggcgacagacccgagaagagagacaacaactggagatacgaccccagattcaccggcagcttcgacgacgaccccgacccccacagagacccctacggcgaggaggtggacagaagaagcgtgcacagcgagcacagcgccagaagcctgcacagcgcccacagcctggccagcagaagaagcagcctgagcagccacagccaccagagccagatctacagaagccacaacgtggccgccggcagctacgaggcccccctgccccccggcagcttccacggcgacttcgcctacggcacctacagaagcaacttcagcagcggccccggcttccccgagtacggctaccccgccgacaccgtgtggcccgccatggagcaggtgagcagcagacccaccagccccgagaagttcagcgtgccccacgtgtgcgccagattcggccccggcggccagctgatcaaggtgatccccaacctgcccagcgagggccagcccgccctggtggaggtgcacagcatggaggccctgctgcagcacaccagcgagcaggaggagatgagagccttccccggccccctggccaaggacgacacccacaaggtggacgtgatcaacttcgcccagaacaaggccatgaagtgcctgcagaacgagaacctgatcgacaaggagagcgccagcctgctgtggaacttcatcgtgctgctgtgcagacagaacggcaccgtggtgggcaccgacatcgccgagctgctgctgagagaccacagaaccgtgtggctgcccggcaagagccccaacgaggccaacctgatcgacttcaccaacgaggccgtggagcaggtggaggaggaggagagcggcgaggcccagctgagcttcctgaccggcggccccgccgccgccgccagcagcctggagagagagaccgagagattcagagagctgctgctgtacggcagaaagaaggacgccctggagagcgccatgaagaacggcctgtggggccacgccctgctgctggccagcaagatggacagcagaacccacgccagagtgatgaccagattcgccaacagcctgcccatcaacgaccccctgcagaccgtgtaccagctgatgagcggcagaatgcccgccgccagcacctgctgcggcgacgagaagtggggcgactggagaccccacctggccatggtgctgagcaacctgaacaacaacatggacgtggagagcagaaccatggccaccatgggcgacaccctggccagcagaggcctgctggacgccgcccacttctgctacctgatggcccaggccggcttcggcgtgtacaccaagaagaccaccaagctggtgctgatcggcagcaaccacagcctgcccttcctgaagttcgccaccaacgaggccatccagagaaccgaggcctacgagtacgcccagagcctgggcgccgagacctgccccctgcccagcttccaggtgttcaagttcatctacagctgcagactggccgagatgggcctggccacccaggccttccactactgcgaggccatcgccaagagcatcctgacccagccccacctgtacagccccgtgctgatcagccagctggtgcagatggccagccagctgagactgttcgacccccagctgaaggagaagcccgaggaggagagcctggccgcccccacctggctggtgcacctgcagcaggtggagagacagatcaaggagggcgccggcgtgtggcaccaggacggcgccctgccccagcagtgccccggcacccccagcagcgagatggagcagctggacagacccggcctgagccagcccggcgccctgggcatcgccaaccccctgctggccgtgcccgcccccagccccgagcacagcagccccagcgtgagactgctgcccagcgccccccagaccctgcccgacggccccctggccagccccgccagagtgcccatgttccccgtgcccctgccccccggccccctggagcccggccccggctgcgtgacccccggccccgccctgggcttcctggagcccagcggccccggcctgccccccggcgtgccccccctgcaggagagaagacacctgctgcaggaggccagaagccccgaccccggcatcgtgccccaggaggcccccgtgggcaacagcctgagcgagctgagcgaggagaacttcgacggcaagttcgccaacctgacccccagcagaaccgtgcccgacagcgaggccccccccggctgggacagagccgacagcggccccacccagccccccctgagcctgagccccgcccccgagaccaagagacccggccaggccgccaagaaggagaccaaggagcccaagaagggcgagagctggttcttcagatggctgcccggcaagaagaagaccgaggcctacctgcccgacgacaagaacaagagcatcgtgtgggacgagaagaagaaccagtgggtgaacctgaacgagcccgaggaggagaagaaggcccccccccccccccccaccagcatgcccaagaccgtgcaggccgccccccccgccctgcccggcccccccggcgcccccgtgaacatgtacagcagaagagccgccggcaccagagccagatacgtggacgtgctgaaccccagcggcacccagagaagcgagcccgccctggcccccgccgacttcgtggcccccctggcccccctgcccatccccagcaacctgttcgtgcccacccccgacgccgaggagccccagctgcccgacggcaccggcagagagggccccgccgccgccagaggcctggccaaccccgagcccgcccccgagcccaagctgagcagatgcagcagcatgagcagcctgagcagagaggtgagccagcacttcaaccaggcccccggcgacctgcccgccgccggcggcccccccagcggcgccatgcccttctacaaccccgcccagctggcccaggcctgcgccaccagcggcagcagcagactgggcagaatcggccagagaaagcacctggtgctgaactag

SEQ ID NO: 98176 - DNA, 1521 bp, synthetic construct
  misc_feature 1..1521: note = Description of Artificial Sequence: Synthetic coding sequence
  source 1..1521: mol_type = other DNA
tgaagcgccttcggcgacagacccgagaagagagacaacaactggagatacgaccccagattcaccggcagcttcgacgacgaccccgacccccacagagacccctacggcgaggaggtggacagaagaagcgtgcacagcgagcacagcgccagaagcctgcacagcgcccacagcctggccagcagaagaagcagcctgagcagccacagccaccagagccagatctacagaagccacaacgtggccgccggcagctacgaggcccccctgccccccggcagcttccacggcgacttcgcctacggcacctacagaagcaacttcagcagcggccccggcttccccgagtacggctaccccgccctgggcttcctggagcccagcggccccggcctgccccccggcgtgccccccctgcaggagagaagacacctgctgcaggaggccagaagccccgaccccggcatcgtgccccaggaggcccccgtgggcaacagcctgagcgagctgagcgaggagaacttcgacggcaagttcgccaacctgacccccagcagaaccgtgcccgacagcgaggccccccccggctgggacagagccgacagcggccccacccagccccccctgagcctgagccccgcccccgagaccaagagacccggccaggccgccaagaaggagaccaaggagcccaagaagggcgagagctggttcttcagatggctgcccggcaagaagaagaccgaggcctacctgcccgacgacaagaacaagagcatcgtgtgggacgagaagaagaaccagtgggtgaacctgaacgagcccgaggaggagaagaaggcccccccccccccccccaccagcatgcccaagaccgtgcaggccgccccccccgccctgcccggcccccccggcgcccccgtgaacatgtacagcagaagagccgccggcaccagagccagatacgtggacgtgctgaaccccagcggcacccagagaagcgagcccgccctggcccccgccgacttcgtggcccccctggcccccctgcccatccccagcaacctgttcgtgcccacccccgtgagaccccagggcagaagcggcagaaacgacggcctgctggccctgagcagccccgacgccgaggagccccagctgcccgacggcaccggcagagagggccccgccgccgccagaggcctggccaaccccgagcccgcccccgagcccaaggtgctgagcagcgccgccagcctgcccggcagcgagctgcccagcagcagacccgagggcagccagggcggcgagctgagcagatgcagcagcatgagcagcctgagcagagaggtgagccagcacttcaaccaggcccccggcgacctgcccgccgccggcggcccccccagcggcgccatgcccttctacaaccccgcccagctggcccaggcctgcgccaccagcggcagcagcagactgggcagaatcggccagagaaagcacctggtgctgaactag

SEQ ID NO: 98177 - DNA, 3180 bp, synthetic construct
  misc_feature 1..3180: note = Description of Artificial Sequence: Synthetic coding sequence
  source 1..3180: mol_type = other DNA
gccagagtgagagaccccagaacctacgacagaagatactggtgcgacgccgagtacgacgcctacagaagagagcacagcgccttcggcgacagacccgagaagagagacaacaactggagatacgaccccagattcaccggcagcttcgacgacgaccccgacccccacagagacccctacggcgaggaggtggacagaagaagcgtgcacagcgagcacagcgccagaagcctgcacagcgcccacagcctggccagcagaagaagcagcctgagcagccacagccaccagagccagatctacagaagccacaacgtggccgccggcagctacgaggcccccctgccccccggcagcttccacggcgacttcgcctacggcacctacagaagcaacttcagcagcggccccggcttccccgagtacggctaccccgccgacaccgtgtggcccgccatggagcaggtgagcagcagacccaccagccccgagaagttcagcgtgccccacgtgtgcgccagattcggccccggcggccagctgatcaaggtgatccccaacctgcccagcgagggccagcccgccctggtggaggtgcacagcatggaggccctgctgcagcacaccagcgagcaggaggagatgagagccttccccggccccctggccaaggacgacacccacaaggtggacgtgatcaacttcgcccagaacaaggccatgaagtgcctgcagaacgagaacctgatcgacaaggagagcgccagcctgctgtggaacttcatcgtgctgctgtgcagacagaacggcaccgtggtgggcaccgacatcgccgagctgctgctgagagaccacagaaccgtgtggctgcccggcaagagccccaacgaggccaacctgatcgacttcaccaacgaggccgtggagcaggtggaggaggaggagagcggcgaggcccagctgagcttcctgaccggcggccccgccgccgccgccagcagcctggagagagagaccgagagattcagagagctgctgctgtacggcagaaagaaggacgccctggagagcgccatgaagaacggcctgtggggccacgccctgctgctggccagcaagatggacagcagaacccacgccagagtgatgaccagattcgccaacagcctgcccatcaacgaccccctgcagaccgtgtaccagctgatgagcggcagaatgcccgccgccagcacctgctgcggcgacgagaagtggggcgactggagaccccacctggccatggtgctgagcaacctgaacaacaacatggacgtggagagcagaaccatggccaccatgggcgacaccctggccagcagaggcctgctggacgccgcccacttctgctacctgatggcccaggccggcttcggcgtgtacaccaagaagaccaccaagctggtgctgatcggcagcaaccacagcctgcccttcctgaagttcgccaccaacgaggccatccagagaaccgaggcctacgagtacgcccagagcctgggcgccgagacctgccccctgcccagcttccaggtgttcaagttcatctacagctgcagactggccgagatgggcctggccacccaggccttccactactgcgaggccatcgccaagagcatcctgacccagccccacctgtacagccccgtgctgatcagccagctggtgcagatggccagccagctgagactgttcgacccccagctgaaggagaagcccgaggaggagagcctggccgcccccacctggctggtgcacctgcagcaggtggagagacagatcaaggagggcgccggcgtgtggcaccaggacggcgccctgccccagcagtgccccggcacccccagcagcgagatggagcagctggacagacccggcctgagccagcccggcgccctgggcatcgccaaccccctgctggccgtgcccgcccccagccccgagcacagcagccccagcgtgagactgctgcccagcgccccccagaccctgcccgacggccccctggccagccccgccagagtgcccatgttccccgtgcccctgccccccggccccctggagcccggccccggctgcgtgacccccggccccgccctgggcttcctggagcccagcggccccggcctgccccccggcgtgccccccctgcaggagagaagacacctgctgcaggaggccagaagccccgaccccggcatcgtgccccaggaggcccccgtgggcaacagcctgagcgagctgagcgaggagaacttcgacggcaagttcgccaacctgacccccagcagaaccgtgcccgacagcgaggccccccccggctgggacagagccgacagcggccccacccagccccccctgagcctgagccccgcccccgagaccaagagacccggccaggccgccaagaaggagaccaaggagcccaagaagggcgagagctggttcttcagatggctgcccggcaagaagaagaccgaggcctacctgcccgacgacaagaacaagagcatcgtgtgggacgagaagaagaaccagtgggtgaacctgaacgagcccgaggaggagaagaaggcccccccccccccccccaccagcatgcccaagaccgtgcaggccgccccccccgccctgcccggcccccccggcgcccccgtgaacatgtacagcagaagagccgccggcaccagagccagatacgtggacgtgctgaaccccagcggcacccagagaagcgagcccgccctggcccccgccgacttcgtggcccccctggcccccctgcccatccccagcaacctgttcgtgcccacccccgacgccgaggagccccagctgcccgacggcaccggcagagagggccccgccgccgccagaggcctggccaaccccgagcccgcccccgagcccaaggtgctgagcagcgccgccagcctgcccggcagcgagctgcccagcagcagacccgagggcagccagggcggcgaggcccccggcgacctgcccgccgccggcggcccccccagcggcgccatgcccttctacaaccccgcccagctggcccaggcctgcgccaccagcggcagcagcagactgggcagaatcggccagagaaagcacctggtgctgaactag

SEQ ID NO: 98178 - DNA, 603 bp, synthetic construct
  misc_feature 1..603: note = Description of Artificial Sequence: Synthetic coding sequence
  source 1..603: mol_type = other DNA
atgcccaagaccgtgcaggccgccccccccgccctgcccggcccccccggcgcccccgtgaacatgtacagcagaagagccgccggcaccagagccagatacgtggacgtgctgaaccccagcggcacccagagaagcgagcccgccctggcccccgccgacttcgtggcccccctggcccccctgcccatccccagcaacctgttcgtgcccacccccgtgagcagcgtgagaccccagggcagaagcggcagaaacgacggcctgctggccctgagcagccccgacgccgaggagccccagctgcccgacggcaccggcagagagggccccgccgccgccagaggcctggccaaccccgagcccgcccccgagcccaaggtgctgagcagcgccgccagcctgcccggcagcgagctgcccagcagcagacccgagggcagccagggcggcgaggcccccggcgacctgcccgccgccggcggcccccccagcggcgccatgcccttctacaaccccgcccagctggcccaggcctgcgccaccagcggcagcagcagactgggcagaatcggccagagaaagcacctggtgctgaactag

SEQ ID NO: 98179 - DNA, 924 bp, synthetic construct
  misc_feature 1..924: note = Description of Artificial Sequence: Synthetic coding sequence
  source 1..924: mol_type = other DNA
atgagcatgatcctgagcgccagcgtgatcagagtgagagacggcctgcccctgagcgccagcaccgactacgagcagagcaccggcatgcaggagtgcagaaagtacttcaagatgctgagcagaaagctggcccagctgcccgacagatgcaccctgaagaccggccactacaacatcaacttcatcagcagcctgggcgtgagctacatgatgctgtgcaccgagaactaccccaacgtgctggccttcagcttcctggacgagctgcagaaggagttcatcaccacctacaacatgatgaagaccaacaccgccgtgagaccctactgcttcatcgagttcgacaacttcatccagagaaccaagcagagatacaacaaccccagaagcctgagcaccaagatcaacctgagcgacatgcagaccgagatcaagctgagacccccctaccagatcagcatgtgcgagctgggcagcgccaacggcgtgaccagcgccttcagcgtggactgcaagggcgccggcaagatcagcagcgcccaccagagactggagcccgccaccctgagcggcatcgtgggcttcatcctgagcctgctgtgcggcgccctgaacctgatcagaggcttccacgccatcgagagcctgctgcagagcgacggcgacgacttcaactacatcatcgccttcttcctgggcaccgccgcctgcctgtaccagtgctacctgctggtgtactacaccggctggagaaacgtgaagagcttcctgaccttcggcctgatctgcctgtgcaacatgtacctgtacgagctgagaaacctgtggcagctgttcttccacgtgaccgtgggcgccttcgtgaccctgcagatctggctgagacaggcccagggcaaggcccccgactacgacgtgtag

SEQ ID NO: 98180 - DNA, 330 bp, synthetic construct
  misc_feature 1..330: note = Description of Artificial Sequence: Synthetic coding sequence
  source 1..330: mol_type = other DNA
atgagcatgatcctgagcgccagcgtgatcagagtgagagacggcctgcccctgagcgccagcaccgactacgagcagagcaccggcatgcaggagtgcagaaagtacttcaagatgctgagcagaaagctggcccagctgcccgacagatgcaccctgaagaccggccactacaacatcaacttcatcagcagcctgggcgtgagctacatgatgctgtgcaccgagaactaccccaacgtgctggccttcagcttcctggacgagctgcagaaggagttcatcaccacctacaacatgatgaagaccaacaccgccgtgagaccctag

SEQ ID NO: 98181 - DNA, 870 bp, synthetic construct
  misc_feature 1..870: note = Description of Artificial Sequence: Synthetic coding sequence
  source 1..870: mol_type = other DNA
atgagcatgatcctgagcgccagcgtgatcagagtgagagacggcctgcccctgagcgccagcaccgactacgagcagagcaccggcatgcaggagtgcagaaagtacttcaagatgctgagcagaaagctggcccagctgcccgacagatgcaccctgaagaccggccactacaacatcaacttcatcagcagcctgggcgtgagctacatgatgctgtgcaccgagaactaccccaacgtgctggccttcagcttcctggacgagctgcagaaggagttcatcaccacctacaacatgatgaagaccaacaccgccgtgagaccctactgcttcatcgagttcgacaacttcatccagagaaccaagcagagatacaacaaccccagaagcctgagcaccaagatcaacctgagcgacatgcagaccgagatcaagctgagacccccctaccagatcagcatgtgcgagctgggcagcgccaacggcgtgaccagcgccttcagcgtggactgcaagggcgccggcaagatcagcagcgcccaccagagactggagcccgccaccctgagcggcatcgtgggcttcatcctgagcctgctgtgcggcgccctgaacctgatcagaggcttccacgccatcgagagcctgctgcagagcgacggcgacgacttcaactacatcatcgccttcttcctgggcaccgccgcctgcctgtaccagtgctacctgctggtgtactacaccggctggagaaacgtgaagagcttcctgaccttcggcctgatctgcctgtgcaacatgtacctgtacgagctgagaaacctgtggcagctgttcttccacgtgaccgtgggcgccttcgtgtag

SEQ ID NO: 98182 - DNA, 417 bp, synthetic construct
  misc_feature 1..417: note = Description of Artificial Sequence: Synthetic coding sequence
  source 1..417: mol_type = other DNA
atgagcatgatcctgagcgccagcgtgatcagagtgagagacggcctgcccctgagcgccagcaccgactacgagcagagcaccggcatgcaggagtgcagaaagtacttcaagatgctgagcagaaagctggcccagctgcccgacagatgcaccctgaagaccggccactacaacatcaacttcatcagcagcctgggcgtgagctacatgatgctgtgcaccgagaactaccccaacgtgctggccttcagcttcctggacgagctgcagaaggagttcatcaccacctacaacatgatgaagaccaacaccgccgtgagaccctactgcttcatcgagttcgacaacttcatccagagaaccaagcagagatacaacaaccccagaagcctgagcaccaagatcaacctgtag

SEQ ID NO: 98183 - DNA, 657 bp, synthetic construct
  misc_feature 1..657: note = Description of Artificial Sequence: Synthetic coding sequence
  source 1..657: mol_type = other DNA
atgagcatgatcctgagcgccagcgtgatcagagtgagagacggcctgcccctgagcgccagcaccgactacgagcagagcaccggcatgcaggagtgcagaaagtacttcaagatgctgagcagaaagctggcccagctgcccgacagatgcaccctgaagaccggccactacaacatcaacttcatcagcagcctgggcgtgagctacatgatgctgtgcaccgagaactaccccaacgtgctggccttcagcttcctggacgagctgcagaaggagttcatcaccacctacaacatgatgaagaccaacaccgccgtgagaccctactgcttcatcgagttcgacaacttcatccagagaaccaagcagagatacaacaaccccagaagcctgagcaccaagatcaacctgagcgacatgcagaccgagatcaagctgagacccccctaccagatcagcatgtgcgagctgggcagcgccaacggcgtgaccagcgccttcagcgtggactgcaagggcgccggcaagatcagcagcgcccaccagagactggagcccgccaccctgagcggcatcgtgggcttcatcctgagcctgctgtgcggcgccctgaacctgatcagaggcttccacgccatcgagagcctgctgtag

SEQ ID NO: 98184 - DNA, 306 bp, synthetic construct
  misc_feature 1..306: note = Description of Artificial Sequence: Synthetic coding sequence
  source 1..306: mol_type = other DNA
atgagcatgatcctgagcgccagcgtgatcagagtgagagacggcctgcccctgagcgccagcaccgactacgagcagagcaccggcatgcaggagtgcagaaagtacttcaagatgctgagcagaaagctggcccagctgcccgacagatgcaccctgaagaccggccactacaacatcaacttcatcagcagcctgggcgtgagctacatgatgctgtgcaccgagaactaccccaacgtgctggccttcagcttcctggacgagctgcagaaggagttcatcaccacctacaacatgatgtag

SEQ ID NO: 98185 - DNA, 924 bp, synthetic construct; identical to SEQ ID NO: 98179
  misc_feature 1..924: note = Description of Artificial Sequence: Synthetic coding sequence
  source 1..924: mol_type = other DNA

SEQ ID NO: 98186 - DNA, 2298 bp, synthetic construct
  misc_feature 1..2298: note = Description of Artificial Sequence: Synthetic coding sequence
  source 1..2298: mol_type = other DNA
atgaccacctacctggagttcatccagcagaacgaggagagagacggcgtgagattcagctggaacgtgtggcccagcagcagactggaggccaccagaatggtggtgcccgtggccgccctgttcacccccctgaaggagagacccgacctgccccccatccagtacgagcccgtgctgtgcagcagaaccacctgcagagccgtgctgaaccccctgtgccaggtggactacagagccaagctgtgggcctgcaacttctgctaccagagaaaccagttcccccccagctacgccggcatcagcgagctgaaccagcccgccgagctgctgccccagttcagcagcatcgagtacgtggtgctgagaggcccccagatgcccctgatcttcctgtacgtggtggacacctgcatggaggacgaggacctgcaggccctgaaggagagcatgcagatgagcctgagcctgctgccccccaccgccctggtgggcctgatcaccttcggcagaatggtgcaggtgcacgagctgggctgcgagggcatcagcaagagctacgtgttcagaggcaccaaggacctgagcgccaagcagctgcaggagatgctgggcctgagcaaggtgcccctgacccaggccaccagaggcccccaggtgcagcagcccccccccagcaacagattcctgcagcccgtgcagaagatcgacatgaacctgaccgacctgctgggcgagctgcagagagacccctggcccgtgccccagggcaagagacccctgagaagcagcggcgtggccctgagcatcgccgtgggcctgctggagtgcaccttccccaacaccggcgccagaatcatgatgttcatcggcggccccgccacccagggccccggcatggtggtgggcgacgagctgaagacccccatcagaagctggcacgacatcgacaaggacaacgccaagtacgtgaagaagggcaccaagcacttcgaggccctggccaacagagccgccaccaccggccacgtgatcgacatctacgcctgcgccctggaccagaccggcctgctggagatgaagtgctgccccaacctgaccggcggctacatggtgatgggcgacagcttcaacaccagcctgttcaagcagaccttccagagagtgttcaccaaggacatgcacggccagttcaagatgggcttcggcggcaccctggagatcaagaccagcagagagatcaagatcagcggcgccatcggcccctgcgtgagcctgaacagcaagggcccctgcgtgagcgagaacgagatcggcaccggcggcacctgccagtggaagatctgcggcctgagccccaccaccaccctggccatctacttcgaggtggtgaaccagcacaacgcccccatcccccagggcggcagaggcgccatccagttcgtgacccagtaccagcacagcagcggccagagaagaatcagagtgaccaccatcgccagaaactgggccgacgcccagacccagatccagaacatcgccgccagcttcgaccaggaggccgccgccatcctgatggccagactggccatctacagagccgagaccgaggagggccccgacgtgctgagatggctggacagacagctgatcagactgtgccagaagttcggcgagtaccacaaggacgaccccagcagcttcagattcagcgagaccttcagcctgtacccccagttcatgttccacctgagaagaagcagcttcctgcaggtgttcaacaacagccccgacgagagcagctactacagacaccacttcatgagacaggacctgacccagagcctgatcatgatccagcccatcctgtacgcctacagcttcagcggcccccccgagcccgtgctgctggacagcagcagcatcctggccgacagaatcctgctgatggacaccttcttccagatcctgatctaccacggcgagaccatcgcccagtggagaaagagcggctaccaggacatgcccgagtacgagaacttcagacacctgctgcaggcccccgtggacgacgcccaggagatcctgcacagcagattccccatgcccagatacatcgacaccgagcacggcggcagccaggccagattcctgctgagcaaggtgaaccccagccagacccacaacaacatgtacgcctggggccaggagagcggcgcccccatcctgaccgacgacgtgagcctgcaggtgttcatggaccacctgaagaagctggccgtgagcagcgccgcctag

SEQ ID NO: 98187 - DNA, 1992 bp, synthetic construct
  misc_feature 1..1992: note = Description of Artificial Sequence: Synthetic coding sequence
  source 1..1992: mol_type = other DNA
atgcccctgatcttcctgtacgtggtggacacctgcatggaggacgaggacctgcaggccctgaaggagagcatgcagatgagcctgagcctgctgccccccaccgccctggtgggcctgatcaccttcggcagaatggtgcaggtgcacgagctgggctgcgagggcatcagcaagagctacgtgttcagaggcaccaaggacctgagcgccaagcagctgcaggagatgctgggcctgagcaaggtgcccctgacccaggccaccagaggcccccaggtgcagcagcccccccccagcaacagattcctgcagcccgtgcagaagatcgacatgaacctgaccgacctgctgggcgagctgcagagagacccctggcccgtgccccagggcaagagacccctgagaagcagcggcgtggccctgagcatcgccgtgggcctgctggagtgcaccttccccaacaccggcgccagaatcatgatgttcatcggcggccccgccacccagggccccggcatggtggtgggcgacgagctgaagacccccatcagaagctggcacgacatcgacaaggacaacgccaagtacgtgaagaagggcaccaagcacttcgaggccctggccaacagagccgccaccaccggccacgtgatcgacatctacgcctgcgccctggaccagaccggcctgctggagatgaagtgctgccccaacctgaccggcggctacatggtgatgggcgacagcttcaacaccagcctgttcaagcagaccttccagagagtgttcaccaaggacatgcacggccagttcaagatgggcttcggcggcaccctggagatcaagaccagcagagagatcaagatcagcggcgccatcggcccctgcgtgagcctgaacagcaagggcccctgcgtgagcgagaacgagatcggcaccggcggcacctgccagtggaagatctgcggcctgagccccaccaccaccctggccatctacttcgaggtggtgaaccagcacaacgcccccatcccccagggcggcagaggcgccatccagttcgtgacccagtaccagcacagcagcggccagagaagaatcagagtgaccaccatcgccagaaactgggccgacgcccagacccagatccagaacatcgccgccagcttcgaccaggaggccgccgccatcctgatggccagactggccatctacagagccgagaccgaggagggccccgacgtgctgagatggctggacagacagctgatcagactgtgccagaagttcggcgagtaccacaaggacgaccccagcagcttcagattcagcgagaccttcagcctgtacccccagagaagagacttccccaagaccagcggcgagatcctggagaaccaggagaaggccagaagcgcctgcctgaagttcatgttccacctgagaagaagcagcttcctgcaggtgttcaacaacagccccgacgagagcagctactacagacaccacttcatgagacaggacctgacccagagcctgatcatgatccagcccatcctgtacgcctacagcttcagcggcccccccgagcccgtgctgctggacagcagcagcatcctggccgacagaatcctgctgatggacaccttcttccagatcctgatctaccacggcgagaccatcgcccagtggagaaagagcggctaccaggacatgcccgagtacgagaacttcagacacctgctgcaggcccccgtggacgacgcccaggagatcctgcacagcagattccccatgcccagatacatcgacaccgagcacggcggcagccaggccagattcctgctgagcaaggtgaaccccagccagacccacaacaacatgtacgcctggggccaggagagcggcgcccccatcctgaccgacgacgtgagcctgcaggtgttcatggaccacctgaagaagctggccgtgagcagcgccgcctag

SEQ ID NO: 98188 - DNA, 1692 bp, synthetic construct
  misc_feature 1..1692: note = Description of Artificial Sequence: Synthetic coding sequence
  source 1..1692: mol_type = other DNA
atgctgggcctgagcaaggtgcccctgacccaggccaccagaggcccccaggtgcagcagcccccccccagcaacagattcctgcagcccgtgcagaagatcgacatgaacctgaccgacctgctgggcgagctgcagagagacccctggcccgtgccccagggcaagagacccctgagaagcagcggcgtggccctgagcatcgccgtgggcctgctggagtgcaccttccccaacaccggcgccagaatcatgatgttcatcggcggccccgccacccagggccccggcatggtggtgggcgacgagctgaagacccccatcagaagctggcacgacatcgacaaggacaacgccaagtacgtgaagaagggcaccaagcacttcgaggccctggccaacagagccgccaccaccggccacgtgatcgacatctacgcctgcgccctggaccagaccggcctgctggagatgaagtgctgccccaacctgaccggcggctacatggtgatgggcgacagcttcaacaccagcctgttcaagcagaccttccagagagtgttcaccaaggacatgcacggccagttcaagatgggcttcggcggcaccctggagatcaagaccagcagagagatcaagatcagcggcgccatcggcccctgcgtgagcctgaacagcaagggcccctgcgtgagcgagaacgagatcggcaccggcggcacctgccagtggaagatctgcggcctgagccccaccaccaccctggccatctacttcgaggtggtgaaccagcacaacgcccccatcccccagggcggcagaggcgccatccagttcgtgacccagtaccagcacagcagcggccagagaagaatcagagtgaccaccatcgccagaaactgggccgacgcccagacccagatccagaacatcgccgccagcttcgaccaggaggccgccgccatcctgatggccagactggccatctacagagccgagaccgaggagggccccgacgtgctgagatggctggacagacagctgatcagactgtgccagaagttcggcgagtaccacaaggacgaccccagcagcttcagattcagcgagaccttcagcctgtacccccagttcatgttccacctgagaagaagcagcttcctgcaggtgttcaacaacagccccgacgagagcagctactacagacaccacttcatgagacaggacctgacccagagcctgatcatgatccagcccatcctgtacgcctacagcttcagcggcccccccgagcccgtgctgctggacagcagcagcatcctggccgacagaatcctgctgatggacaccttcttccagatcctgatctaccacggcgagaccatcgcccagtggagaaagagcggctaccaggacatgcccgagtacgagaacttcagacacctgctgcaggcccccgtggacgacgcccaggagatcctgcacagcagattccccatgcccagatacatcgacaccgagcacggcggcagccaggccagattcctgctgagcaaggtgaaccccagccagacccacaacaacatgtacgcctggggccaggagagcggcgcccccatcctgaccgacgacgtgagcctgcaggtgttcatggaccacctgaagaagctggccgtgagcagcgccgcctag

SEQ ID NO: 98189 - DNA, 2211 bp, synthetic construct
  misc_feature 1..2211: note = Description of Artificial Sequence: Synthetic coding sequence
  source 1..2211: mol_type = other DNA
atgaccacctacctggagttcatccagcagaacgaggagagagacggcgtgagattcagctggaacgtgtggcccagcagcagactggaggccaccagaatggtggtgcccgtggccgccctgttcacccccctgaaggagagacccgacctgccccccatccagtacgagcccgtgctgtgcagcagaaccacctgcagagccgtgctgaaccccctgtgccaggtggactacagagccaagctgtgggcctgcaacttctgctaccagagaaaccagagaggcccccagatgcccctgatcttcctgtacgtggtggacacctgcatggaggacgaggacctgcaggccctgaaggagagcatgcagatgagcctgagcctgctgccccccaccgccctggtgggcctgatcaccttcggcagaatggtgcaggtgcacgagctgggctgcgagggcatcagcaagagctacgtgttcagaggcaccaaggacctgagcgccaagcagctgcaggagatgctgggcctgagcaaggtgcccctgacccaggccaccagaggcccccaggtgcagcagcccccccccagcaacagattcctgcagcccgtgcagaagatcgacatgaacctgaccgacctgctgggcgagctgcagagagacccctggcccgtgccccagggcaagagacccctgagaagcagcggcgtggccctgagcatcgccgtgggcctgctggagtgcaccttccccaacaccggcgccagaatcatgatgttcatcggcggccccgccacccagggccccggcatggtggtgggcgacgagctgaagacccccatcagaagctggcacgacatcgacaaggacaacgccaagtacgtgaagaagggcaccaagcacttcgaggccctggccaacagagccgccaccaccggccacgtgatcgacatctacgcctgcgccctggaccagaccggcctgctggagatgaagtgctgccccaacctgaccggcggctacatggtgatgggcgacagcttcaacaccagcctgttcaagcagaccttccagagagtgttcaccaaggacatgcacggccagttcaagatgggcttcggcggcaccctggagatcaagaccagcagagagatcaagatcagcggcgccatcggcccctgcgtgagcctgaacagcaagggcccctgcgtgagcgagaacgagatcggcaccggcggcacctgccagtggaagatctgcggcctgagccccaccaccaccctggccatctacttcgaggtggtgaaccagcacaacgcccccatcccccagggcggcagaggcgccatccagttcgtgacccagtaccagcacagcagcggccagagaagaatcagagtgaccaccatcgccagaaactgggccgacgcccagacccagatccagaacatcgccgccagcttcgaccaggaggccgccgccatcctgatggccagactggccatctacagagccgagaccgaggagggccccgacgtgctgagatggctggacagacagctgatcagactgtgccagaagttcggcgagtaccacaaggacgaccccagcagcttcagattcagcgagaccttcagcctgtacccccagttcatgttccacctgagaagaagcagcttcctgcaggtgttcaacaacagccccgacgagagcagctactacagacaccacttcatgagacaggacctgacccagagcctgatcatgatccagcccatcctgtacgcctacagcttcagcggcccccccgagcccgtgctgctggacagcagcagcatcctggccgacagaatcctgctgatggacaccttcttccagatcctgatctaccacggcgagaccatcgcccagtggagaaagagcggctaccaggacatgcccgagtacgagaacttcagacacctgctgcaggcccccgtggacgacgcccaggagatcctgcacagcagattccccatgcccagatacatcgacaccgagcacggcggcagccaggccagattcctgctgagcaaggtgaaccccagccagacccacaacaacatgtacgcctggggccaggagagcggcgcccccatcctgaccgacgacgtgagcctgcaggtgttcatggaccacctgaagaagctggccgtgagcagcgccgcctag

SEQ ID NO: 98190 - DNA, 510 bp, synthetic construct
  misc_feature 1..510: note = Description of Artificial Sequence: Synthetic coding sequence
  source 1..510: mol_type = other DNA
atgaccacctacctggagttcatccagcagaacgaggagagagacggcgtgagattcagctggaacgtgtggcccagcagcagactggaggccaccagaatggtggtgcccgtggccgccctgttcacccccctgaaggagagacccgacctgccccccatccagtacgagcccgtgctgtgcagcagaaccacctgcagagccgtgctgaaccccctgtgccaggtggactacagagccaagctgtgggcctgcaacttctgctaccagagaaaccagttcccccccagctacgccggcatcagcgagctgaaccagcccgccgagctgctgccccagttcagcagcatcgagtacgtggtgctgagaggcccccagatgcccctgatcttcctgtacgtggtggacacctgcatggaggacgaggacctgcaggccctgaaggagagcatgcagatgagcctgagcctgctgccccccaccgccctggtgggcctgatcaccttctag

SEQ ID NO: 98191 - DNA, 285 bp, synthetic construct
  misc_feature 1..285: note = Description of Artificial Sequence: Synthetic coding sequence
  source 1..285: mol_type = other DNA
atgaccacctacctggagttcatccagcagaacgaggagagagacggcgtgagattcagctggaacgtgtggcccagcagcagactggaggccaccagaatggtggtgcccgtggccgccctgttcacccccctgaaggagagacccgacctgccccccatccagtacgagcccgtgctgtgcagcagaaccacctgcagagccgtgctgaaccccctgtgccaggtggactacagagccaagctgtgggcctgcaacttctgctaccagagaaaccaggtgtag

SEQ ID NO: 98192 - DNA, 423 bp, synthetic construct
  misc_feature 1..423: note = Description of Artificial Sequence: Synthetic coding sequence
  source 1..423: mol_type = other DNA
atgaccacctacctggagttcatccagcagaacgaggagagagacggcgtgagattcagctggaacgtgtggcccagcagcagactggaggccaccagaatggtggtgcccgtggccgccctgttcacccccctgaaggagagacccgacctgccccccatccagtacgagcccgtgctgtgcagcagaaccacctgcagagccgtgctgaaccccctgtgccaggtggactacagagccaagctgtgggcctgcaacttctgctaccagagaaaccagttcccccccagctacgccggcatcagcgagctgaaccagcccgccgagctgctgccccagttcagcagcatcgagtacgtggtgctgagaggcccccagatgcccctgatcttcctgtacgtggtggacacctgcatggagtag

SEQ ID NO: 98193 - DNA, 123 bp, synthetic construct
  misc_feature 1..123: note = Description of Artificial Sequence: Synthetic coding sequence
  source 1..123: mol_type = other DNA
atgaccacctacctggagttcatccagcagaacgaggagagagacggcgtgagattcagctggaacgtgtggcccagcagcagactggaggccaccagaatggtggtgcccgtggccgcctag

SEQ ID NO: 98194 - DNA, 2304 bp, synthetic construct
  misc_feature 1..2304: note = Description of Artificial Sequence: Synthetic coding sequence
  source 1..2304: mol_type = other DNA
atggccacctacctggagttcatccagcagaacgaggagagagacggcgtgagattcagctggaacgtgtggcccagcagcagactggaggccaccagaatggtggtgcccctggcctgcctgctgacccccctgaaggagagacccgacctgccccccgtgcagtacgagcccgtgctgtgcagcagacccacctgcaaggccgtgctgaaccccctgtgccaggtggactacagagccaagctgtgggcctgcaacttctgcttccagagaaaccagttcccccccgcctacggcggcatcagcgaggtgaaccagcccgccgagctgatgccccagttcagcaccatcgagtacgtgatccagagaggcgcccagagccccctgatcttcctgtacgtggtggacacctgcctggaggaggacgacctgcaggccctgaaggagagcctgcagatgagcctgagcctgctgccccccgacgccctggtgggcctgatcaccttcggcagaatggtgcaggtgcacgagctgagctgcgagggcatcagcaagagctacgtgttcagaggcaccaaggacctgaccgccaagcagatccaggacatgctgggcctgaccaagcccgccatgcccatgcagcaggccagacccgcccagccccaggagcaccccttcgccagcagcagattcctgcagcccgtgcacaagatcgacatgaacctgaccgacctgctgggcgagctgcagagagacccctggcccgtgacccagggcaagagacccctgagaagcaccggcgtggccctgagcatcgccgtgggcctgctggagggcaccttccccaacaccggcgccagaatcatgctgttcaccggcggcccccccacccagggccccggcatggtggtgggcgacgagctgaagatccccatcagaagctggcacgacatcgagaaggacaacgccagattcatgaagaaggccaccaagcactacgagatgctggccaacagaaccgccgccaacggccactgcatcgacatctacgcctgcgccctggaccagaccggcctgctggagatgaagtgctgcgccaacctgaccggcggctacatggtgatgggcgacagcttcaacaccagcctgttcaagcagaccttccagagaatcttcaccaaggacttcaacggcgacttcagaatggccttcggcgccaccctggacgtgaagaccagcagagagctgaagatcgccggcgccatcggcccctgcgtgagcctgaacgtgaagggcccctgcgtgagcgagaacgagctgggcgtgggcggcaccagccagtggaagatctgcggcctggaccccaccagcaccctgggcatctacttcgaggtggtgaaccagcacaacacccccatcccccagggcggcagaggcgccatccagttcgtgacccactaccagcacagcagcacccagagaagaatcagagtgaccaccatcgccagaaactgggccgacgtgcagagccagctgagacacatcgaggccgccttcgaccaggaggccgccgccgtgctgatggccagactgggcgtgttcagagccgagagcgaggagggccccgacgtgctgagatggctggacagacagctgatcagactgtgccagaagttcggccagtacaacaaggaggaccccaccagcttcagactgagcgacagcttcagcctgtacccccagttcatgttccacctgagaagaagccccttcctgcaggtgttcaacaacagccccgacgagagcagctactacagacaccacttcgccagacaggacctgacccagagcctgatcatgatccagcccatcctgtacagctacagcttccacggcccccccgagcccgtgctgctggacagcagcagcatcctggccgacagaatcctgctgatggacaccttcttccagatcgtgatctacctgggcgagaccatcgcccagtggagaaaggccggctaccaggacatgcccgagtacgagaacttcaagcacctgctgcaggcccccctggacgacgcccaggagatcctgcaggccagattccccatgcccagatacatcaacaccgagcacggcggcagccaggccagattcctgctgagcaaggtgaaccccagccagacccacaacaacctgtacgcctggggccaggagaccggcgcccccatcctgaccgacgacgtgagcctgcaggtgttcatggaccacctgaagaagctggccgtgagcagcgcctgctag

SEQ ID NO: 98195 - DNA, 2304 bp, synthetic construct; identical to SEQ ID NO: 98194
  misc_feature 1..2304: note = Description of Artificial Sequence: Synthetic coding sequence
  source 1..2304: mol_type = other DNA

SEQ ID NO: 98196 - DNA, 2304 bp, synthetic construct; identical to SEQ ID NO: 98194
  misc_feature 1..2304: note = Description of Artificial Sequence: Synthetic coding sequence
  source 1..2304: mol_type = other DNA

SEQ ID NO: 98197 - DNA, 2304 bp, synthetic construct; identical to SEQ ID NO: 98194
  misc_feature 1..2304: note = Description of Artificial Sequence: Synthetic coding sequence
  source 1..2304: mol_type = other DNA

SEQ ID NO: 98198 - DNA, 741 bp, synthetic construct
  misc_feature 1..741: note = Description of Artificial Sequence: Synthetic coding sequence
  source 1..741: mol_type = other DNA
cagagaagaatcagagtgaccaccatcgccagaaactgggccgacgtgcagagccagctgagacacatcgaggccgccttcgaccaggaggccgccgccgtgctgatggccagactgggcgtgttcagagccgagagcgaggagggccccgacgtgctgagatggctggacagacagctgatcagactgtgccagaagttcggccagtacaacaaggaggaccccaccagcttcagactgagcgacagcttcagcctgtacccccagttcatgttccacctgagaagaagccccttcctgcaggtgttcaacaacagccccgacgagagcagctactacagacaccacttcgccagacaggacctgacccagagcctgatcatgatccagcccatcctgtacagctacagcttccacggcccccccgagaccatcgcccagtggagaaaggccggctaccaggacatgcccgagtacgagaacttcaagcacctgctgcaggcccccctggacgacgcccaggagatcctgcaggccagattccccatgcccagatacatcaacaccgagcacggcggcagccaggccagattcctgctgagcaaggtgaaccccagccagacccacaacaacctgtacgcctggggccaggagaccggcgcccccatcctgaccgacgacgtgagcctgcaggtgttcatggaccacctgaagaagctggccgtgagcagcgcctgctag

SEQ ID NO: 98199 - DNA, 996 bp, synthetic construct
  misc_feature 1..996: note = Description of Artificial Sequence: Synthetic coding sequence
  source 1..996: mol_type = other DNA
atggccacctacctggagttcatccagcagaacgaggagagagacggcgtgagattcagctggaacgtgtggcccagcagcagactggaggccaccagaatggtggtgcccctggcctgcctgctgacccccctgaaggagagacccgacctgccccccgtgcagtacgagcccgtgctgtgcagcagacccacctgcaaggccgtgctgaaccccctgtgccaggtggactacagagccaagctgtgggcctgcaacttctgcttccagagaaaccagttcccccccgcctacggcggcatcagcgaggtgaaccagcccgccgagctgatgccccagttcagcaccatcgagtacgtgatccagagaggcgcccagagccccctgatcttcctgtacgtggtggacacctgcctggaggaggacgacctgcaggccctgaaggagagcctgcagatgagcctgagcctgctgccccccgacgccctggtgggcctgatcaccttcggcagaatggtgcaggtgcacgagctgagctgcgagggcatcagcaagagctacgtgttcagaggcaccaaggacctgaccgccaagcagatccaggacatgctgggcctgaccaagcccgccatgcccatgcagcaggccagacccgcccagccccaggagcaccccttcgccagcagcagattcctgcagcccgtgcacaagatcgacatgaacctgaccgacctgctgggcgagctgcagagagacccctggcccgtgacccagggcaagagacccctgagaagcaccggcgtggccctgagcatcgccgtgggcctgctggagggcaccttccccaacaccggcgccagaatcatgctgttcaccggcggcccccccacccagggccccggcatggtggtgggcgacgagctgaagatccccatcagaagctggcacgacatcgagaaggacaacgccagattcatgaagaaggccaccaagtag

SEQ ID NO: 98200 - DNA, 1200 bp, synthetic construct
  misc_feature 1..1200: note = Description of Artificial Sequence: Synthetic coding sequence
  source 1..1200: mol_type = other DNA
atggccgagagaagaagacacaagaagagaatccaggaggtgggcgagcccagcaaggaggagaaggccgtggccaagtacctgagattcaactgccccaccaagagcaccaacatgatgggccacagagtggactacttcatcgccagcaaggccgtggactgcctgctggacagcaagtgggccaaggccaagaagggcgaggaggccctgttcaccaccagagagagcgtggtggactactgcaacagactgctgaagaagcagttcttccacagagccctgaaggtgatgaagatgaagtacgacaaggacatcaagaaggagaaggacaagggcaaggccgagagcggcaaggaggaggacaagaagagcaagaaggagaacatcaaggacgagaagaccaagaaggagaaggagaagaagaaggacggcgagaaggaggagagcaagaaggaggagacccccggcacccccaagaagaaggagaccaagaagaagttcaagctggagccccacgacgaccaggtgttcctggacggcaacgaggtgtacgtgtggatctacgaccccgtgcacttcaagaccttcgtgatgggcctgatcctggtgatcgccgtgatcgccgccaccctgttccccctgtggcccgccgagatgagagtgggcgtgtactacctgagcgtgggcgccggctgcttcgtggccagcatcctgctgctggccgtggccagatgcatcctgttcctgatcatctggctgatcaccggcggcagacaccacttctggttcctgcccaacctgaccgccgacgtgggcttcatcgacagcttcagacccctgtacacccacgagtacaagggccccaaggccgacctgaagaaggacgagaagagcgagaccaagaagcagcagaagagcgacagcgaggagaagagcgacagcgagaagaaggaggacgaggagggcaaggtgggccccggcaaccacggcaccgagggcagcggcggcgagagacacagcgacaccgacagcgacagaagagaggacgacagaagccagcacagcagcggcaacggcaacgacttcgagatgatcaccaaggaggagctggagcagcagaccgacggcgactgcgaggaggacgaggaggaggagaacgacggcgagacccccaagagcagccacgagaagagctag

SEQ ID NO: 98201 - DNA, 1200 bp, synthetic construct; identical to SEQ ID NO: 98200
  misc_feature 1..1200: note = Description of Artificial Sequence: Synthetic coding sequence
  source 1..1200: mol_type = other DNA

SEQ ID NO: 98202 - DNA, 372 bp, synthetic construct
  misc_feature 1..372: note = Description of Artificial Sequence: Synthetic coding sequence
  source 1..372: mol_type = other DNA
atggccgagagaagaagacacaagaagagaatccaggaggtgggcgagcccagcaaggacgagaagagcgagaccaagaagcagcagaagagcgacagcgaggagaagagcgacagcgagaagaaggaggacgaggagggcaaggtgggccccggcaaccacggcaccgagggcagcggcggcgagagacacagcgacaccgacagcgacagaagagaggacgacagaagccagcacagcagcggcaacggcaacgacttcgagatgatcaccaaggaggagctggagcagcagaccgacggcgactgcgaggaggacgaggaggaggagaacgacggcgagacccccaagagcagccacgagaagagctag

SEQ ID NO: 98203 - DNA, 2283 bp, synthetic construct
  misc_feature 1..2283: note = Description of Artificial Sequence: Synthetic coding sequence
  source 1..2283: mol_type = other DNA
atggccggccagcagttccagtacgacgacagcggcaacaccttcttctacttcctgaccagcttcgtgggcctgatcgtgatccccgccacctactacctgtggcccagagaccagaacgccgagcagatcagactgaagaacatcagaaaggtgtacggcagatgcatgtggtacagactgagactgctgaagccccagcccaacatcatccccaccgtgaagaagatcgtgctgctggccggctgggccctgttcctgttcctggcctacaaggtgagcaagaccgacagagagtaccaggagtacaacccctacgaggtgctgaacctggaccccggcgccaccgtggccgagatcaagaagcagtacagactgctgagcctgaagtaccaccccgacaagggcggcgacgaggtgatgttcatgagaatcgccaaggcctacgccgccctgaccgacgaggagagcagaaagaactgggaggagttcggcaaccccgacggcccccaggccaccagcttcggcatcgccctgcccgcctggatcgtggaccagaagaacagcatcctggtgctgctggtgtacggcctggccttcatggtgatcctgcccgtggtggtgggcagctggtggtacagaagcatcagatacagcggcgaccagatcctgatcagaaccacccagatctacacctacttcgtgtacaagaccagaaacatggacatgaagagactgatcatggtgctggccggcgccagcgagttcgacccccagtacaacaaggacgccaccagcagacccaccgacaacatcctgatcccccagctgatcagagagatcggcagcatcaacctgaagaagaacgagccccccctgacctgcccctacagcctgaaggccagagtgctgctgctgagccacctggccagaatgaagatccccgagaccctggaggaggaccagcagttcatgctgaagaagtgccccgccctgctgcaggagatggtgaacgtgatctgccagctgatcgtgatggccagaaacagagaggagagagagttcagagcccccaccctggccagcctggagaactgcatgaagctgagccagatggccgtgcagggcctgcagcagttcaagagccccctgctgcagctgccccacatcgaggaggacaacctgagaagagtgagcaaccacaagaagtacaagatcaagaccatccaggacctggtgagcctgaaggagagcgacagacacaccctgctgcacttcctggaggacgagaagtacgaggaggtgatggccgtgctgggcagcttcccctacgtgaccatggacatcaagagccaggtgctggacgacgaggacagcaacaacatcaccgtgggcagcctggtgaccgtgctggtgaagctgaccagacagaccatggccgaggtgttcgagaaggagcagagcatctgcgccgccgaggagcagcccgccgaggacggccagggcgagaccaacaagaacagaaccaagggcggctggcagcagaagagcaagggccccaagaagaccgccaagagcaagaagaagaagcccctgaagaagaagcccacccccgtgctgctgccccagagcaagcagcagaagcagaagcaggccaacggcgtggtgggcaacgaggccgccgtgaaggaggacgaggaggaggtgagcgacaagggcagcgacagcgaggaggaggagaccaacagagacagccagagcgagaaggacgacggcagcgacagagacagcgacagagagcaggacgagaagcagaacaaggacgacgaggccgagtggcaggagctgcagcagagcatccagagaaaggagagagccctgctggagaccaagagcaagatcacccaccccgtgtacagcctgtacttccccgaggagaagcaggagtggtggtggctgtacatcgccgacagaaaggagcagaccctgatcagcatgccctaccacgtgtgcaccctgaaggacaccgaggaggtggagctgaagttccccgcccccggcaagcccggcaactaccagtacaccgtgttcctgagaagcgacagctacatgggcctggaccagatcaagcccctgaagctggaggtgcacgaggccaagcccgtgcccgagaaccacccccagtgggacaccgccatcgagggcgacgaggaccaggaggacagcgagggcttcgaggacagcttcgaggaggaggaggaggaggaggaggacgacgactag

SEQ ID NO: 98204 - DNA, 1254 bp, synthetic construct
  misc_feature 1..1254: note = Description of Artificial Sequence: Synthetic coding sequence
  source 1..1254: mol_type = other DNA
atgttcatgagaatcgccaaggcctacgccgccctgaccgacgaggagagcagaaagaactgggaggagttcggcaaccccgacggcccccaggccaccagcttcggcatcgccctgcccgcctggatcgtggaccagaagaacagcatcctggtgctgctggtgtacggcctggccttcatggtgatcctgcccgtggtggtgggcagctggtggtacagaagcatcagatacagcggcgaccagatcctgatcagaaccacccagatctacacctacttcgtgtacaagaccagaaacatggacatgaagagactgatcatggtgctggccggcgccagcgagttcgacccccagtacaacaaggacgccaccagcagacccaccgacaacatcctgatcccccagctgatcagagagatcggcagcatcaacctgaagaagaacgagccccccctgacctgcccctacagcctgaaggccagagtgctgctgctgagccacctggccagaatgaagatccccgagaccctggaggaggaccagcagttcatgctgaagaagtgccccgccctgctgcaggagatggtgaacgtgatctgccagctgatcgtgatggccagaaacagagaggagagagagttcagagcccccaccctggccagcctggagaactgcatgaagctgagccagatggccgtgcagggcctgcagcagttcaagagccccctgctgcagctgccccacatcgaggaggacaacctgagaagagtgagcaaccacaagaagtacaagatcaagaccatccaggacctggtgagcctgaaggagagcgacagacacaccctgctgcacttcctggaggacgagaagtacgaggaggtgatggccgtgctgggcagcttcccctacgtgaccatggacatcaagagccaggtgctggacgacgaggacagcaacaacatcaccgtgggcagcctggtgaccgtgctggtgaagctgaccagacagaccatggccgaggtgttcgagaaggagcagagcatctgcgccgccgaggagcagcccgccgaggacggccagggcgagaccaacaagaacagaaccaagggcggctggcagcagaagagcaagggccccaagaagaccgccaagaagaagaaggagaccttcaagaagaagacctacacctgcgccatcaccaccgtgaaggccaccgagaccaaggccggcaagtggagcagatgggagtag

SEQ ID NO: 98205 - DNA, 1137 bp, synthetic construct
  misc_feature 1..1137: note = Description of Artificial Sequence: Synthetic coding sequence
  source 1..1137: mol_type = other DNA
gagcacgagagagagttcagagcccccaccctggccagcctggagaactgcatgaagctgagccagatggccgtgcagggcctgcagcagttcaagagccccctgctgcagctgccccacatcgaggaggacaacctgagaagagtgagcaaccacaagaagtacaagatcaagaccatccaggacctggtgagcctgaaggagagcgacagacacaccctgctgcacttcctggaggacgagaagtacgaggaggtgatggccgtgctgggcagcttcccctacgtgaccatggacatcaagagccaggtgctggacgacgaggacagcaacaacatcaccgtgggcagcctggtgaccgtgctggtgaagctgaccagacagaccatggccgaggtgttcgagaaggagcagagcatctgcgccgccgaggagcagcccgccgaggacggccagggcgagaccaacaagaacagaaccaagggcggctggcagcagaagagcaagggccccaagaagaccgccaagagcaagaagaagaagcccctgaagaagaagcccacccccgtgctgctgccccagagcaagcagcagaagcagaagcaggccaacggcgtggtgggcaacgaggccgccgtgaaggaggacgaggaggaggtgagcgacaagggcagcgacagcgaggaggagtggcaggagctgcagcagagcatccagagaaaggagagagccctgctggagaccaagagcaagatcacccaccccgtgtacagcctgtacttccccgaggagaagcaggagtggtggtggctgtacatcgccgacagaaaggagcagaccctgatcagcatgccctaccacgtgtgcaccctgaaggacaccgaggaggtggagctgaagttccccgcccccggcaagcccggcaactaccagtacaccgtgttcctgagaagcgacagctacatgggcctggaccagatcaagcccctgaagctggaggtgcacgaggccaagcccgtgcccgagaaccacccccagtgggacaccgccatcgagggcgacgaggaccaggaggacagcgagggcttcgaggacagcttcgaggaggaggaggaggaggaggaggacgacgactag

SEQ ID NO: 98206 - DNA, 2346 bp, synthetic construct
  misc_feature 1..2346: note = Description of Artificial Sequence: Synthetic coding sequence
  source 1..2346: mol_type = other DNA
atggtgagagtgctgagaagcatgtgcctgccccagctgtgcagccacatcctgagcgtgtgcagcggcaccaccagcgacagaaacgtgtacagcgtgcccggcagccagtacctgtacaaccagcccagctgctacagaggcttccagaccgtgaagcacagaaacgagaacacctgccccctgccccaggagatgaaggccctgttcaagaagaagacctacgacgagaagaagacctacgaccagcagaagttcgacagcgagagagccgacggcaccatcagcagcgagatcaagagcgccagaggcagccaccacctgagcatctacgccgagaacagcctgaagagcgacggctaccacaagagaaccgacagaaagagcagaatcatcgccaagaacgtgagcaccagcaagcccgagttcgagttcaccaccctggacttccccgagctgcagggcgccgagaacaacatgagcgagatccagaagcagcccaagtggggccccgtgcacagcgtgagcaccgacatcagcctgctgagagaggtggtgaagcccgccgccgtgctgagcaagggcgagatcgtggtgaagaacaaccccaacgagagcgtgaccgccaacgccgccaccaacagccccagctgcaccagagagctgagctggacccccatgggctacgtggtgagacagaccctgagcaccgagctgagcgccgcccccaagaacgtgaccagcatgatcaacctgaagaccatcgccagcagcgccgaccccaagaacgtgagcatccccagcagcgaggccctgagcagcgaccccagctacaacaaggagaagcacatcatccaccccacccagaagagcaaggccagccagggcagcgacctggagcagaacgaggccagcagaaagaacaagaagaagaaggagaagagcaccagcaagtacgaggtgctgaccgtgcaggagccccccagaatcgaggacgccgaggagttccccaacctggccgtggccagcgagagaagagacagaatcgagacccccaagttccagagcaagcagcagccccaggacaacttcaagaacaacgtgaagaagagccagctgcccgtgcagctggacctgggcggcatgctgaccgccctggagaagaagcagcacagccagcacgccaagcagagcagcaagcccgtggtggtgagcgtgggcgccgtgcccgtgctgagcaaggagtgcgccagcggcgagagaggcagaagaatgagccagatgaagaccccccacaaccccctggacagcagcgcccccctgatgaagaagggcaagcagagagagatccccaaggccaagaagcccaccagcctgaagaagatcatcctgaaggagagacaggagagaaagcagagactgcaggagaacgccgtgagccccgccttcaccagcgacgacacccaggacggcgagagcggcggcgacgaccagttccccgagcaggccgagctgagcggccccgagggcatggacgagctgatcagcacccccagcgtggaggacaagagcgaggagccccccggcaccgagctgcagagagacaccgaggccagccacctggcccccaaccacaccaccttccccaagatccacagcagaagattcagagactactgcagccagatgctgagcaaggaggtggacgcctgcgtgaccgacctgctgaaggagctggtgagattccaggacagaatgtaccagaaggaccccgtgaaggccaagaccaagagaagactggtgctgggcctgagagaggtgctgaagcacctgaagctgaagaagctgaagtgcgtgatcatcagccccaactgcgagaagatccagagcaagggcggcctggacgacaccctgcacaccatcatcgactacgcctgcgagcagaacatccccttcgtgttcgccctgaacagaaaggccctgggcagaagcctgaacaaggccgtgcccgtgagcgtggtgggcatcttcagctacgacggcgcccaggaccagttccacaagatggtggagctgaccgtggccgccagacaggcctacaagaccatgctggagaacgtgcagcaggagctggtgggcgagcccagaccccaggccccccccagcctgcccacccagggccccagctgccccgccgaggacggcccccccgccctgaaggagaaggaggagccccactacatcgagatctggaagaagcacctggaggcctacagcggctgcaccctggagctggaggagagcctggaggccagcaccagccagatgatgaacctgaacctgtag

SEQ ID NO: 98207 - DNA, 2565 bp, synthetic construct
  misc_feature 1..2565: note = Description of Artificial Sequence: Synthetic coding sequence
  source 1..2565: mol_type = other DNA
atggccagcgagggccccagagagcccgagagcgagggcatcaagctgagcgccgacgtgaagcccttcgtgcccagattcgccggcctgaacgtggcctggctggagagcagcgaggcctgcgtgttccccagcagcgccgccacctactaccccttcgtgcaggagccccccgtgaccgagcagaagatctacaccgaggacatggccttcggcgccagcaccttccccccccagtacctgagcagcgagatcaccctgcacccctacgcctacagcccctacaccctggacagcacccagaacgtgtacagcgtgcccggcagccagtacctgtacaaccagcccagctgctacagaggcttccagaccgtgaagcacagaaacgagaacacctgccccctgccccaggagatgaaggccctgttcaagaagaagacctacgacgagaagaagacctacgaccagcagaagttcgacagcgagagagccgacggcaccatcagcagcgagatcaagagcgccagaggcagccaccacctgagcatctacgccgagaacagcctgaagagcgacggctaccacaagagaaccgacagaaagagcagaatcatcgccaagaacgtgagcaccagcaagcccgagttcgagttcaccaccctggacttccccgagctgcagggcgccgagaacaacatgagcgagatccagaagcagcccaagtggggccccgtgcacagcgtgagcaccgacatcagcctgctgagagaggtggtgaagcccgccgccgtgctgagcaagggcgagatcgtggtgaagaacaaccccaacgagagcgtgaccgccaacgccgccaccaacagccccagctgcaccagagagctgagctggacccccatgggctacgtggtgagacagaccctgagcaccgagctgagcgccgcccccaagaacgtgaccagcatgatcaacctgaagaccatcgccagcagcgccgaccccaagaacgtgagcatccccagcagcgaggccctgagcagcgaccccagctacaacaaggagaagcacatcatccaccccacccagaagagcaaggccagccagggcagcgacctggagcagaacgaggccagcagaaagaacaagaagaagaaggagaagagcaccagcaagtacgaggtgctgaccgtgcaggagccccccagaatcgaggacgccgaggagttccccaacctggccgtggccagcgagagaagagacagaatcgagacccccaagttccagagcaagcagcagccccaggacaacttcaagaacaacgtgaagaagagccagctgcccgtgcagctggacctgggcggcatgctgaccgccctggagaagaagcagcacagccagcacgccaagcagagcagcaagcccgtggtggtgagcgtgggcgccgtgcccgtgctgagcaaggagtgcgccagcggcgagagaggcagaagaatgagccagatgaagaccccccacaaccccctggacagcagcgcccccctgatgaagaagggcaagcagagagagatccccaaggccaagaagcccaccagcctgaagaagatcatcctgaaggagagacaggagagaaagcagagactgcaggagaacgccgtgagccccgccttcaccagcgacgacacccaggacggcgagagcggcggcgacgaccagttccccgagcaggccgagctgagcggccccgagggcatggacgagctgatcagcacccccagcgtggaggacaagagcgaggagccccccggcaccgagctgcagagagacaccgaggccagccacctggcccccaaccacaccaccttccccaagatccacagcagaagattcagagactactgcagccagatgctgagcaaggaggtggacgcctgcgtgaccgacctgctgaaggagctggtgagattccaggacagaatgtaccagaaggaccccgtgaaggccaagaccaagagaagactggtgctgggcctgagagaggtgctgaagcacctgaagctgaagaagctgaagtgcgtgatcatcagccccaactgcgagaagatccagagcaagggcggcctggacgacaccctgcacaccatcatcgactacgcctgcgagcagaacatccccttcgtgttcgccctgaacagaaaggccctgggcagaagcctgaacaaggccgtgcccgtgagcgtggtgggcatcttcagctacgacggcgcccaggaccagttccacaagatggtggagctgaccgtggccgccagacaggcctacaagaccatgctggagaacgtgcagcaggagctggtgggcgagcccagaccccaggccccccccagcctgcccacccagggccccagctgccccgccgaggacggcccccccgccctgaaggagaaggaggagccccactacatcgagatctggaagaagcacctggaggcctacagcggctgcaccctggagctggaggagagcctggaggccagcaccagccagatgatgaacctgaacctgtag

SEQ ID NO: 98208 - DNA, 2583 bp, synthetic construct
  misc_feature 1..2583: note = Description of Artificial Sequence: Synthetic coding sequence
  source 1..2583: mol_type = other DNA
cccgccagcagaagacccgccgccggcctgagagacgccgccagcagcgcccccagaggcatggccagcgagggccccagagagcccgagagcgagggcatcaagctgagcgccgacgtgaagcccttcgtgcccagattcgccggcctgaacgtggcctggctggagagcagcgaggcctgcgtgttccccagcagcgccgccacctactaccccttcgtgcaggagccccccgtgaccgagcagaagatctacaccgaggacatggccttcggcgccagcaccttccccccccagtacctgagcagcgagatcaccctgcacccctacgcctacagcccctacaccctggacagcacccagaacgtgtacagcgtgcccggcagccagtacctgtacaaccagcccagctgctacagaggcttccagaccgtgaagcacagaaacgagaacacctgccccctgccccaggagatgaaggccctgttcaagaagaagacctacgacgagaagaagacctacgaccagcagaagttcgacagcgagagagccgacggcaccatcagcagcgagatcaagagcgccagaggcagccaccacctgagcatctacgccgagaacagcctgaagagcgacggctaccacaagagaaccgacagaaagagcagaatcatcgccaagaacgtgagcaccagcaagcccgagttcgagttcaccaccctggacttccccgagctgcagggcgccgagaacaacatgagcgagatccagaagcagcccaagtggggccccgtgcacagcgtgagcaccgacatcagcctgctgagagaggtggtgaagcccgccgccgtgctgagcaagggcgagatcgtggtgaagaacaaccccaacgagagcgtgctgatgcccctgcccatcctgctgcacgtgcaggagaccctgagcaccgagctgagcgccgcccccaagaacgtgaccagcatgatcaacctgaagaccatcgccagcagcgccgaccccaagaacgtgagcatccccagcagcgaggccctgagcagcgaccccagctacaacaaggagaagcacatcatccaccccacccagaagagcaaggccagccagggcagcgacctggagcagaacgaggccagcagaaagaacaagaagaagaaggagaagagcaccagcaagtacgaggtgctgaccgtgcaggagccccccagaatcgaggacgccgaggagttccccaacctggccgtggccagcgagagaagagacagaatcgagacccccaagttccagagcaagcagcagccccaggacaacttcaagaacaacgtgaagaagagccagctgcccgtgcagctggacctgggcggcatgctgaccgccctggagaagaagcagcacagccagcacgccaagcagagcagcaagcccgtggtggtgagcgtgggcgccgtgcccgtgctgagcaaggagtgcgccagcggcgagagaggcagaagaatgagccagatgaagaccccccacaaccccctggacagcagcgcccccctgatgaagaagggcaagcagagagagatccccaaggccaagaagcccaccagcctgaagaagatcatcctgaaggagagacaggagagaaagcagagactgcaggagaacgccgtgagccccgccttcaccagcgacgacacccaggacggcgagagcggcggcgacgaccagttccccgagcaggccgagctgagcggccccgagggcatggacgagctgatcagcacccccagcgtggaggacaagagcgaggagccccccggcaccgagctgcagagagacaccgaggccagccacctggcccccaaccacaccaccttccccaagatccacagcagaagattcagagactactgcagccagatgctgagcaaggaggtggacgcctgcgtgaccgacctgctgaaggagctggtgagattccaggacagaatgtaccagaaggaccccgtgaaggccaagaccaagagaagactggtgctgggcctgagagaggtgctgaagcacctgaagctgaagaagctgaagtgcgtgatcatcagccccaactgcgagaagatccagagcaagggcggcctggacgacaccctgcacaccatcatcgactacgcctgcgagcagaacatccccttcgtgttcgccctgaacagaaaggccctgggcagaagcctgaacaaggccgtgcccgtgagcgtggtgggcatcttcagctacgacggcgcccaggaccagttccacaagatggtggagctgaccgtggccgccagacaggcctacaagaccatgctggagaacgtgcagcaggagctggtgggcgagcccagaccccaggccccccccagcctgcccacccagggccccagctgccccgccgaggacggcccccccgccctgaaggagaaggaggagccccactacatcgagatctggaagaagcacctggaggcctacagcggctgcaccctggagctggaggagagcctggaggccagcaccagccagatgatgaacctgaacctgtag

SEQ ID NO: 98209 - DNA, 828 bp, synthetic construct
  misc_feature 1..828: note = Description of Artificial Sequence: Synthetic coding sequence
  source 1..828: mol_type = other DNA
ggcaccatcagcagcgagatcaagagcgccagaggcagccaccacctgagcatctacgccgagaacagcctgaagagcgacggctaccacaagagaaccgacagaaagagcagaatcatcgccaagaacgtgagcaccagcaagcccgagttcgagttcaccaccctggacttccccgagctgcagggcgccgagaacaacatgagcgagatccagaagcagcccaagtggggccccgtgcacagcgtgagcaccgacatcagcctgctgagagaggtggtgaagcccgccgccgtgctgagcaagggcgagatcgtggtgaagaacaaccccaacgagagcgtgaccgccaacgccgccaccaacagccccagctgcaccagagccgaccccaagaacgtgagcatccccagcagcgaggccctgagcagcgaccccagctacaacaaggagaagcacatcatccaccccacccagaagagcaaggccagccagggcagcgacctggagcagaacgaggccagcagaaagaacaagaagaagaaggagaagagcaccagcaagtacgaggtgctgaccgtgcaggagccccccagaatcgaggacgccgaggagttccccaacctggccgtggccagcgagagaagagacagaatcgagacccccaagttccagagcaagcagcagccccaggacaacttcaagaacaacgtgaagaagagccagctgcccgtgcagctggacctgggcggcatgctgaccgccctggagaagaagcagcacagccagcacgccaagcagagcagcaagcccgtggtggtgagctag

SEQ ID NO: 98210 - DNA, 183 bp, synthetic construct
  misc_feature 1..183: note = Description of Artificial Sequence: Synthetic coding sequence
  source 1..183: mol_type = other DNA
atgcccctgcccatcctgctgcacgtgcaggagcagatcctgaagatgctggtgtaccacctgctgaagctgtacctgagaatcctgcccaccaccaagaagaacaccctgttcatcctgcccaagagcctgaagcaccacaaggtggtgaccctgaacaagatgaagccccaggagagatag

SEQ ID NO: 98211 - DNA, 2361 bp, synthetic construct
  misc_feature 1..2361: note = Description of Artificial Sequence: Synthetic coding sequence
  source 1..2361: mol_type = other DNA
atggccttcggcgccagcaccttccccccccagtacctgagcagcgagatcaccctgcacccctacgcctacagcccctacaccctggacagcacccagaacgtgtacagcgtgcccggcagccagtacctgtacaaccagcccagctgctacagaggcttccagaccgtgaagcacagaaacgagaacacctgccccctgccccaggagatgaaggccctgttcaagaagaagacctacgacgagaagaagacctacgaccagcagaagttcgacagcgagagagccgacggcaccatcagcagcgagatcaagagcgccagaggcagccaccacctgagcatctacgccgagaacagcctgaagagcgacggctaccacaagagaaccgacagaaagagcagaatcatcgccaagaacgtgagcaccagcaagcccgagttcgagttcaccaccctggacttccccgagctgcagggcgccgagaacaacatgagcgagatccagaagcagcccaagtggggccccgtgcacagcgtgagcaccgacatcagcctgctgagagaggtggtgaagcccgccgccgtgctgagcaagggcgagatcgtggtgaagaacaaccccaacgagagcgtgaccgccaacgccgccaccaacagccccagctgcaccagagagctgagctggacccccatgggctacgtggtgagacagaccctgagcaccgagctgagcgccgcccccaagaacgtgaccagcatgatcaacctgaagaccatcgccagcagcgccgaccccaagaacgtgagcatccccagcagcgaggccctgagcagcgaccccagctacaacaaggagaagcacatcatccaccccacccagaagagcaaggccagccagggcagcgacctggagcagaacgaggccagcagaaagaacaagaagaagaaggagaagagcaccagcaagtacgaggtgctgaccgtgcaggagccccccagaatcgaggacgccgaggagttccccaacctggccgtggccagcgagagaagagacagaatcgagacccccaagttccagagcaagcagcagccccaggacaacttcaagaacaacgtgaagaagagccagctgcccgtgcagctggacctgggcggcatgctgaccgccctggagaagaagcagcacagccagcacgccaagcagagcagcaagcccgtggtggtgagcgtgggcgccgtgcccgtgctgagcaaggagtgcgccagcggcgagagaggcagaagaatgagccagatgaagaccccccacaaccccctggacagcagcgcccccctgatgaagaagggcaagcagagagagatccccaaggccaagaagcccaccagcctgaagaagatcatcctgaaggagagacaggagagaaagcagagactgcaggagaacgccgtgagccccgccttcaccagcgacgacacccaggacggcgagagcggcggcgacgaccagttccccgagcaggccgagctgagcggccccgagggcatggacgagctgatcagcacccccagcgtggaggacaagagcgaggagccccccggcaccgagctgcagagagacaccgaggccagccacctggcccccaaccacaccaccttccccaagatccacagcagaagattcagagactactgcagccagatgctgagcaaggaggtggacgcctgcgtgaccgacctgctgaaggagctggtgagattccaggacagaatgtaccagaaggaccccgtgaaggccaagaccaagagaagactggtgctgggcctgagagaggtgctgaagcacctgaagctgaagaagctgaagtgcgtgatcatcagccccaactgcgagaagatccagagcaagggcggcctggacgacaccctgcacaccatcatcgactacgcctgcgagcagaacatccccttcgtgttcgccctgaacagaaaggccctgggcagaagcctgaacaaggccgtgcccgtgagcgtggtgggcatcttcagctacgacggcgcccaggaccagttccacaagatggtggagctgaccgtggccgccagacaggcctacaagaccatgctggagaacgtgcagcaggagctggtgggcgagcccagaccccaggccccccccagcctgcccacccagggccccagctgccccgccgaggacggcccccccgccctgaaggagaaggaggagccccactacatcgagatctggaagaagcacctggaggcctacagcggctgcaccctggagctggaggagagcctggaggccagcaccagccagatgatgaacctgaacctgtag

SEQ ID NO: 98212 - DNA, 747 bp, synthetic construct
  misc_feature 1..747: note = Description of Artificial Sequence: Synthetic coding sequence
  source 1..747: mol_type = other DNA
atgcagacctgccccctggccttccccggccacgtgagccaggccctgggcaccctgctgttcctggccgccagcctgagcgcccagaacgagggctgggacagccccatctgcaccgagggcgtggtgagcgtgagctggggcgagaacaccgtgatgagctgcaacatcagcaacgccttcagccacgtgaacatcaagctgagagcccacggccaggagagcgccatcttcaacgaggtggcccccggctacttcagcagagacggctggcagctgcaggtgcagggcggcgtggcccagctggtgatcaagggcgccagagacagccacgccggcctgtacatgtggcacctggtgggccaccagagaaacaacagacaggtgaccctggaggtgagcggcgccgagccccagagcgcccccgacaccggcttctggcccgtgcccgccgtggtgaccgccgtgttcatcctgctggtggccctggtgatgttcgcctggtacagatgcagatgcagccagcagagaagagagaagaagttcttcctgctggagccccagatgaaggtggccgccctgagagccggcgcccagcagggcctgagcagagccagcgccgagctgtggacccccgacagcgagcccacccccagacccctggccctggtgttcaagcccagccccctgggcgccctggagctgctgagcccccagcccctgttcccctacgccgccgacccctag

SEQ ID NO: 98213 - DNA, 888 bp, synthetic construct
  misc_feature 1..888: note = Description of Artificial Sequence: Synthetic coding sequence
  source 1..888: mol_type = other DNA
atgctgcagggccccggcagcctgctgctgctgttcctggccagccactgctgcctgggcagcgccagaggcctgttcctgttcggccagcccgacttcagctacaagagaagcaactgcaagcccatccccgccaacctgcagctgtgccacggcatcgagtaccagaacatgagactgcccaacctgctgggccacgagaccatgaaggaggtgctggagcaggccggcgcctggatccccctggtgatgaagcagtgccaccccgacaccaagaagttcctgtgcagcctgttcgcccccgtgtgcctggacgacctggacgagaccatccagccctgccacagcctgtgcgtgcaggtgaaggacagatgcgcccccgtgatgagcgccttcggcttcccctggcccgacatgctggagtgcgacagattcccccaggacaacgacctgtgcatccccctggccagcagcgaccacctgctgcccgccaccgaggaggcccccaaggtgtgcgaggcctgcaagaacaagaacgacgacgacaacgacatcatggagaccctgtgcaagaacgacttcgccctgaagatcaaggtgaaggagatcacctacatcaacagagacaccaagatcatcctggagaccaagagcaagaccatctacaagctgaacggcgtgagcgagagagacctgaagaagagcgtgctgtggctgaaggacagcctgcagtgcacctgcgaggagatgaacgacatcaacgccccctacctggtgatgggccagaagcagggcggcgagctggtgatcaccagcgtgaagagatggcagaagggccagagagagttcaagagaatcagcagaagcatcagaaagctgcagtgctag

SEQ ID NO: 98214 - DNA, 312 bp, synthetic construct
  misc_feature 1..312: note = Description of Artificial Sequence: Synthetic coding sequence
  source 1..312: mol_type = other DNA
atggccagcagatgggccgtgcagctgctgctggtggccgcctggagcatgggctgcggcgaggccctgaagtgctacacctgcaaggagcccatgaccagcgccagctgcagaaccatcaccagatgcaagcccgaggacaccgcctgcatgaccaccctggtgaccgtggaggccgagtaccccttcaaccagagccccgtggtgaccagaagctgcagcagcagctgcgtggccaccgaccccgacagcatcggcgccgcccacctgatcttctgctgcttcagagacctgtgcaacagcgagctgtag

SEQ ID NO: 98215 - DNA, 636 bp, synthetic construct
  misc_feature 1..636: note = Description of Artificial Sequence: Synthetic coding sequence
  source 1..636: mol_type = other DNA
atgatcagcagaatggagaagatgaccatgatgatgaagatcctgatcatgttcgccctgggcatgaactactggagctgcagcggcttccccgtgtacgactacgaccccagcagcctgagagacgccctgagcgccagcgtggtgaaggtgaacagccagagcctgagcccctacctgttcagagccttcagaagcagcctgaagagagtggaggtgctggacgagaacaacctggtgatgaacctggagttcagcatcagagagaccacctgcagaaaggacagcggcgaggaccccgccacctgcgccttccagagagactactacgtgagcaccgccgtgtgcagaagcaccgtgaaggtgagcgcccagcaggtgcagggcgtgcacgccagatgcagctggagcagcagcaccagcgagagctacagcagcgaggagatgatcttcggcgacatgctgggcagccacaagtggagaaacaactacctgttcggcctgatcagcgacgagagcatcagcgagcagttctacgacagaagcctgggcatcatgagaagagtgctgccccccggcaacagaagataccccaaccacagacacagagccagaatcaacaccgacttcgagtag

SEQ ID NO: 98216 - DNA, 636 bp, synthetic construct; identical to SEQ ID NO: 98215
  misc_feature 1..636: note = Description of Artificial Sequence: Synthetic coding sequence
  source 1..636: mol_type = other DNA

SEQ ID NO: 98217 - DNA, 366 bp, synthetic construct
  misc_feature 1..366: note = Description of Artificial Sequence: Synthetic coding sequence
  source 1..366: mol_type = other DNA
atggcccccagacccctgctgctgctgctgctgctgctgggcggcagcgccgccagacccgccccccccagagccagaagacacagcgacggcaccttcaccagcgagctgagcagactgagagagggcgccagactgcagagactgctgcagggcctggtgggcaagagaagcgagcaggacgccgagaacagcatggcctggaccagactgagcgccggcctgctgtgccccagcggcagcaacatgcccatcctgcaggcctggatgcccctggacggcacctggagcccctggctgccccccggccccatggtgagcgagcccgccggcgccgccgccgagggcaccctgagacccagatag

SEQ ID NO: 98218 - DNA, 1323 bp, synthetic construct
  misc_feature 1..1323: note = Description of Artificial Sequence: Synthetic coding sequence
  source 1..1323: mol_type = other DNA
atgagaccccacctgagcccccccctgcagcagctgctgctgcccgtgctgctggcctgcgccgcccacagcaccggcgccctgcccagactgtgcgacgtgctgcaggtgctgtgggaggagcaggaccagtgcctgcaggagctgagcagagagcagaccggcgacctgggcaccgagcagcccgtgcccggctgcgagggcatgtgggacaacatcagctgctggcccagcagcgtgcccggcagaatggtggaggtggagtgccccagattcctgagaatgctgaccagcagaaacggcagcctgttcagaaactgcacccaggacggctggagcgagaccttccccagacccaacctggcctgcggcgtgaacgtgaacgacagcagcaacgagaagagacacagctacctgctgaagctgaaggtgatgtacaccgtgggctacagcagcagcctggtgatgctgctggtggccctgggcatcctgtgcgccttcagaagactgcactgcaccagaaactacatccacatgcacctgttcgtgagcttcatcctgagagccctgagcaacttcatcaaggacgccgtgctgttcagcagcgacgacgtgacctactgcgacgcccacagagccggctgcaagctggtgatggtgctgttccagtactgcatcatggccaactacagctggctgctggtggagggcctgtacctgcacaccctgctggccatcagcttcttcagcgagagaaagtacctgcagggcttcgtggccttcggctggggcagccccgccatcttcgtggccctgtgggccatcgccagacacttcctggaggacgtgggctgctgggacatcaacgccaacgccagcatctggtggatcatcagaggccccgtgatcctgagcatcctgatcaacttcatcctgttcatcaacatcctgagaatcctgatgagaaagctgagaacccaggagaccagaggcaacgaggtgagccactacaagagactggccagaagcaccctgctgctgatccccctgttcggcatccactacatcgtgttcgccttcagccccgaggacgccatggagatccagctgttcttcgagctggccctgggcagcttccagggcctggtggtggccgtgctgtactgcttcctgaacggcgaggtgcagctggaggtgcagaagaagtggcagcagtggcacctgagagagttccccctgcaccccgtggccagcttcagcaacagcaccaaggccagccacctggagcagagccagggcacctgcagaaccagcatcatctag

SEQ ID NO: 98219 - DNA, 288 bp, synthetic construct
  misc_feature 1..288: note = Description of Artificial Sequence: Synthetic coding sequence
  source 1..288: mol_type = other DNA
atgaagctgctgatggtgctgatgctggccgccctgctgctgcactgctacgccgacagcggctgcaagctgctggaggacatggtggagaagaccatcaacagcgacatcagcatccccgagtacaaggagctgctgcaggagttcatcgacagcgacgccgccgccgaggccatgggcaagttcaagcagtgcttcctgaaccagagccacagaaccctgaagaacttcggcctgatgatgcacaccgtgtacgacagcatctggtgcaacatgaagagcaactag

SEQ ID NO: 98220 - DNA, 1746 bp, synthetic construct
  misc_feature 1..1746: note = Description of Artificial Sequence: Synthetic coding sequence
  source 1..1746: mol_type = other DNA
atgcccgcccccagagccagagagcagcccagagtgcccggcgagagacagcccctgctgcccagaggcgccagaggccccagaagatggagaagagccgccggcgccgccgtgctgctggtggagatgctggagagagccgccttcttcggcgtgaccgccaacctggtgctgtacctgaacagcaccaacttcaactggaccggcgagcaggccaccagagccgccctggtgttcctgggcgccagctacctgctggcccccgtgggcggctggctggccgacgtgtacctgggcagatacagagccgtggccctgagcctgctgctgtacctggccgccagcggcctgctgcccgccaccgccttccccgacggcagaagcagcttctgcggcgagatgcccgccagccccctgggccccgcctgccccagcgccggctgccccagaagcagccccagcccctactgcgcccccgtgctgtacgccggcctgctgctgctgggcctggccgccagcagcgtgagaagcaacctgaccagcttcggcgccgaccaggtgatggacctgggcagagacgccaccagaagattcttcaactggttctactggagcatcaacctgggcgccgtgctgagcctgctggtggtggccttcatccagcagaacatcagcttcctgctgggctacagcatccccgtgggctgcgtgggcctggccttcttcatcttcctgttcgccacccccgtgttcatcaccaagccccccatgggcagccaggtgagcagcatgctgaagctggccctgcagaactgctgcccccagctgtggcagagacacagcgccagagacagacagtgcgccagagtgctggccgacgagagaagcccccagcccggcgccagcccccaggaggacatcgccaacttccaggtgctggtgaagatcctgcccgtgatggtgaccctggtgccctactggatggtgtacttccagatgcagagcacctacgtgctgcagggcctgcacctgcacatccccaacatcttccccgccaaccccgccaacatcagcgtggccctgagagcccagggcagcagctacaccatccccgaggcctggctgctgctggccaacgtggtggtggtgctgatcctggtgcccctgaaggacagactgatcgaccccctgctgctgagatgcaagctgctgcccagcgccctgcagaagatggccctgggcatgttcttcggcttcaccagcgtgatcgtggccggcgtgctggagatggagagactgcactacatccaccacaacgagaccgtgagccagcagatcggcgaggtgctgtacaacgccgcccccctgagcatctggtggcagatcccccagtacctgctgatcggcatcagcgagatcttcgccagcatccccggcctggagttcgcctacagcgaggcccccagaagcatgcagggcgccatcatgggcatcttcttctgcctgagcggcgtgggcagcctgctgggcagcagcctggtggccctgctgagcctgcccggcggctggctgcactgccccaaggacttcggcaacatcaacaactgcagaatggacctgtacttcttcctgctggccggcatccaggccgtgaccgccctgctgttcgtgtggatcgccggcagatacgagagagccagccagggccccgccagccacagcagattcagcagagacagaggctag

SEQ ID NO: 98221 - DNA, 363 bp, synthetic construct
  misc_feature 1..363: note = Description of Artificial Sequence: Synthetic coding sequence
  source 1..363: mol_type = other DNA
atgaagctgctgatggtgctgatgctggccgccctgagccagcactgctacgccggcagcggctgccccctgctggagaacgtgatcagcaagaccatcaacccccaggtgagcaagaccgagtacaaggagctgctgcaggagttcatcgacgacaacgccaccaccaacgccatcgacgagctgaaggagtgcttcctgaaccagaccgacgagaccctgagcaacgtggaggtgttcatggtgatcagcttcagcagctacaagctgttcaagagccccgaccagggccaggtgggcagcagcttcctgaccgacaacgccaaggccaccagcgagcaggccttcagctacatcggctag

SEQ ID NO: 98222 - DNA, 315 bp, synthetic construct
  misc_feature 1..315: note = Description of Artificial Sequence: Synthetic coding sequence
  source 1..315: mol_type = other DNA
atgaagctggccgccctgctgggcctgtgcgtggccctgagctgcagcagcgccgccgccttcctggtgggcagcgccaagcccgtggcccagcccgtggccgccctggagagcgccgccgaggccggcgccggcaccctggccaaccccctgggcaccctgaaccccctgaagctgctgctgagcagcctgggcatccccgtgaaccacctgatcgagggcagccagaagtgcgtggccgagctgggcccccaggccgtgggcgccgtgaaggccctgaaggccctgctgggcgccctgaccgtgttcggctag

SEQ ID NO: 98223 - DNA, 282 bp, synthetic construct
  misc_feature 1..282: note = Description of Artificial Sequence: Synthetic coding sequence
  source 1..282: mol_type = other DNA
atgaagctggtgaccatcttcctgctggtgaccatcagcctgtgcagctacagcgccaccgccttcctgatcaacaaggtgcccctgcccgtggacaagctggcccccctgcccctggacaacatcctgcccttcatggaccccctgaagctgctgctgaagaccctgggcatcagcgtggagcacctggtggagggcctgagaaagtgcgtgaacgagctgggccccgaggccagcgaggccgtgaagaagctgctggaggccctgagccacctggtgtag

SEQ ID NO: 98224 - DNA, 1854 bp, synthetic construct
  misc_feature 1..1854: note = Description of Artificial Sequence: Synthetic coding sequence
  source 1..1854: mol_type = other DNA
atggccgaggccaagacccactggctgggcgccgccctgagcctgatccccctgatcttcctgatcagcggcgccgaggccgccagcttccagagaaaccagctgctgcagaaggagcccgacctgagactggagaacgtgcagaagttccccagccccgagatgatcagagccctggagtacatcgagaacctgagacagcaggcccacaaggaggagagcagccccgactacaacccctaccagggcgtgagcgtgcccctgcagcagaaggagaacggcgacgagagccacctgcccgagagagacagcctgagcgaggaggactggatgagaatcatcctggaggccctgagacaggccgagaacgagccccagagcgcccccaaggagaacaagccctacgccctgaacagcgagaagaacttccccatggacatgagcgacgactacgagacccagcagtggcccgagagaaagctgaagcacatgcagttcccccccatgtacgaggagaacagcagagacaaccccttcaagagaaccaacgagatcgtggaggagcagtacaccccccagagcctggccaccctggagagcgtgttccaggagctgggcaagctgaccggccccaacaaccagaagagagagagaatggacgaggagcagaagctgtacaccgacgacgaggacgacatctacaaggccaacaacatcgcctacgaggacgtggtgggcggcgaggactggaaccccgtggaggagaagatcgagagccagacccaggaggaggtgagagacagcaaggagaacatcgagaagaacgagcagatcaacgacgagatgaagagaagcggccagctgggcatccaggaggaggacctgagaaaggagagcaaggaccagctgagcgacgacgtgagcaaggtgatcgcctacctgaagagactggtgaacgccgccggcagcggcagactgcagaacggccagaacggcgagagagccaccagactgttcgagaagcccctggacagccagagcatctaccagctgatcgagatcagcagaaacctgcagatcccccccgaggacctgatcgagatgctgaagaccggcgagaagcccaacggcagcgtggagcccgagagagagctggacctgcccgtggacctggacgacatcagcgaggccgacctggaccaccccgacctgttccagaacagaatgctgagcaagagcggctaccccaagacccccggcagagccggcaccgaggccctgcccgacggcctgagcgtggaggacatcctgaacctgctgggcatggagagcgccgccaaccagaagaccagctacttccccaacccctacaaccaggagaaggtgctgcccagactgccctacggcgccggcagaagcagaagcaaccagctgcccaaggccgcctggatcccccacgtggagaacagacagatggcctacgagaacctgaacgacaaggaccaggagctgggcgagtacctggccagaatgctggtgaagtaccccgagatcatcaacagcaaccaggtgaagagagtgcccggccagggcagcagcgaggacgacctgcaggaggaggagcagatcgagcaggccatcaaggagcacctgaaccagggcagcagccaggagaccgacaagctggcccccgtgagcaagagattccccgtgggcccccccaagaacgacgacacccccaacagacagtactgggacgaggacctgctgatgaaggtgctggagtacctgaaccaggagaaggccgagaagggcagagagcacatcgccaagagagccatggagaacatgtag

SEQ ID NO: 98225 - DNA, 435 bp, synthetic construct
  misc_feature 1..435: note = Description of Artificial Sequence: Synthetic coding sequence
  source 1..435: mol_type = other DNA
atggccgaggccaagacccactggctgggcgccgccctgagcctgatccccctgatcttcctgatcagcggcgccgaggccgccagcttccagagaaaccagctgctgcagaaggagcccgacctgagactggagaacgtgcagaagttccccagccccgagatgatcagagccctggagtacatcgagaacctgagacagcaggcccacaaggaggagagcagccccgactacaacccctaccagggcgtgagcgtgcccctgcagcagaaggagaacggcgacgagagccacctgcccgagagagacagcctgagcgaggaggactggatgagaatcatcctggaggccctgagacaggccgagaacgagccccagagcgcccccaaggagaacaagccctacgccctgaacagcgagaagaacttcccctag

SEQ ID NO: 98226 - DNA, 378 bp, synthetic construct
  misc_feature 1..378: note = Description of Artificial Sequence: Synthetic coding sequence
  source 1..378: mol_type = other DNA
atggccgaggccaagacccactggctgggcgccgccctgagcctgatccccctgatcttcctgatcagcggcgccgaggccgccagcttccagagaaaccagctgctgcagaaggagcccgacctgagactggagaacgtgcagaagttccccagccccgagatgatcagagccctggagtacatcgagaacctgagacagcaggcccacaaggaggagagcagccccgactacaacccctaccagggcgtgagcgtgcccctgcagcagaaggagaacggcgacgagagccacctgcccgagagagacagcctgagcgaggaggactggatgagaatcatcctggaggccctgagacaggccgagaacgagccctag

SEQ ID NO: 98227 - DNA, 1434 bp, synthetic construct
  misc_feature 1..1434: note = Description of Artificial Sequence: Synthetic coding sequence
  source 1..1434: mol_type = other DNA
atggccgaggccaagacccactggctgggcgccgccctgagcctgatccccctgatcttcctgatcagcggcgccgaggccgccagcttccagagaaaccagctgctgcagaaggagcccgacctgagactggagaacgtgcagaagttccccagccccgagatgatcagagccctggagtacatcgagaacctgagacagcaggcccacaaggaggagagcagccccgactacaacccctaccagggcgtgagcgtgcccctgcagcagaaggagaacggcgacgagagccacctgcccgagagagacagcctgagaggcgaggactggaaccccgtggaggagaagatcgagagccagacccaggaggaggtgagagacagcaaggagaacatcgagaagaacgagcagatcaacgacgagatgaagagaagcggccagctgggcatccaggaggaggacctgagaaaggagagcaaggaccagctgagcgacgacgtgagcaaggtgatcgcctacctgaagagactggtgaacgccgccggcagcggcagactgcagaacggccagaacggcgagagagccaccagactgttcgagaagcccctggacagccagagcatctaccagctgatcgagatcagcagaaacctgcagatcccccccgaggacctgatcgagatgctgaagaccggcgagaagcccaacggcagcgtggagcccgagagagagctggacctgcccgtggacctggacgacatcagcgaggccgacctggaccaccccgacctgttccagaacagaatgctgagcaagagcggctaccccaagacccccggcagagccggcaccgaggccctgcccgacggcctgagcgtggaggacatcctgaacctgctgggcatggagagcgccgccaaccagaagaccagctacttccccaacccctacaaccaggagaaggtgctgcccagactgccctacggcgccggcagaagcagaagcaaccagctgcccaaggccgcctggatcccccacgtggagaacagacagatggcctacgagaacctgaacgacaaggaccaggagctgggcgagtacctggccagaatgctggtgaagtaccccgagatcatcaacagcaaccaggtgaagagagtgcccggccagggcagcagcgaggacgacctgcaggaggaggagcagatcgagcaggccatcaaggagcacctgaaccagggcagcagccaggagaccgacaagctggcccccgtgagcaagagattccccgtgggcccccccaagaacgacgacacccccaacagacagtactgggacgaggacctgctgatgaaggtgctggagtacctgaaccaggagaaggccgagaagggcagagagcacatcgccaagagagccatggagaacatgtag

SEQ ID NO: 98228 - DNA, 390 bp, synthetic construct; identical to SEQ ID NO: 74097
  misc_feature 1..390: note = Description of Artificial Sequence: Synthetic coding sequence
  source 1..390: mol_type = other DNA

SEQ ID NO: 98229 - DNA, 711 bp, synthetic construct
  misc_feature 1..711: note = Description of Artificial Sequence: Synthetic coding sequence
  source 1..711: mol_type = other DNA
atggccgccatccaggacggcctggccaagggcgagaacgacgagaccgtgagcaacaccctgaccctgaccaacggcctggagagaagaaccaagacctacagcgaggacaacttcgaggagctgcagtacttccccaacttctacgccctgctgaagagcatcgacagcgagaaggaggccaaggagaaggagaccctgatcaccatcatgaagaccctgatcgacttcgtgaagatgatggtgaagtacggcaccatcagccccgaggagggcgtgagctacctggagaacctggacgagatgatcgccctgcagaccaagaacaagctggagaagaacgccaccgacaacatcagcaagctgttccccgcccccagcgagaagagccacgaggagaccgacagcaccaaggaggaggccgccaagatggagaaggagtacggcagcctgaaggacagcaccaaggacgacaacagcaaccccggcggcaagaccgacgagcccaagggcaagaccgaggcctacctggaggccatcagaaagaacatcgagtggctgaagaagcacgacaagaagggcaacaaggaggactacgacctgagcaagatgagagacttcatcaacaagcaggccgacgcctacgtggagaagggcatcctggacaaggaggaggccgaggccatcaagagaatctacagcagcctgtag

SEQ ID NO: 98230 - DNA, 174 bp, synthetic construct
  misc_feature 1..174: note = Description of Artificial Sequence: Synthetic coding sequence
  source 1..174: mol_type = other DNA
atggccgccatccaggacggcctggccaagggcgagaacgacgagaccgtgagcaacaccctgaccctgaccaacggcctggagagaagaaccaagacctacagcgaggacaacttcgaggagctgcagtacttccccaacttctacgccctgctgaagagcatcgacagctag

SEQ ID NO: 98231 - DNA, 990 bp, synthetic construct
  misc_feature 1..990: note = Description of Artificial Sequence: Synthetic coding sequence
  source 1..990: mol_type = other DNA
atgagcgccttcgacaccaaccccttcgccgaccccgtggacgtgaaccccttccaggaccccagcgtgacccagctgaccaacgccccccagggcggcctggccgagttcaaccccttcagcgagaccaacgccgccaccaccgtgcccgtgacccagctgcccggcagcagccagcccgccgtgctgcagcccagcgtggagcccacccagcccaccccccaggccgtggtgagcgccgcccaggccggcctgctgagacagcaggaggagctggacagaaaggccgccgagctggagagaaaggagagagagctgcagaacaccgtggccaacctgcacgtgagacagaacaactggccccccctgcccagctggtgccccgtgaagccctgcttctaccaggacttcagcaccgagatccccgccgactaccagagaatctgcaagatgctgtactacctgtggatgctgcacagcgtgaccctgttcctgaacctgctggcctgcctggcctggttcagcggcaacagcagcaagggcgtggacttcggcctgagcatcctgtggttcctgatcttcaccccctgcgccttcctgtgctggtacagacccatctacaaggccttcagaagcgacaacagcttcagcttcttcgtgttcttcttcgtgttcttctgccagatcggcatctacatcatccagctggtgggcatccccggcctgggcgacagcggctggatcgccgccctgagcaccctggacaaccacagcctggccatcagcgtgatcatgatggtggtggccggcttcttcaccctgtgcgccgtgctgagcgtgttcctgctgcagagagtgcacagcctgtacagaagaaccggcgccagcttccagcaggcccaggaggagttcagccagggcatcttcagcagcagaaccttccacagagccgccagcagcgccgcccagggcgccttccagggcaactag

SEQ ID NO: 98232 - DNA, 864 bp, synthetic construct
  misc_feature 1..864: note = Description of Artificial Sequence: Synthetic coding sequence
  source 1..864: mol_type = other DNA
atgagcgccttcgacaccaaccccttcgccgacaccaacgccgccaccaccgtgcccgtgacccagctgcccggcagcagccagcccgccgtgctgcagcccagcgtggagcccacccagcccaccccccaggccgtggtgagcgccgcccaggccggcctgctgagacagcaggaggagctggacagaaaggccgccgagctggagagaaaggagagagagctgcagaacaccgtggccaacctgcacgtgagacagaacaactggccccccctgcccagctggtgccccgtgaagccctgcttctaccaggacttcagcaccgagatccccgccgactaccagagaatctgcaagatgctgtactacctgtggatgctgcacagcgtgaccctgttcctgaacctgctggcctgcctggcctggttcagcggcaacagcagcaagggcgtggacttcggcctgagcatcctgtggttcctgatcttcaccccctgcgccttcctgtgctggtacagacccatctacaaggccttcagaagcgacaacagcttcagcttcttcgtgttcttcttcgtgttcttctgccagatcggcatctacatcatccagctggtgggcatccccggcctgggcgacagcggctggatcgccgccctgagcaccctggacaaccacagcctggccatcagcgtgatcatgatggtggtggccggcttcttcaccctgtgcgccgtgctgagcgtgttcctgctgcagagagtgagcggcgtgggcagagccgacagcaagtgggaggaggccggcaacagattcctgcccctgcccagagacgtgttccaccactgcagctgggccagctag

SEQ ID NO: 98233 - DNA, 1044 bp, synthetic construct
  misc_feature 1..1044: note = Description of Artificial Sequence: Synthetic coding sequence
  source 1..1044: mol_type = other DNA
atggcccagagcagagacggcggcaaccccttcgccgagcccagcgagctggacaaccccttccaggaccccgccgtgatccagcacagacccagcagacagtacgccaccctggacgtgtacaaccccttcgagaccagagagcccccccccgcctacgagccccccgcccccgcccccctgcccccccccagcgcccccagcctgcagcccagcagaaagctgagccccaccgagcccaagaactacggcagctacagcacccaggccagcgccgccgccgccaccgccgagctgctgaagaagcaggaggagctgaacagaaaggccgaggagctggacagaagagagagagagctgcagcacgccgccctgggcggcaccgccaccagacagaacaactggccccccctgcccagcttctgccccgtgcagccctgcttcttccaggacatcagcatggagatcccccaggagttccagaagaccgtgagcaccatgtactacctgtggatgtgcagcaccctggccctgctgctgaacttcctggcctgcctggccagcttctgcgtggagaccaacaacggcgccggcttcggcctgagcatcctgtgggtgctgctgttcaccccctgcagcttcgtgtgctggtacagacccatgtacaaggccttcagaagcgacagcagcttcaacttcttcgtgttcttcttcatcttcttcgtgcaggacgtgctgttcgtgctgcaggccatcggcatccccggctggggcttcagcggctggatcagcgccctggtggtgcccaagggcaacaccgccgtgagcgtgctgatgctgctggtggccctgctgttcaccggcatcgccgtgctgggcatcgtgatgctgaagagaatccacagcctgtacagaagaaccggcgccagcttccagaaggcccagcaggagttcgccgccggcgtgttcagcaaccccgccgtgagaaccgccgccgccaacgccgccgccggcgccgccgagaacgccttcagagccccctag

SEQ ID NO: 98234 - DNA, 966 bp, synthetic construct
  misc_feature 1..966: note = Description of Artificial Sequence: Synthetic coding sequence
  source 1..966: mol_type = other DNA
atggcccagagcagagacggcggcaaccccttcgccgagcccagcgagctggacaaccccttccagcccccccccgcctacgagccccccgcccccgcccccctgcccccccccagcgcccccagcctgcagcccagcagaaagctgagccccaccgagcccaagaactacggcagctacagcacccaggccagcgccgccgccgccaccgccgagctgctgaagaagcaggaggagctgaacagaaaggccgaggagctggacagaagagagagagagctgcagcacgccgccctgggcggcaccgccaccagacagaacaactggccccccctgcccagcttctgccccgtgcagccctgcttcttccaggacatcagcatggagatcccccaggagttccagaagaccgtgagcaccatgtactacctgtggatgtgcagcaccctggccctgctgctgaacttcctggcctgcctggccagcttctgcgtggagaccaacaacggcgccggcttcggcctgagcatcctgtgggtgctgctgttcaccccctgcagcttcgtgtgctggtacagacccatgtacaaggccttcagaagcgacagcagcttcaacttcttcgtgttcttcttcatcttcttcgtgcaggacgtgctgttcgtgctgcaggccatcggcatccccggctggggcttcagcggctggatcagcgccctggtggtgcccaagggcaacaccgccgtgagcgtgctgatgctgctggtggccctgctgttcaccggcatcgccgtgctgggcatcgtgatgctgaagagaatccacagcctgtacagaagaaccggcgccagcttccagaaggcccagcaggagttcgccgccggcgtgttcagcaaccccgccgtgagaaccgccgccgccaacgccgccgccggcgccgccgagaacgccttcagagccccctag

SEQ ID NO: 98235 - DNA, 690 bp, synthetic construct
  misc_feature 1..690: note = Description of Artificial Sequence: Synthetic coding sequence
  source 1..690: mol_type = other DNA
atgagcgagaaggagaacaacttcccccccctgcccaagttcatccccgtgaagccctgcttctaccagaacttcagcgacgagatccccgtggagcaccaggtgctggtgaagagaatctacagactgtggatgttctactgcgccaccctgggcgtgaacctgatcgcctgcctggcctggtggatcggcggcggcagcggcaccaacttcggcctggccttcgtgtggctgctgctgttcaccccctgcggctacgtgtgctggttcagacccgtgtacaaggccttcagagccgacagcagcttcaacttcatggccttcttcttcatcttcggcgcccagttcgtgctgaccgtgatccaggccatcggcttcagcggctggggcgcctgcggctggctgagcgccatcggcttcttccagtacagccccggcgccgccgtggtgatgctgctgcccgccatcatgttcagcgtgagcgccgccatgatggccatcgccatcatgaaggtgcacagaatctacagaggcgccggcggcagcttccagaaggcccagaccgagtggaacaccggcacctggagaaacccccccagcagagaggcccagtacaacaacttcagcggcaacagcctgcccgagtaccccaccgtgcccagctaccccggcagcggccagtggccctag

SEQ ID NO: 98236 - DNA, 588 bp, synthetic construct
  misc_feature 1..588: note = Description of Artificial Sequence: Synthetic coding sequence
  source 1..588: mol_type = other DNA
atgagcgagaaggagaacaacttcccccccctgcccaagttcatccccgtgaagccctgcttctaccagaacttcagcgacgagatccccgtggagcaccaggtgctggtgaagagaatctacagactgtggatgttctactgcgccaccctgggcgtgaacctgatcgcctgcctggcctggtggatcggcggcggcagcggcaccaacttcggcctggccttcgtgtggctgctgctgttcaccccctgcggctacgtgtgctggttcagacccgtgtacaaggccttcagaggctggctgagcgccatcggcttcttccagtacagccccggcgccgccgtggtgatgctgctgcccgccatcatgttcagcgtgagcgccgccatgatggccatcgccatcatgaaggtgcacagaatctacagaggcgccggcggcagcttccagaaggcccagaccgagtggaacaccggcacctggagaaacccccccagcagagaggcccagtacaacaacttcagcggcaacagcctgcccgagtaccccaccgtgcccagctaccccggcagcggccagtggccctag

SEQ ID NO: 98237 - DNA, 588 bp, synthetic construct
  misc_feature 1..588: note = Description of Artificial Sequence: Synthetic coding sequence
  source 1..588: mol_type = other DNA
atgatccagagacacatccccgtgtgcggcagaagcagaccctaccagagaggctgcgtggtgcaggccggcagcagcggcagccccggctggagccacttcaagatcatctgcggcctggcccccgcccccagcgaggccgtgctgagcgccagaaacaactgcgagcacaccggcggctgcagactgcagcccgccctggtgggcgagaccgagatgagcgagaaggagaacaacttcccccccctgcccaagttcatccccgtgaagccctgcttctaccagaacttcagcgacgagatccccgtggagcaccaggtgctggtgaagagaatctacagactgtggatgttctactgcgccaccctgggcgtgaacctgatcgcctgcctggcctggtggatcggcggcggcagcggcaccaacttcggcctggccttcgtgtggctgctgctgttcaccccctgcggctacgtgtgctggttcagacccgtgtacaaggccttcagagccgacagcagcttcaacttcatggccttcttcttcatcttcggcgcccagttcgtgctgaccgtgatccaggcctag

SEQ ID NO: 98238 - DNA, 708 bp, synthetic construct
  misc_feature 1..708: note = Description of Artificial Sequence: Synthetic coding sequence
  source 1..708: mol_type = other DNA
atggccgagaaggtgaacaacttcccccccctgcccaagttcatccccctgaagccctgcttctaccaggacttcgaggccgacatccccccccagcacgtgagcatgaccaagagactgtactacctgtggatgctgaacagcgtgaccctggccgtgaacctggtgggctgcctggcctggctgatcggcggcggcggcgccaccaacttcggcctggccttcctgtggctgatcctgttcaccccctgcagctacgtgtgctggttcagacccatctacaaggccttcaagaccgacagcagcttcagcttcatggccttcttcttcaccttcatggcccagctggtgatcagcatcatccaggccgtgggcatccccggctggggcgtgtgcggctggatcgccaccatcagcttcttcggcaccaacatcggcagcgccgtggtgatgctgatccccaccgtgatgttcaccgtgatggccgtgttcagcttcatcgccctgagcatggtgcacaagttctacagaggcagcggcggcagcttcagcaaggcccaggaggagtggaccaccggcgcctggaagaacccccacgtgcagcaggccgcccagaacgccgccatgggcgccgcccagggcgccatgaaccagccccagacccagtacagcgccacccccaactacacctacagcaacgagatgtag

SEQ ID NO: 98239 - DNA, 708 bp, synthetic construct; identical to SEQ ID NO: 98238
  misc_feature 1..708: note = Description of Artificial Sequence: Synthetic coding sequence
  source 1..708: mol_type = other DNA

SEQ ID NO: 98240 - DNA, 495 bp, synthetic construct
  misc_feature 1..495: note = Description of Artificial Sequence: Synthetic coding sequence
  source 1..495: mol_type = other DNA
atgttcctgcccagactgagaggcagatacagcagccccgcctgccagcacgaccaggcccccctgctgcccctggacgtgaccgacagcagcttcagcttcatggccttcttcttcaccttcatggcccagctggtgatcagcatcatccaggccgtgggcatccccggctggggcgtgtgcggctggatcgccaccatcagcttcttcggcaccaacatcggcagcgccgtggtgatgctgatccccaccgtgatgttcaccgtgatggccgtgttcagcttcatcgccctgagcatggtgcacaagttctacagaggcagcggcggcagcttcagcaaggcccaggaggagtggaccaccggcgcctggaagaacccccacgtgcagcaggccgcccagaacgccgccatgggcgccgcccagggcgccatgaaccagccccagacccagtacagcgccacccccaactacacctacagcaacgagatgtag

SEQ ID NO: 98241 - DNA, 1083 bp, synthetic construct
  misc_feature 1..1083: note = Description of Artificial Sequence: Synthetic coding sequence
  source 1..1083: mol_type = other DNA
atgttcgtggccagaagcatcgccgccgaccacaaggacctgatccacgacgtgagcttcgacttccacggcagaagaatggccacctgcagcagcgaccagagcgtgaaggtgtgggacaagagcgagagcggcgactggcactgcaccgccagctggaagacccacagcggcagcgtgtggagagtgacctgggcccaccccgagttcggccaggtgctggccagctgcagcttcgacagaaccgccgccgtgtgggaggagatcgtgggcgagagcaacgacaagctgagaggccagagccactgggtgaagagaaccaccctggtggacagcagaaccagcgtgaccgacgtgaagttcgcccccaagcacatgggcctgatgctggccacctgcagcgccgacggcatcgtgagaatctacgaggcccccgacgtgatgaacctgagccagtggagcctgcagcacgagatcagctgcaagctgagctgcagctgcatcagctggaaccccagcagcagcagagcccacagccccatgatcgccgtgggcagcgacgacagcagccccaacgccatggccaaggtgcagatcttcgagtacaacgagaacaccagaaagtacgccaaggccgagaccctgatgaccgtgaccgaccccgtgcacgacatcgccttcgcccccaacctgggcagaagcttccacatcctggccatcgccaccaaggacgtgagaatcttcaccctgaagcccgtgagaaaggagctgaccagcagcggcggccccaccaagttcgagatccacatcgtggcccagttcgacaaccacaacagccaggtgtggagagtgagctggaacatcaccggcaccgtgctggccagcagcggcgacgacggctgcgtgagactgtggaaggccaactacatggacaactggaagtgcaccggcatcctgaagggcaacggcagccccgtgaacggcagcagccagcagggcaccagcaaccccagcctgggcagcaccatccccagcctgcagaacagcctgaacggcagcagcgccggcagaaagcacagctag

SEQ ID NO: 98242 - DNA, 1266 bp, synthetic construct
  misc_feature 1..1266: note = Description of Artificial Sequence: Synthetic coding sequence
  source 1..1266: mol_type = other DNA
atgttcgtggccagaagcatcgccgccgaccacaaggacctgatccacgacgtgagcttcgacttccacggcagaagaatggccacctgcagcagcgaccagagcgtgaaggtgtgggacaagagcgagagcggcgactggcactgcaccgccagctggaagacccacagcggcagcgtgtggagagtgacctgggcccaccccgagttcggccaggtgctggccagctgcagcttcgacagaaccgccgccgtgtgggaggagatcgtgggcgagagcaacgacaagctgagaggccagagccactgggtgaagagaaccaccctggtggacagcagaaccagcgtgaccgacgtgaagttcgcccccaagcacatgggcctgatgctggccacctgcagcgccgacggcatcgtgagaatctacgaggcccccgacgtgatgaacctgagccagtggagcctgcagcacgagatcagctgcaagctgagctgcagctgcatcagctggaaccccagcagcagcagagcccacagccccatgatcgccgtgggcagcgacgacagcagccccaacgccatggccaaggtgcagatcttcgagtacaacgagaacaccagaaagtacgccaaggccgagaccctgatgaccgtgaccgaccccgtgcacgacatcgccttcgcccccaacctgggcagaagcttccacatcctggccatcgccaccaaggacgtgagaatcttcaccctgaagcccgtgagaaaggagctgaccagcagcggcggccccaccaagttcgagatccacatcgtggcccagttcgacaaccacaacagccaggtgtggagagtgagctggaacatcaccggcaccgtgctggccagcagcggcgacgacggctgcgtgagactgtggaaggccaactacatggacaactggaagtgcaccggcatcctgaagggcaacggcagccccgtgaacggcagcagccagcagggcaccagcaaccccagcctgggcagcaccatccccagcctgcagaacagcctgaacggcagcagcgccggcagatacttcttcacccccctggacagccccagagccggcagcagatggagcagctacgcccagctgctgccccccccccccccccccctggtggagcacagctgcgacgccgacaccgccaacctgcagtacccccaccccagaagaagatacctgagcagacccctgaaccccctgcccgagaacgagggcatctag

SEQ ID NO: 98243 - DNA, 3075 bp, synthetic construct
  misc_feature 1..3075: note = Description of Artificial Sequence: Synthetic coding sequence
  source 1..3075: mol_type = other DNA
atgcccgccgccagaccccccgccgccggcctgagaggcatcagcctgttcctggccctgctgctgggcagccccgccgccgccctggagagagacgccctgcccgagggcgacgccagccccctgggcccctacctgctgcccagcggcgcccccgagagaggcagccccggcaaggagcaccccgaggagagagtggtgaccgccccccccagcagcagccagagcgccgaggtgctgggcgagctggtgctggacggcaccgcccccagcgcccaccacgacatccccgccctgagccccctgctgcccgaggaggccagacccaagcacgccctgccccccaagaagaagctgcccagcctgaagcaggtgaacagcgccagaaagcagctgagacccaaggccaccagcgccgccaccgtgcagagagccggcagccagcccgccagccagggcctggacctgctgagcagcagcaccgagaagcccggcccccccggcgaccccgaccccatcgtggccagcgaggaggccagcgaggtgcccctgtggctggacagaaaggagagcgccgtgcccaccacccccgcccccctgcagatcagccccttcaccagccagccctacgtggcccacaccctgccccagagacccgagcccggcgagcccggccccgacatggcccaggaggccccccaggaggacaccagccccatggccctgatggacaagggcgagaacgagctgaccggcagcgccagcgaggagagccaggagaccaccaccagcaccatcatcaccaccaccgtgatcaccaccgagcaggcccccgccctgtgcagcgtgagcttcagcaaccccgagggctacatcgacagcagcgactaccccctgctgcccctgaacaacttcctggagtgcacctacaacgtgaccgtgtacaccggctacggcgtggagctgcaggtgaagagcgtgaacctgagcgacggcgagctgctgagcatcagaggcgtggacggccccaccctgaccgtgctggccaaccagaccctgctggtggagggccaggtgatcagaagccccaccaacaccatcagcgtgtacttcagaaccttccaggacgacggcctgggcaccttccagctgcactaccaggccttcatgctgagctgcaacttccccagaagacccgacagcggcgacgtgaccgtgatggacctgcacagcggcggcgtggcccacttccactgccacctgggctacgagctgcagggcgccaagatgctgacctgcatcaacgccagcaagccccactggagcagccaggagcccatctgcagcgccccctgcggcggcgccgtgcacaacgccaccatcggcagagtgctgagccccagctaccccgagaacaccaacggcagccagttctgcatctggaccatcgaggcccccgagggccagaagctgcacctgcacttcgagagactgctgctgcacgacaaggacagaatgaccgtgcacagcggccagaccaacaagagcgccctgctgtacgacagcctgcagaccgagagcgtgcccttcgagggcctgctgagcgagggcaacaccatcagaatcgagttcaccagcgaccaggccagagccgccagcaccttcaacatcagattcgaggccttcgagaagggccactgctacgagccctacatccagaacggcaacttcaccaccagcgaccccacctacaacatcggcaccatcgtggagttcacctgcgaccccggccacagcctggagcagggccccgccatcatcgagtgcatcaacgtgagagacccctactggaacgacaccgagcccctgtgcagagccatgtgcggcggcgagctgagcgccgtggccggcgtggtgctgagccccaactggcccgagccctacgtggagggcgaggactgcatctggaagatccacgtgggcgaggagaagagaatcttcctggacatccagttcctgaacctgagcaacagcgacatcctgaccatctacgacggcgacgaggtgatgccccacatcctgggccagtacctgggcaacagcggcccccagaagctgtacagcagcacccccgacctgaccatccagttccacagcgaccccgccggcctgatcttcggcaagggccagggcttcatcatgaactacatcgaggtgagcagaaacgacagctgcagcgacctgcccgagatccagaacggctggaagaccaccagccacaccgagctggtgagaggcgccagaatcacctaccagtgcgaccccggctacgacatcgtgggcagcgacaccctgacctgccagtgggacctgagctggagcagcgacccccccttctgcgagaagatcatgtactgcaccgaccccggcgaggtggaccacagcaccagactgatcagcgaccccgtgctgctggtgggcaccaccatccagtacacctgcaaccccggcttcgtgctggagggcagcagcctgctgacctgctacagcagagagaccggcacccccatctggaccagcagactgccccactgcgtgagcgaggagagcctggcctgcgacaaccccggcctgcccgagaacggctaccagatcctgtacaagagactgtacctgcccggcgagagcctgaccttcatgtgctacgagggcttcgagctgatgggcgaggtgaccatcagatgcatcctgggccagcccagccactggaacggccccctgcccgtgtgcaaggtgaaccaggacagcttcgagcacgccctggaggtggccgaggccgccgccgagaccagcctggagggcggcaacatggccctggccatcttcatccccgtgctgatcatcagcctgctgctgggcggcgcctacatctacatcaccagatgcagatactacagcaacctgagactgcccctgatgtacagccacccctacagccagatcaccgtggagaccgagttcgacaaccccatctacgagaccggcgagaccagagagtacgaggtgagcatctag

SEQ ID NO: 98244 - DNA, 2847 bp, synthetic construct
  misc_feature 1..2847: note = Description of Artificial Sequence: Synthetic coding sequence
  source 1..2847: mol_type = other DNA
atgcccgccgccagaccccccgccgccggcctgagaggcatcagcctgttcctggccctgctgctgggcagccccgccgccgccctggagagagacgccctgcccgagggcgacgccagccccctgggcccctacctgctgcccagcggcgcccccgagagaggcagccccggcaaggagcaccccgaggagagagtggtgaccgccccccccagcagcagccagagcgccgaggtgctgggcgagctggtgctggacggcaccgcccccagcgcccaccacgacatccccgccctgagccccctgctgcccgaggaggccagacccaagcacgccctgccccccaagaagaagctgcccagcctgaagcaggtgaacagcgccagaaagcagctgagacccaaggccaccagcgccgccaccgtgcagagagccggcagccagcccgccagccagggcctggacctgctgagcagcagcaccgagaagcccggcccccccggcgaccccgaccccatcgtggccagcgaggaggccagcgaggtgcccctgtggctggacagaaaggagagcgccgtgcccaccacccccgcccccctgcagatcagccccttcaccagccagccctacgtggcccacaccctgccccagagacccgagcccggcgagcccggccccgacatggcccaggaggccccccaggaggacaccagccccatggccctgatggacaagggcgagaacgagctgaccggcagcgccagcgaggagagccaggagaccaccaccagcaccatcatcaccaccaccgtgatcaccaccgagcaggcccccgccctgtgcagcgtgagcttcagcaaccccgagggctacatcgacagcagcgactaccccctgctgcccctgaacaacttcctggagtgcacctacaacgtgaccgtgtacaccggctacggcgtggagctgcaggtgaagagcgtgaacctgagcgacggcgagctgctgagcatcagaggcgtggacggccccaccctgaccgtgctggccaaccagaccctgctggtggagggccaggtgatcagaagccccaccaacaccatcagcgtgtacttcagaaccttccaggacgacggcctgggcaccttccagctgcactaccaggccttcatgctgagctgcaacttccccagaagacccgacagcggcgacgtgaccgtgatggacctgcacagcggcggcgtggcccacttccactgccacctgggctacgagctgcagggcgccaagatgctgacctgcatcaacgccagcaagccccactggagcagccaggagcccatctgcagcgccccctgcggcggcgccgtgcacaacgccaccatcggcagagtgctgagccccagctaccccgagaacaccaacggcagccagttctgcatctggaccatcgaggcccccgagggccagaagctgcacctgcacttcgagagactgctgctgcacgacaaggacagaatgaccgtgcacagcggccagaccaacaagagcgccctgctgtacgacagcctgcagaccgagagcgtgcccttcgagggcctgctgagcgagggcaacaccatcagaatcgagttcaccagcgaccaggccagagccgccagcaccttcaacatcagattcgaggccttcgagaagggccactgctacgagccctacatccagaacggcaacttcaccaccagcgaccccacctacaacatcggcaccatcgtggagttcacctgcgaccccggccacagcctggagcagggccccgccatcatcgagtgcatcaacgtgagagacccctactggaacgacaccgagcccctgtgcagagccatgtgcggcggcgagctgagcgccgtggccggcgtggtgctgagccccaactggcccgagccctacgtggagggcgaggactgcatctggaagatccacgtgggcgaggagaagagaatcttcctggacatccagttcctgaacctgagcaacagcgacatcctgaccatctacgacggcgacgaggtgatgccccacatcctgggccagtacctgggcaacagcggcccccagaagctgtacagcagcacccccgacctgaccatccagttccacagcgaccccgccggcctgatcttcggcaagggccagggcttcatcatgaactacatcgaggtgagcagaaacgacagctgcagcgacctgcccgagatccagaacggctggaagaccaccagccacaccgagctggtgagaggcgccagaatcacctaccagtgcgaccccggctacgacatcgtgggcagcgacaccctgacctgccagtgggacctgagctggagcagcgacccccccttctgcgagaagatcatgtactgcaccgaccccggcgaggtggaccacagcaccagactgatcagcgaccccgtgctgctggtgggcaccaccatccagtacacctgcaaccccggcttcgtgctggagggcagcagcctgctgacctgctacagcagagagaccggcacccccatctggaccagcagactgccccactgcgtgctggccgaggccgccgccgagaccagcctggagggcggcaacatggccctggccatcttcatccccgtgctgatcatcagcctgctgctgggcggcgcctacatctacatcaccagatgcagatactacagcaacctgagactgcccctgatgtacagccacccctacagccagatcaccgtggagaccgagttcgacaaccccatctacgagaccggcgagaccagagagtacgaggtgagcatctag

SEQ ID NO: 98245 - DNA, 2850 bp, synthetic construct
  misc_feature 1..2850: note = Description of Artificial Sequence: Synthetic coding sequence
  source 1..2850: mol_type = other DNA
atgcccgccgccagaccccccgccgccggcctgagaggcatcagcctgttcctggccctgctgctgggcagccccgccgccgccctggagagagacgccctgcccgagggcgacgccagccccctgggcccctacctgctgcccagcggcgcccccgagagaggcagccccggcaaggagcaccccgaggagagagtggtgaccgccccccccagcagcagccagagcgccgaggtgctgggcgagctggtgctggacggcaccgcccccagcgcccaccacgacatccccgccctgagccccctgctgcccgaggaggccagacccaagcacgccctgccccccaagaagaagctgcccagcctgaagcaggtgaacagcgccagaaagcagctgagacccaaggccaccagcgccgccaccgtgcagagagccggcagccagcccgccagccagggcctggacctgctgagcagcagcaccgagaagcccggcccccccggcgaccccgaccccatcgtggccagcgaggaggccagcgaggtgcccctgtggctggacagaaaggagagcgccgtgcccaccacccccgcccccctgcagatcagccccttcaccagccagccctacgtggcccacaccctgccccagagacccgagcccggcgagcccggccccgacatggcccaggaggccccccaggaggacaccagccccatggccctgatggacaagggcgagaacgagctgaccggcagcgccagcgaggagagccaggagaccaccaccagcaccatcatcaccaccaccgtgatcaccaccgagcaggcccccgccctgtgcagcgtgagcttcagcaaccccgagggctacatcgacagcagcgactaccccctgctgcccctgaacaacttcctggagtgcacctacaacgtgaccgtgtacaccggctacggcgtggagctgcaggtgaagagcgtgaacctgagcgacggcgagctgctgagcatcagaggcgtggacggccccaccctgaccgtgctggccaaccagaccctgctggtggagggccaggtgatcagaagccccaccaacaccatcagcgtgtacttcagaaccttccaggacgacggcctgggcaccttccagctgcactaccaggccttcatgctgagctgcaacttccccagaagacccgacagcggcgacgtgaccgtgatggacctgcacagcggcggcgtggcccacttccactgccacctgggctacgagctgcagggcgccaagatgctgacctgcatcaacgccagcaagccccactggagcagccaggagcccatctgcagcgccccctgcggcggcgccgtgcacaacgccaccatcggcagagtgctgagccccagctaccccgagaacaccaacggcagccagttctgcatctggaccatcgaggcccccgagggccagaagctgcacctgcacttcgagagactgctgctgcacgacaaggacagaatgaccgtgcacagcggccagaccaacaagagcgccctgctgtacgacagcctgcagaccgagagcgtgcccttcgagggcctgctgagcgagggcaacaccatcagaatcgagttcaccagcgaccaggccagagccgccagcaccttcaacatcagattcgaggccttcgagaagggccactgctacgagccctacatccagaacggcaacttcaccaccagcgaccccacctacaacatcggcaccatcgtggagttcacctgcgaccccggccacagcctggagcagggccccgccatcatcgagtgcatcaacgtgagagacccctactggaacgacaccgagcccctgtgcagagccatgtgcggcggcgagctgagcgccgtggccggcgtggtgctgagccccaactggcccgagccctacgtggagggcgaggactgcatctggaagatccacgtgggcgaggagaagagaatcttcctggacatccagttcctgaacctgagcaacagcgacatcctgaccatctacgacggcgacgaggtgatgccccacatcctgggccagtacctgggcaacagcggcccccagaagctgtacagcagcacccccgacctgaccatccagttccacagcgaccccgccggcctgatcttcggcaagggccagggcttcatcatgaactacatcgaggtgagcagaaacgacagctgcagcgacctgcccgagatccagaacggctggaagaccaccagccacaccgagctggtgagaggcgccagaatcacctaccagtgcgaccccggctacgacatcgtgggcagcgacaccctgacctgccagtgggacctgagctggagcagcgacccccccttctgcgagaagaccgaggagagcctggcctgcgacaaccccggcctgcccgagaacggctaccagatcctgtacaagagactgtacctgcccggcgagagcctgaccttcatgtgctacgagggcttcgagctgatgggcgaggtgaccatcagatgcatcctgggccagcccagccactggaacggccccctgcccgtgtgcaaggtggccgaggccgccgccgagaccagcctggagggcggcaacatggccctggccatcttcatccccgtgctgatcatcagcctgctgctgggcggcgcctacatctacatcaccagatgcagatactacagcaacctgagactgcccctgatgtacagccacccctacagccagatcaccgtggagaccgagttcgacaaccccatctacgagaccggcgagaccagagagtacgaggtgagcatctag

SEQ ID NO: 98246 - DNA, 420 bp, synthetic construct
  misc_feature 1..420: note = Description of Artificial Sequence: Synthetic coding sequence
  source 1..420: mol_type = other DNA
atgtactgcaccgaccccggcgaggtggaccacagcaccagactgatcagcgaccccgtgctgctggtgggcaccaccatccagtacacctgcaaccccggcttcgtgctggagggcagcagcctgctgacctgctacagcagagagaccggcacccccatctggaccagcagactgccccactgcgtgagcgaggagagcctggcctgcgacaaccccggcctgcccgagaacggctaccagatcctgtacaagagactgtacctgcccggcgagagcctgaccttcatgtgctacgagggcttcgagctgatgggcgaggtgaccatcagatgcatcctgggccagcccagccactggaacggccccctgcccgtgtgcaaggacgtggccaccatccccaccagcgcctgcctgtag

SEQ ID NO: 98247 - DNA, 3042 bp, synthetic construct
  misc_feature 1..3042: note = Description of Artificial Sequence: Synthetic coding sequence
  source 1..3042: mol_type = other DNA
atgcccgccgccagaccccccgccgccggcctgagaggcatcagcctgttcctggccctgctgctgggcagccccgccgccgccctggagagagacgccctgcccgagggcgacgccagccccctgggcccctacctgctgcccagcggcgcccccgagagaggcagccccggcaaggagcaccccgaggagagagtggtgaccgccccccccagcagcagccagagcgccgaggtgctgggcgagctggtgctggacggcaccgcccccagcgcccaccacgacatccccgccctgagccccctgctgcccgaggaggccagacccaagcacgccctgccccccaagaagaagctgcccagcctgaagcaggtgaacagcgccagaaagcagctgagacccaaggccaccagcgccgccaccgtgcagagagccggcagccagcccgccagccagggcctggacctgctgagcagcagcaccgagaagcccggcccccccggcgaccccgaccccatcgtggccagcgaggaggccagcgaggtgcccctgtggctggacagaaaggagagcgccgtgcccaccacccccgcccccctgcagatcagccccttcaccagccagccctacgtggcccacaccctgccccagagacccgagcccggcgagcccggccccgacatggcccaggaggccccccaggaggacaccagccccatggccctgatggacaagggcgagaacgagctgaccggcagcgccagcgaggagagccaggagaccaccaccagcaccatcatcaccaccaccgtgatcaccaccgagcaggcccccgccctgtgcagcgtgagcttcagcaaccccgagggctacatcgacagcagcgactaccccctgctgcccctgaacaacttcctggagtgcacctacaacgtgaccgtgtacaccggctacggcgtggagctgcaggtgaagagcgtgaacctgagcgacggcgagctgctgagcatcagaggcgtggacggccccaccctgaccgtgctggccaaccagaccctgctggtggagggccaggtgatcagaagccccaccaacaccatcagcgtgtacttcagaaccttccaggacgacggcctgggcaccttccagctgcactaccaggccttcatgctgagctgcaacttccccagaagacccgacagcggcgacgtgaccgtgatggacctgcacagcggcggcgtggcccacttccactgccacctgggctacgagctgcagggcgccaagatgctgacctgcatcaacgccagcaagccccactggagcagccaggagcccatctgcagcgccccctgcggcggcgccgtgcacaacgccaccatcggcagagtgctgagccccagctaccccgagaacaccaacggcagccagttctgcatctggaccatcgaggcccccgagggccagaagctgcacctgcacttcgagagactgctgctgcacgacaaggacagaatgaccgtgcacagcggccagaccaacaagagcgccctgctgtacgacagcctgcagaccgagagcgtgcccttcgagggcctgctgagcgagggcaacaccatcagaatcgagttcaccagcgaccaggccagagccgccagcaccttcaacatcagattcgaggccttcgagaagggccactgctacgagccctacatccagaacggcaacttcaccaccagcgaccccacctacaacatcggcaccatcgtggagttcacctgcgaccccggccacagcctggagcagggccccgccatcatcgagtgcatcaacgtgagagacccctactggaacgacaccgagcccctgtgcagagccatgtgcggcggcgagctgagcgccgtggccggcgtggtgctgagccccaactggcccgagccctacgtggagggcgaggactgcatctggaagatccacgtgggcgaggagaagagaatcttcctggacatccagttcctgaacctgagcaacagcgacatcctgaccatctacgacggcgacgaggtgatgccccacatcctgggccagtacctgggcaacagcggcccccagaagctgtacagcagcacccccgacctgaccatccagttccacagcgaccccgccggcctgatcttcggcaagggccagggcttcatcatgaactacatcgaggtgagcagaaacgacagctgcagcgacctgcccgagatccagaacggctggaagaccaccagccacaccgagctggtgagaggcgccagaatcacctaccagtgcgaccccggctacgacatcgtgggcagcgacaccctgacctgccagtgggacctgagctggagcagcgacccccccttctgcgagaagatcatgtactgcaccgaccccggcgaggtggaccacagcaccagactgatcagcgaccccgtgctgctggtgggcaccaccatccagtacacctgcaaccccggcttcgtgctggagggcagcagcctgctgacctgctacagcagagagaccggcacccccatctggaccagcagactgccccactgcgtgagcgaggagagcctggcctgcgacaaccccggcctgcccgagaacggctaccagatcctgtacaagagactgtacctgcccggcgagagcctgaccttcatgtgctacgagggcttcgagctgatgggcgaggtgaccatcagatgcatcctgggccagcccagccactggaacggccccctgcccgtgtgcaaggtggccgaggccgccgccgagaccagcctggagggcggcaacatggccctggccatcttcatccccgtgctgatcatcagcctgctgctgggcggcgcctacatctacatcaccagatgcagatactacagcaacctgagactgcccctgatgtacagccacccctacagccagatcaccgtggagaccgagttcgacaaccccatctacgagaccggcgagaccagagagtacgaggtgagcatctag

SEQ ID NO: 98248 - DNA, 3072 bp, synthetic construct
  misc_feature 1..3072: note = Description of Artificial Sequence: Synthetic coding sequence
  source 1..3072: mol_type = other DNA
atgcccgccgccagaccccccgccgccggcctgagaggcatcagcctgttcctggccctgctgctgggcagccccgccgccgccctggagagagacgccctgcccgagggcgacgccagccccctgggcccctacctgctgcccagcggcgcccccgagagaggcagccccggcaaggagcaccccgaggagagagtggtgaccgccccccccagcagcagccagagcgccgaggtgctgggcgagctggtgctggacggcaccgcccccagcgcccaccacgacatccccgccctgagccccctgctgcccgaggaggccagacccaagcacgccctgccccccaagaagaagctgcccagcctgaagcaggtgaacagcgccagaaagcagctgagacccaaggccaccagcgccgccaccgtgcagagagccggcagccagcccgccagccagggcctggacctgctgagcagcagcaccgagaagcccggcccccccggcgaccccgaccccatcgtggccagcgaggaggccagcgaggtgcccctgtggctggacagaaaggagagcgccgtgcccaccacccccgcccccctgcagatcagccccttcaccagccagccctacgtggcccacaccctgccccagagacccgagcccggcgagcccggccccgacatggcccaggaggccccccaggaggacaccagccccatggccctgatggacaagggcgagaacgagctgaccggcagcgccagcgaggagagccaggagaccaccaccagcaccatcatcaccaccaccgtgatcaccaccgagcaggcccccgccctgtgcagcgtgagcttcagcaaccccgagggctacatcgacagcagcgactaccccctgctgcccctgaacaacttcctggagtgcacctacaacgtgaccgtgtacaccggctacggcgtggagctgcaggtgaagagcgtgaacctgagcgacggcgagctgctgagcatcagaggcgtggacggccccaccctgaccgtgctggccaaccagaccctgctggtggagggccaggtgatcagaagccccaccaacaccatcagcgtgtacttcagaaccttccaggacgacggcctgggcaccttccagctgcactaccaggccttcatgctgagctgcaacttccccagaagacccgacagcggcgacgtgaccgtgatggacctgcacagcggcggcgtggcccacttccactgccacctgggctacgagctgcagggcgccaagatgctgacctgcatcaacgccagcaagccccactggagcagccaggagcccatctgcagcgccccctgcggcggcgccgtgcacaacgccaccatcggcagagtgctgagccccagctaccccgagaacaccaacggcagccagttctgcatctggaccatcgaggcccccgagggccagaagctgcacctgcacttcgagagactgctgctgcacgacaaggacagaatgaccgtgcacagcggccagaccaacaagagcgccctgctgtacgacagcctgcagaccgagagcgtgcccttcgagggcctgctgagcgagggcaacaccatcagaatcgagttcaccagcgaccaggccagagccgccagcaccttcaacatcagattcgaggccttcgagaagggccactgctacgagccctacatccagaacggcaacttcaccaccagcgaccccacctacaacatcggcaccatcgtggagttcacctgcgaccccggccacagcctggagcagggccccgccatcatcgagtgcatcaacgtgagagacccctactggaacgacaccgagcccctgtgcagagccatgtgcggcggcgagctgagcgccgtggccggcgtggtgctgagccccaactggcccgagccctacgtggagggcgaggactgcatctggaagatccacgtgggcgaggagaagagaatcttcctggacatccagttcctgaacctgagcaacagcgacatcctgaccatctacgacggcgacgaggtgatgccccacatcctgggccagtacctgggcaacagcggcccccagaagctgtacagcagcacccccgacctgaccatccagttccacagcgaccccgccggcctgatcttcggcaagggccagggcttcatcatgaactacatcgaggtgagcagaaacgacagctgcagcgacctgcccgagatccagaacggctggaagaccaccagccacaccgagctggtgagaggcgccagaatcacctaccagtgcgaccccggctacgacatcgtgggcagcgacaccctgacctgccagtgggacctgagctggagcagcgacccccccttctgcgagaagatcatgtactgcaccgaccccggcgaggtggaccacagcaccagactgatcagcgaccccgtgctgctggtgggcaccaccatccagtacacctgcaaccccggcttcgtgctggagggcagcagcctgctgacctgctacagcagagagaccggcacccccatctggaccagcagactgccccactgcgtgagcgaggagagcctggcctgcgacaaccccggcctgcccgagaacggctaccagatcctgtacaagagactgtacctgcccggcgagagcctgaccttcatgtgctacgagggcttcgagctgatgggcgaggtgaccatcagatgcatcctgggccagcccagccactggaacggccccctgcccgtgtgcaaggtgaaccaggacagcttcgagcacgccctggaggccgaggccgccgccgagaccagcctggagggcggcaacatggccctggccatcttcatccccgtgctgatcatcagcctgctgctgggcggcgcctacatctacatcaccagatgcagatactacagcaacctgagactgcccctgatgtacagccacccctacagccagatcaccgtggagaccgagttcgacaaccccatctacgagaccggcgagaccagagagtacgaggtgagcatctag

SEQ ID NO: 98249 - DNA, 258 bp, synthetic construct
  misc_feature 1..258: note = Description of Artificial Sequence: Synthetic coding sequence
  source 1..258: mol_type = other DNA
ggcttcggcaccgacgtggactacgagaccgccttcatccactacagactggccagcgagcagcagcacagcgcccaggccatgttcaacctgggctacatgcacgagaagggcctgggcatcaagcaggacatccacctggccaagagattctacgacatggccgccagccagcccagatgcaccagcagcagcctgcccagccccctgcagatcggcagaagactgttcctggccgtgcacaccggcaacaagtag

SEQ ID NO: 98250 - DNA, 2385 bp, synthetic construct
  misc_feature 1..2385: note = Description of Artificial Sequence: Synthetic coding sequence
  source 1..2385: mol_type = other DNA
atgagagtgagaatcggcctgaccctgctgctgtgcgccgtgctgctgagcctggccagcgccagcagcgacgaggagggcagccaggacgagagcctggacagcaagaccaccctgaccagcgacgagagcgtgaaggaccacaccaccgccggcagagtggtggccggccagatcttcctggacagcgaggagagcgagctggagagcagcatccaggaggaggaggacagcctgaagagccaggagggcgagagcgtgaccgaggacatcagcttcctggagagccccaaccccgagaacaaggactacgaggagcccaagaaggtgagaaagcccgccctgaccgccatcgagggcaccgcccacggcgagccctgccacttccccttcctgttcctggacaaggagtacgacgagtgcaccagcgacggcagagaggacggcagactgtggtgcgccaccacctacgactacaaggccgacgagaagtggggcttctgcgagaccgaggaggaggccgccaagagaagacagatgcaggaggccgagatgatgtaccagaccggcatgaagatcctgaacggcagcaacaagaagagccagaagagagaggcctacagatacctgcagaaggccgccagcatgaaccacaccaaggccctggagagagtgagctacgccctgctgttcggcgactacctgccccagaacatccaggccgccagagagatgttcgagaagctgaccgaggagggcagccccaagggccagaccgccctgggcttcctgtacgccagcggcctgggcgtgaacagcagccaggccaaggccctggtgtactacaccttcggcgccctgggcggcaacctgatcgcccacatggtgctgggctacagatactgggccggcatcggcgtgctgcagagctgcgagagcgccctgacccactacagactggtggccaaccacgtggccagcgacatcagcctgaccggcggcagcgtggtgcagagaatcagactgcccgacgaggtggagaaccccggcatgaacagcggcatgctggaggaggacctgatccagtactaccagttcctggccgagaagggcgacgtgcaggcccaggtgggcctgggccagctgcacctgcacggcggcagaggcgtggagcagaaccaccagagagccttcgactacttcaacctggccgccaacgccggcaacagccacgccatggccttcctgggcaagatgtacagcgagggcagcgacatcgtgccccagagcaacgagaccgccctgcactacttcaagaaggccgccgacatgggcaaccccgtgggccagagcggcctgggcatggcctacctgtacggcagaggcgtgcaggtgaactacgacctggccctgaagtacttccagaaggccgccgagcagggctgggtggacggccagctgcagctgggcagcatgtactacaacggcatcggcgtgaagagagactacaagcaggccctgaagtacttcaacctggccagccagggcggccacatcctggccttctacaacctggcccagatgcacgccagcggcaccggcgtgatgagaagctgccacaccgccgtggagctgttcaagaacgtgtgcgagagaggcagatggagcgagagactgatgaccgcctacaacagctacaaggacggcgactacaacgccgccgtgatccagtacctgctgctggccgagcagggctacgaggtggcccagagcaacgccgccttcatcctggaccagagagaggccagcatcgtgggcgagaacgagacctaccccagagccctgctgcactggaacagagccgccagccagggctacaccgtggccagaatcaagctgggcgactaccacttctacggcttcggcaccgacgtggactacgagaccgccttcatccactacagactggccagcgagcagcagcacagcgcccaggccatgttcaacctgggctacatgcacgagaagggcctgggcatcaagcaggacatccacctggccaagagattctacgacatggccgccgaggccagccccgacgcccaggtgcccgtgttcctggccctgtgcaagctgggcgtggtgtacttcctgcagtacatcagagagaccaacatcagagacatgttcacccagctggacatggaccagctgctgggccccgagtgggacctgtacctgatgaccatcatcgccctgctgctgggcaccgtgatcgcctacagacagagacagcaccaggacatgcccgcccccagaccccccggccccagacccgcccccccccagcaggagggcccccccgagcagcagcccccccagtag

SEQ ID NO: 98251 - DNA, 906 bp, synthetic construct
  misc_feature 1..906: note = Description of Artificial Sequence: Synthetic coding sequence
  source 1..906: mol_type = other DNA
atgagagtgagaatcggcctgaccctgctgctgtgcgccgtgctgctgagcctggccagcgccagcagcgacgaggagggcagccaggacgagagcctggacagcaagaccaccctgaccagcgacgagagcgtgaaggaccacaccaccgccggcagagtggtggccggccagatcttcctggacagcgaggagagcgagctggagagcagcatccaggaggaggaggacagcctgaagagccaggagggcgagagcgtgaccgaggacatcagcttcctggagagccccaaccccgagaacaaggactacgaggagcccaagaaggtgagaaagcccgccctgaccgccatcgagggcaccgcccacggcgagccctgccacttccccttcctgttcctggacaaggagtacgacgagtgcaccagcgacggcagagaggacggcagactgtggtgcgccaccacctacgactacaaggccgacgagaagtggggcttctgcgagaccgaggaggaggccgccaagagaagacagatgcaggaggccgagatgatgtaccagaccggcatgaagatcctgaacggcagcaacaagaagagccagaagagagaggcctacagatacctgcagaaggccgccagcatgaaccacaccaaggccctggagagagtgagctacgccctgctgttcggcgactacctgccccagaacatccaggccgccagagagatgttcgagaagctgaccgaggagggcagccccaagggccagaccgccctgggcttcctgtacgccagcggcctgggcgtgaacagcagccaggccaaggccctggtgtactacaccttcggcgccctgggcggcaacctgatcgcccacatggtgctggtgagcagactgtag

SEQ ID NO: 98252 - DNA, 2067 bp, synthetic construct
  misc_feature 1..2067: note = Description of Artificial Sequence: Synthetic coding sequence
  source 1..2067: mol_type = other DNA
atgaagcccctgagcctgctgatcgagatcctgatcatcctgggcgtgaccatcaagaccatcaaggccgaggagcacaacaagagacagaaggagagaaacgtgaccacccaggtgagcgtgaacgagatcaagcagtacctgagccacatcctggagcagagaaccagcagcaacgtgatcaacaagagagagaacctgctggagaagaagaagaaccagagaaagatcagaatcaagggcatccagaacaaggacatcctgaagagaaacaagaaccacctgcagaagcaggccgagaagaacttcaccgacgagggcgaccagctgttcaagatgggcatcaaggtgctgcagcagagcaagagccagaagcagaaggaggaggcctacctgctgttcgccaaggccgccgacatgggcaacctgaaggccatggagaagatggccgacgccctgctgttcggcaacttcggcgtgcagaacatcaccgccgccatccagctgtacgagagcctggccaaggagggcagctgcaaggcccagaacgccctgggcttcctgagcagctacggcatcggcatggagtacgaccaggccaaggccctgatctactacaccttcggcagcgccggcggcaacatgatgagccagatgatcctgggctacagatacctgagcggcatcaacgtgctgcagaactgcgaggtggccctgagctactacaagaaggtggccgactacatcgccgacaccttcgagaagagcgagggcgtgcccgtggagaaggtgagactgaccgagagacccgagaacctgagcagcaacagcgagatcctggactgggacatctaccagtactacaagttcctggccgagagaggcgacgtgcagatccaggtgagcctgggccagctgcacctgatcggcagaaagggcctggaccaggactactacaaggccctgcactacttcctgaaggccgccaaggccggcagcgccaacgccatggccttcatcggcaagatgtacctggagggcaacgccgccgtgccccagaacaacgccaccgccttcaagtacttcagcatggccgccagcaagggcaacgccatcggcctgcacggcctgggcctgctgtacttccacggcaagggcgtgcccctgaactacgccgaggccctgaagtacttccagaaggccgccgagaagggctggcccgacgcccagttccagctgggcttcatgtactacagcggcagcggcatctggaaggactacaagctggccttcaagtacttctacctggccagccagagcggccagcccctggccatctactacctggccaagatgtacgccaccggcaccggcgtggtgagaagctgcagaaccgccgtggagctgtacaagggcgtgtgcgagctgggccactgggccgagaagttcctgaccgcctacttcgcctacaaggacggcgacatcgacagcagcctggtgcagtacgccctgctggccgagatgggctacgaggtggcccagagcaacagcgccttcatcctggagagcaagaaggccaacatcctggagaaggagaagatgtaccccatggccctgctgctgtggaacagagccgccatccagggcaacgccttcgccagagtgaagatcggcgactaccactactacggctacggcaccaagaaggactaccagaccgccgccacccactacagcatcgccgccaacaagtaccacaacgcccaggccatgttcaacctggcctacatgtacgagcacggcctgggcatcaccaaggacatccacctggccagaagactgtacgacatggccgcccagaccagccccgacgcccacatccccgtgctgttcgccgtgatgaagctggagaccacccacctgctgagagacatcctgttcttcaacttcaccaccagatggaactggctgaagctggacaacaccatcggcccccactgggacctgttcgtgatcggcctgatcgtgcccggcctgatcctgctgctgagaaaccaccacggctag

SEQ ID NO: 98253 - DNA, 1728 bp, synthetic construct
  misc_feature 1..1728: note = Description of Artificial Sequence: Synthetic coding sequence
  source 1..1728: mol_type = other DNA
atgaagcccctgagcctgctgatcgagatcctgatcatcctgggcgtgaccatcaagaccatcaaggccgaggagcacaacaagagacagaaggagagaaacgtgaccacccaggtgagcgtgaacgagatcaagcagtacctgagccacatcctggagcagagaaccagcagcaacgtgatcaacaagagagagaacctgctggagaagaagaagaaccagagaaagatcagaatcaagggcatccagaacaaggacatcctgaagagaaacaagaaccacctgcagaagcaggccgagaagaacttcaccgacgagggcgaccagctgttcaagatgggcatcaaggtgctgcagcagagcaagagccagaagcagaaggaggaggcctacctgctgttcgccaaggccgccgacatgggcaacctgaaggccatggagaagatggccgacgccctgctgttcggcaacttcggcgtgcagaacatcaccgccgccatccagctgtacgagagcctggccaaggagggcagctgcaaggcccagaacgccctgggcttcctgagcagctacggcatcggcatggagtacgaccaggccaaggccctgatctactacaccttcggcagcgccggcggcaacatgatgagccagatgatcctgggctacagatacctgagcggcatcaacgtgctgcagaactgcgaggtggccctgagctactacaagaaggtggccgactacatcgccgacaccttcgagaagagcgagggcgtgcccgtggagaaggtgagactgaccgagagacccgagaacctgagcagcaacagcgagatcctggactgggacatctaccagtactacaagttcctggccgagagaggcgacgtgcagatccaggtgagcctgggccagctgcacctgatcggcagaaagggcctggaccaggactactacaaggccctgcactacttcctgaaggccgccaaggccggcagcgccaacgccatggccttcatcggcaagatgtacctggagggcaacgccgccgtgccccagaacaacgccaccgccttcaagtacttcagcatggccgccagcaagggcaacgccatcggcctgcacggcctgggcctgctgtacttccacggcaagggcgtgcccctgaactacgccgaggccctgaagtacttccagaaggccgccgagaagggctggcccgacgcccagttccagctgggcttcatgtactacagcggcagcggcatctggaaggactacaagctggccttcaagtacttctacctggccagccagagcggccagcccctggccatctactacctggccaagatgtacgccaccggcaccggcgtggtgagaagctgcagaaccgccgtggagaagagactgaccttcctgaagaagagaagatgcatccagtggagattcagctacggcatcgagctgcccttcaaggacatccacctggccagaagactgtacgacatggccgcccagaccagccccgacgcccacatccccgtgctgttcgccgtgatgaagctggagaccacccacctgctgagagacatcctgttcttcaacttcaccaccagatggaactggctgaagctggacaacaccatcggcccccactgggacctgttcgtgatcggcctgatcgtgcccggcctgatcctgctgctgagaaaccaccacggctag

SEQ ID NO: 98254 - DNA, 1833 bp, synthetic construct
  misc_feature 1..1833: note = Description of Artificial Sequence: Synthetic coding sequence
  source 1..1833: mol_type = other DNA
atgatcgccagccagttcctgagcgccctgaccctggtgctgctgatcaaggagagcggcgcctggagctacaacaccagcaccgaggccatgacctacgacgaggccagcgcctactgccagcagagatacacccacctggtggccatccagaacaaggaggagatcgagtacctgaacagcatcctgagctacagccccagctactactggatcggcatcagaaaggtgaacaacgtgtgggtgtgggtgggcacccagaagcccctgaccgaggaggccaagaactgggcccccggcgagcccaacaacagacagaaggacgaggactgcgtggagatctacatcaagagagagaaggacgtgggcatgtggaacgacgagagatgcagcaagaagaagctggccctgtgctacaccgccgcctgcaccaacaccagctgcagcggccacggcgagtgcgtggagaccatcaacaactacacctgcaagtgcgaccccggcttcagcggcctgaagtgcgagcagatcgtgaactgcaccgccctggagagccccgagcacggcagcctggtgtgcagccaccccctgggcaacttcagctacaacagcagctgcagcatcagctgcgacagaggctacctgcccagcagcatggagaccatgcagtgcatgagcagcggcgagtggagcgcccccatccccgcctgcaacgtggtggagtgcgacgccgtgaccaaccccgccaacggcttcgtggagtgcttccagaaccccggcagcttcccctggaacaccacctgcaccttcgactgcgaggagggcttcgagctgatgggcgcccagagcctgcagtgcaccagcagcggcaactgggacaacgagaagcccacctgcaaggccgtgacctgcagagccgtgagacagccccagaacggcagcgtgagatgcagccacagccccgccggcgagttcaccttcaagagcagctgcaacttcacctgcgaggagggcttcatgctgcagggccccgcccaggtggagtgcaccacccagggccagtggacccagcagatccccgtgtgcgaggccttccagtgcaccgccctgagcaaccccgagagaggctacatgaactgcctgcccagcgccagcggcagcttcagatacggcagcagctgcgagttcagctgcgagcagggcttcgtgctgaagggcagcaagagactgcagtgcggccccaccggcgagtgggacaacgagaagcccacctgcgaggccgtgagatgcgacgccgtgcaccagccccccaagggcctggtgagatgcgcccacagccccatcggcgagttcacctacaagagcagctgcgccttcagctgcgaggagggcttcgagctgcacggcagcacccagctggagtgcaccagccagggccagtggaccgaggaggtgcccagctgccaggtggtgaagtgcagcagcctggccgtgcccggcaagatcaacatgagctgcagcggcgagcccgtgttcggcaccgtgtgcaagttcgcctgccccgagggctggaccctgaacggcagcgccgccagaacctgcggcgccaccggccactggagcggcctgctgcccacctgcgaggcccccaccgagagcaacatccccctggtggccggcctgagcgccgccggcctgagcctgctgaccctggcccccttcctgctgtggctgagaaagtgcctgagaaaggccaagaagttcgtgcccgccagcagctgccagagcctggagagcgacggcagctaccagaagcccagctacatcctgtag

SEQ ID NO: 98255 - DNA, 1455 bp, synthetic construct
  misc_feature 1..1455: note = Description of Artificial Sequence: Synthetic coding sequence
  source 1..1455: mol_type = other DNA
atgatcgccagccagttcctgagcgccctgaccctggtgctgctgatcaaggagagcggcgcctggagctacaacaccagcaccgaggccatgacctacgacgaggccagcgcctactgccagcagagatacacccacctggtggccatccagaacaaggaggagatcgagtacctgaacagcatcctgagctacagccccagctactactggatcggcatcagaaaggtgaacaacgtgtgggtgtgggtgggcacccagaagcccctgaccgaggaggccaagaactgggcccccggcgagcccaacaacagacagaaggacgaggactgcgtggagatctacatcaagagagagaaggacgtgggcatgtggaacgacgagagatgcagcaagaagaagctggccctgtgctacaccgccgcctgcaccaacaccagctgcagcggccacggcgagtgcgtggagaccatcaacaactacacctgcaagtgcgaccccggcttcagcggcctgaagtgcgagcagatcgtgaactgcaccgccctggagagccccgagcacggcagcctggtgtgcagccaccccctgggcaacttcagctacaacagcagctgcagcatcagctgcgacagaggctacctgcccagcagcatggagaccatgcagtgcatgagcagcggcgagtggagcgcccccatccccgcctgcaacgtggtggagtgcgacgccgtgaccaaccccgccaacggcttcgtggagtgcttccagaaccccggcagcttcccctggaacaccacctgcaccttcgactgcgaggagggcttcgagctgatgggcgcccagagcctgcagtgcaccagcagcggcaactgggacaacgagaagcccacctgcaaggccgtgacctgcagagccgtgagacagccccagaacggcagcgtgagatgcagccacagccccgccggcgagttcaccttcaagagcagctgcaacttcacctgcgaggagggcttcatgctgcagggccccgcccaggtggagtgcaccacccagggccagtggacccagcagatccccgtgtgcgaggtggtgaagtgcagcagcctggccgtgcccggcaagatcaacatgagctgcagcggcgagcccgtgttcggcaccgtgtgcaagttcgcctgccccgagggctggaccctgaacggcagcgccgccagaacctgcggcgccaccggccactggagcggcctgctgcccacctgcgaggcccccaccgagagcaacatccccctggtggccggcctgagcgccgccggcctgagcctgctgaccctggcccccttcctgctgtggctgagaaagtgcctgagaaaggccaagaagttcgtgcccgccagcagctgccagagcctggagagcgacggcagctaccagaagcccagctacatcctgtag

SEQ ID NO: 98256 - DNA, 1458 bp, synthetic construct
  misc_feature 1..1458: note = Description of Artificial Sequence: Synthetic coding sequence
  source 1..1458: mol_type = other DNA
atgatcgccagccagttcctgagcgccctgaccctggtgctgctgatcaaggagagcggcgcctggagctacaacaccagcaccgaggccatgacctacgacgaggccagcgcctactgccagcagagatacacccacctggtggccatccagaacaaggaggagatcgagtacctgaacagcatcctgagctacagccccagctactactggatcggcatcagaaaggtgaacaacgtgtgggtgtgggtgggcacccagaagcccctgaccgaggaggccaagaactgggcccccggcgagcccaacaacagacagaaggacgaggactgcgtggagatctacatcaagagagagaaggacgtgggcatgtggaacgacgagagatgcagcaagaagaagctggccctgtgctacaccgccgcctgcaccaacaccagctgcagcggccacggcgagtgcgtggagaccatcaacaactacacctgcaagtgcgaccccggcttcagcggcctgaagtgcgagcagatggtggagtgcgacgccgtgaccaaccccgccaacggcttcgtggagtgcttccagaaccccggcagcttcccctggaacaccacctgcaccttcgactgcgaggagggcttcgagctgatgggcgcccagagcctgcagtgcaccagcagcggcaactgggacaacgagaagcccacctgcaaggccgtgacctgcagagccgtgagacagccccagaacggcagcgtgagatgcagccacagccccgccggcgagttcaccttcaagagcagctgcaacttcacctgcgaggagggcttcatgctgcagggccccgcccaggtggagtgcaccacccagggccagtggacccagcagatccccgtgtgcgaggccgtgagatgcgacgccgtgcaccagccccccaagggcctggtgagatgcgcccacagccccatcggcgagttcacctacaagagcagctgcgccttcagctgcgaggagggcttcgagctgcacggcagcacccagctggagtgcaccagccagggccagtggaccgaggaggtgcccagctgccaggtggtgaagtgcagcagcctggccgtgcccggcaagatcaacatgagctgcagcggcgagcccgtgttcggcaccgtgtgcaagttcgcctgccccgagggctggaccctgaacggcagcgccgccagaacctgcggcgccaccggccactggagcggcctgctgcccacctgcgaggcccccaccgagagcaacatccccctggtggccggcctgagcgccgccggcctgagcctgctgaccctggcccccttcctgctgtggctgagaaagtgcctgagaaaggccaagaagttcgtgcccgccagcagctgccagagcctggagagcgacggcagctaccagaagcccagctacatcctgtag

SEQ ID NO: 98257 - DNA, 1644 bp, synthetic construct
  misc_feature 1..1644: note = Description of Artificial Sequence: Synthetic coding sequence
  source 1..1644: mol_type = other DNA
atgatcgccagccagttcctgagcgccctgaccctggtgctgctgatcaaggagagcggcgcctggagctacaacaccagcaccgaggccatgacctacgacgaggccagcgcctactgccagcagagatacacccacctggtggccatccagaacaaggaggagatcgagtacctgaacagcatcctgagctacagccccagctactactggatcggcatcagaaaggtgaacaacgtgtgggtgtgggtgggcacccagaagcccctgaccgaggaggccaagaactgggcccccggcgagcccaacaacagacagaaggacgaggactgcgtggagatctacatcaagagagagaaggacgtgggcatgtggaacgacgagagatgcagcaagaagaagctggccctgtgctacaccgccgcctgcaccaacaccagctgcagcggccacggcgagtgcgtggagaccatcaacaactacacctgcaagtgcgaccccggcttcagcggcctgaagtgcgagcagatcgtgaactgcaccgccctggagagccccgagcacggcagcctggtgtgcagccaccccctgggcaacttcagctacaacagcagctgcagcatcagctgcgacagaggctacctgcccagcagcatggagaccatgcagtgcatgagcagcggcgagtggagcgcccccatccccgcctgcaacgtggtggagtgcgacgccgtgaccaaccccgccaacggcttcgtggagtgcttccagaaccccggcagcttcccctggaacaccacctgcaccttcgactgcgaggagggcttcgagctgatgggcgcccagagcctgcagtgcaccagcagcggcaactgggacaacgagaagcccacctgcaaggccgtgacctgcagagccgtgagacagccccagaacggcagcgtgagatgcagccacagccccgccggcgagttcaccttcaagagcagctgcaacttcacctgcgaggagggcttcatgctgcagggccccgcccaggtggagtgcaccacccagggccagtggacccagcagatccccgtgtgcgaggccgtgagatgcgacgccgtgcaccagccccccaagggcctggtgagatgcgcccacagccccatcggcgagttcacctacaagagcagctgcgccttcagctgcgaggagggcttcgagctgcacggcagcacccagctggagtgcaccagccagggccagtggaccgaggaggtgcccagctgccaggtggtgaagtgcagcagcctggccgtgcccggcaagatcaacatgagctgcagcggcgagcccgtgttcggcaccgtgtgcaagttcgcctgccccgagggctggaccctgaacggcagcgccgccagaacctgcggcgccaccggccactggagcggcctgctgcccacctgcgaggcccccaccgagagcaacatccccctggtggccggcctgagcgccgccggcctgagcctgctgaccctggcccccttcctgctgtggctgagaaagtgcctgagaaaggccaagaagttcgtgcccgccagcagctgccagagcctggagagcgacggcagctaccagaagcccagctacatcctgtag

SEQ ID NO: 98258 - DNA, 1644 bp, synthetic construct
  misc_feature 1..1644: note = Description of Artificial Sequence: Synthetic coding sequence
  source 1..1644: mol_type = other DNA
atgatcgccagccagttcctgagcgccctgaccctggtgctgctgatcaaggagagcggcgcctggagctacaacaccagcaccgaggccatgacctacgacgaggccagcgcctactgccagcagagatacacccacctggtggccatccagaacaaggaggagatcgagtacctgaacagcatcctgagctacagccccagctactactggatcggcatcagaaaggtgaacaacgtgtgggtgtgggtgggcacccagaagcccctgaccgaggaggccaagaactgggcccccggcgagcccaacaacagacagaaggacgaggactgcgtggagatctacatcaagagagagaaggacgtgggcatgtggaacgacgagagatgcagcaagaagaagctggccctgtgctacaccgccgcctgcaccaacaccagctgcagcggccacggcgagtgcgtggagaccatcaacaactacacctgcaagtgcgaccccggcttcagcggcctgaagtgcgagcagatcgtgaactgcaccgccctggagagccccgagcacggcagcctggtgtgcagccaccccctgggcaacttcagctacaacagcagctgcagcatcagctgcgacagaggctacctgcccagcagcatggagaccatgcagtgcatgagcagcggcgagtggagcgcccccatccccgcctgcaacgtggtggagtgcgacgccgtgaccaaccccgccaacggcttcgtggagtgcttccagaaccccggcagcttcccctggaacaccacctgcaccttcgactgcgaggagggcttcgagctgatgggcgcccagagcctgcagtgcaccagcagcggcaactgggacaacgagaagcccacctgcaaggccgtgacctgcagagccgtgagacagccccagaacggcagcgtgagatgcagccacagccccgccggcgagttcaccttcaagagcagctgcaacttcacctgcgaggagggcttcatgctgcagggccccgcccaggtggagtgcaccacccagggccagtggacccagcagatccccgtgtgcgaggccttccagtgcaccgccctgagcaaccccgagagaggctacatgaactgcctgcccagcgccagcggcagcttcagatacggcagcagctgcgagttcagctgcgagcagggcttcgtgctgaagggcagcaagagactgcagtgcggccccaccggcgagtgggacaacgagaagcccacctgcgaggtggtgaagtgcagcagcctggccgtgcccggcaagatcaacatgagctgcagcggcgagcccgtgttcggcaccgtgtgcaagttcgcctgccccgagggctggaccctgaacggcagcgccgccagaacctgcggcgccaccggccactggagcggcctgctgcccacctgcgaggcccccaccgagagcaacatccccctggtggccggcctgagcgccgccggcctgagcctgctgaccctggcccccttcctgctgtggctgagaaagtgcctgagaaaggccaagaagttcgtgcccgccagcagctgccagagcctggagagcgacggcagctaccagaagcccagctacatcctgtag

SEQ ID NO: 98259 - DNA, 1455 bp, synthetic construct; identical to SEQ ID NO: 98255
  misc_feature 1..1455: note = Description of Artificial Sequence: Synthetic coding sequence
  source 1..1455: mol_type = other DNA

SEQ ID NO: 98260 - DNA, 1458 bp, synthetic construct; identical to SEQ ID NO: 98256
  misc_feature 1..1458: note = Description of Artificial Sequence: Synthetic coding sequence
  source 1..1458: mol_type = other DNA

SEQ ID NO: 98261 - DNA, 1644 bp, synthetic construct; identical to SEQ ID NO: 98257
  misc_feature 1..1644: note = Description of Artificial Sequence: Synthetic coding sequence
  source 1..1644: mol_type = other DNA

SEQ ID NO: 98262 - DNA, 1644 bp, synthetic construct; identical to SEQ ID NO: 98258
  misc_feature 1..1644: note = Description of Artificial Sequence: Synthetic coding sequence
  source 1..1644: mol_type = other DNA

SEQ ID NO: 98263 - DNA, 1158 bp, synthetic construct
  misc_feature 1..1158: note = Description of Artificial Sequence: Synthetic coding sequence
  source 1..1158: mol_type = other DNA
atgggctgcagaagaaccagagagggccccagcaaggccatgatcttcccctggaagtgccagagcacccagagagacctgtggaacatcttcaagctgtggggctggaccatgctgtgctgcgacttcctggcccaccacggcaccgactgctggacctaccactacagcgagaagcccatgaactggcagagagccagaagattctgcagagacaactacaccgacctggtggccatccagaacaaggccgagatcgagtacctggagaagaccctgcccttcagcagaagctactactggatcggcatcagaaagatcggcggcatctggacctgggtgggcaccaacaagagcctgaccgaggaggccgagaactggggcgacggcgagcccaacaacaagaagaacaaggaggactgcgtggagatctacatcaagagaaacaaggacgccggcaagtggaacgacgacgcctgccacaagctgaaggccgccctgtgctacaccgccagctgccagccctggagctgcagcggccacggcgagtgcgtggagatcatcaacaactacacctgcaactgcgacgtgggctactacggcccccagtgccagttcgtgatccagtgcgagcccctggaggcccccgagctgggcaccatggactgcacccaccccctgggcaacttcagcttcagcagccagtgcgccttcagctgcagcgagggcaccaacctgaccggcatcgaggagaccacctgcggccccttcggcaactggagcagccccgagcccacctgccaggtgatccagtgcgagcccctgagcgcccccgacctgggcatcatgaactgcagccaccccctggccagcttcagcttcaccagcgcctgcaccttcatctgcagcgagggcaccgagctgatcggcaagaagaagaccatctgcgagagcagcggcatctggagcaaccccagccccatctgccagaagctggacaagagcttcagcatgatcaaggagggcgactacaaccccctgttcatccccgtggccgtgatggtgaccgccttcagcggcctggccttcatcatctggctggccagaagactgaagaagggcaagaagagcaagagaagcatgaacgacccctactag

SEQ ID NO: 98264 - DNA, 2493 bp, synthetic construct
  misc_feature 1..2493: note = Description of Artificial Sequence: Synthetic coding sequence
  source 1..2493: mol_type = other DNA
atggccaactgccagatcgccatcctgtaccagagattccagagagtggtgttcggcatcagccagctgctgtgcttcagcgccctgatcagcgagctgaccaaccagaaggaggtggccgcctggacctaccactacagcaccaaggcctacagctggaacatcagcagaaagtactgccagaacagatacaccgacctggtggccatccagaacaagaacgagatcgactacctgaacaaggtgctgccctactacagcagctactactggatcggcatcagaaagaacaacaagacctggacctgggtgggcaccaagaaggccctgaccaacgaggccgagaactgggccgacaacgagcccaacaacaagagaaacaacgaggactgcgtggagatctacatcaagagccccagcgcccccggcaagtggaacgacgagcactgcctgaagaagaagcacgccctgtgctacaccgccagctgccaggacatgagctgcagcaagcagggcgagtgcctggagaccatcggcaactacacctgcagctgctaccccggcttctacggccccgagtgcgagtacgtgagagagtgcggcgagctggagctgccccagcacgtgctgatgaactgcagccaccccctgggcaacttcagcttcaacagccagtgcagcttccactgcaccgacggctaccaggtgaacggccccagcaagctggagtgcctggccagcggcatctggaccaacaagcccccccagtgcctggccgcccagtgcccccccctgaagatccccgagagaggcaacatgacctgcctgcacagcgccaaggccttccagcaccagagcagctgcagcttcagctgcgaggagggcttcgccctggtgggccccgaggtggtgcagtgcaccgccagcggcgtgtggaccgcccccgcccccgtgtgcaaggccgtgcagtgccagcacctggaggcccccagcgagggcaccatggactgcgtgcaccccctgaccgccttcgcctacggcagcagctgcaagttcgagtgccagcccggctacagagtgagaggcctggacatgctgagatgcatcgacagcggccactggagcgcccccctgcccacctgcgaggccatcagctgcgagcccctggagagccccgtgcacggcagcatggactgcagccccagcctgagagccttccagtacgacaccaactgcagcttcagatgcgccgagggcttcatgctgagaggcgccgacatcgtgagatgcgacaacctgggccagtggaccgcccccgcccccgtgtgccaggccctgcagtgccaggacctgcccgtgcccaacgaggccagagtgaactgcagccaccccttcggcgccttcagataccagagcgtgtgcagcttcacctgcaacgagggcctgctgctggtgggcgccagcgtgctgcagtgcctggccaccggcaactggaacagcgtgccccccgagtgccaggccatcccctgcacccccctgctgagcccccagaacggcaccatgacctgcgtgcagcccctgggcagcagcagctacaagagcacctgccagttcatctgcgacgagggctacagcctgagcggccccgagagactggactgcaccagaagcggcagatggaccgacagcccccccatgtgcgaggccatcaagtgccccgagctgttcgcccccgagcagggcagcctggactgcagcgacaccagaggcgagttcaacgtgggcagcacctgccacttcagctgcgacaacggcttcaagctggagggccccaacaacgtggagtgcaccaccagcggcagatggagcgccaccccccccacctgcaagggcatcgccagcctgcccacccccggcgtgcagtgccccgccctgaccacccccggccagggcaccatgtactgcagacaccaccccggcaccttcggcttcaacaccacctgctacttcggctgcaacgccggcttcaccctgatcggcgacagcaccctgagctgcagacccagcggccagtggaccgccgtgacccccgcctgcagagccgtgaagtgcagcgagctgcacgtgaacaagcccatcgccatgaactgcagcaacctgtggggcaacttcagctacggcagcatctgcagcttccactgcctggagggccagctgctgaacggcagcgcccagaccgcctgccaggagaacggccactggagcaccaccgtgcccacctgccaggccggccccctgaccatccaggaggccctgacctacttcggcggcgccgtggccagcaccatcggcctgatcatgggcggcaccctgctggccctgctgagaaagagattcagacagaaggacgacggcaagtgccccctgaacccccacagccacctgggcacctacggcgtgttcaccaacgccgccttcgaccccagcccctag

SEQ ID NO: 98265 - DNA, 2307 bp, synthetic construct
  misc_feature 1..2307: note = Description of Artificial Sequence: Synthetic coding sequence
  source 1..2307: mol_type = other DNA
atggccaactgccagatcgccatcctgtaccagagattccagagagtggtgttcggcatcagccagctgctgtgcttcagcgccctgatcagcgagctgaccaaccagaaggaggtggccgcctggacctaccactacagcaccaaggcctacagctggaacatcagcagaaagtactgccagaacagatacaccgacctggtggccatccagaacaagaacgagatcgactacctgaacaaggtgctgccctactacagcagctactactggatcggcatcagaaagaacaacaagacctggacctgggtgggcaccaagaaggccctgaccaacgaggccgagaactgggccgacaacgagcccaacaacaagagaaacaacgaggactgcgtggagatctacatcaagagccccagcgcccccggcaagtggaacgacgagcactgcctgaagaagaagcacgccctgtgctacaccgccagctgccaggacatgagctgcagcaagcagggcgagtgcctggagaccatcggcaactacacctgcagctgctaccccggcttctacggccccgagtgcgagtacgtgagagagtgcggcgagctggagctgccccagcacgtgctgatgaactgcagccaccccctgggcaacttcagcttcaacagccagtgcagcttccactgcaccgacggctaccaggtgaacggccccagcaagctggagtgcctggccagcggcatctggaccaacaagcccccccagtgcctggccgcccagtgcccccccctgaagatccccgagagaggcaacatgacctgcctgcacagcgccaaggccttccagcaccagagcagctgcagcttcagctgcgaggagggcttcgccctggtgggccccgaggtggtgcagtgcaccgccagcggcgtgtggaccgcccccgcccccgtgtgcaaggccatcagctgcgagcccctggagagccccgtgcacggcagcatggactgcagccccagcctgagagccttccagtacgacaccaactgcagcttcagatgcgccgagggcttcatgctgagaggcgccgacatcgtgagatgcgacaacctgggccagtggaccgcccccgcccccgtgtgccaggccctgcagtgccaggacctgcccgtgcccaacgaggccagagtgaactgcagccaccccttcggcgccttcagataccagagcgtgtgcagcttcacctgcaacgagggcctgctgctggtgggcgccagcgtgctgcagtgcctggccaccggcaactggaacagcgtgccccccgagtgccaggccatcccctgcacccccctgctgagcccccagaacggcaccatgacctgcgtgcagcccctgggcagcagcagctacaagagcacctgccagttcatctgcgacgagggctacagcctgagcggccccgagagactggactgcaccagaagcggcagatggaccgacagcccccccatgtgcgaggccatcaagtgccccgagctgttcgcccccgagcagggcagcctggactgcagcgacaccagaggcgagttcaacgtgggcagcacctgccacttcagctgcgacaacggcttcaagctggagggccccaacaacgtggagtgcaccaccagcggcagatggagcgccaccccccccacctgcaagggcatcgccagcctgcccacccccggcgtgcagtgccccgccctgaccacccccggccagggcaccatgtactgcagacaccaccccggcaccttcggcttcaacaccacctgctacttcggctgcaacgccggcttcaccctgatcggcgacagcaccctgagctgcagacccagcggccagtggaccgccgtgacccccgcctgcagagccgtgaagtgcagcgagctgcacgtgaacaagcccatcgccatgaactgcagcaacctgtggggcaacttcagctacggcagcatctgcagcttccactgcctggagggccagctgctgaacggcagcgcccagaccgcctgccaggagaacggccactggagcaccaccgtgcccacctgccaggccggccccctgaccatccaggaggccctgacctacttcggcggcgccgtggccagcaccatcggcctgatcatgggcggcaccctgctggccctgctgagaaagagattcagacagaaggacgacggcaagtgccccctgaacccccacagccacctgggcacctacggcgtgttcaccaacgccgccttcgaccccagcccctag

SEQ ID NO: 98266 - DNA, 2307 bp, synthetic construct
  misc_feature 1..2307: note = Description of Artificial Sequence: Synthetic coding sequence
  source 1..2307: mol_type = other DNA
atggccaactgccagatcgccatcctgtaccagagattccagagagtggtgttcggcatcagccagctgctgtgcttcagcgccctgatcagcgagctgaccaaccagaaggaggtggccgcctggacctaccactacagcaccaaggcctacagctggaacatcagcagaaagtactgccagaacagatacaccgacctggtggccatccagaacaagaacgagatcgactacctgaacaaggtgctgccctactacagcagctactactggatcggcatcagaaagaacaacaagacctggacctgggtgggcaccaagaaggccctgaccaacgaggccgagaactgggccgacaacgagcccaacaacaagagaaacaacgaggactgcgtggagatctacatcaagagccccagcgcccccggcaagtggaacgacgagcactgcctgaagaagaagcacgccctgtgctacaccgccagctgccaggacatgagctgcagcaagcagggcgagtgcctggagaccatcggcaactacacctgcagctgctaccccggcttctacggccccgagtgcgagtacgtgagagagtgcggcgagctggagctgccccagcacgtgctgatgaactgcagccaccccctgggcaacttcagcttcaacagccagtgcagcttccactgcaccgacggctaccaggtgaacggccccagcaagctggagtgcctggccagcggcatctggaccaacaagcccccccagtgcctggccgtgcagtgccagcacctggaggcccccagcgagggcaccatggactgcgtgcaccccctgaccgccttcgcctacggcagcagctgcaagttcgagtgccagcccggctacagagtgagaggcctggacatgctgagatgcatcgacagcggccactggagcgcccccctgcccacctgcgaggccatcagctgcgagcccctggagagccccgtgcacggcagcatggactgcagccccagcctgagagccttccagtacgacaccaactgcagcttcagatgcgccgagggcttcatgctgagaggcgccgacatcgtgagatgcgacaacctgggccagtggaccgcccccgcccccgtgtgccaggccctgcagtgccaggacctgcccgtgcccaacgaggccagagtgaactgcagccaccccttcggcgccttcagataccagagcgtgtgcagcttcacctgcaacgagggcctgctgctggtgggcgccagcgtgctgcagtgcctggccaccggcaactggaacagcgtgccccccgagtgccaggccatcccctgcacccccctgctgagcccccagaacggcaccatgacctgcgtgcagcccctgggcagcagcagctacaagagcacctgccagttcatctgcgacgagggctacagcctgagcggccccgagagactggactgcaccagaagcggcagatggaccgacagcccccccatgtgcgaggccatcaagtgccccgagctgttcgcccccgagcagggcagcctggactgcagcgacaccagaggcgagttcaacgtgggcagcacctgccacttcagctgcgacaacggcttcaagctggagggccccaacaacgtggagtgcaccaccagcggcagatggagcgccaccccccccacctgcaagggcatcgccagcctgcccacccccggcgtgcagtgccccgccctgaccacccccggccagggcaccatgtactgcagacaccaccccggcaccttcggcttcaacaccacctgctacttcggctgcaacgccggcttcaccctgatcggcgacagcaccctgagctgcagacccagcggccagtggaccgccgtgacccccgcctgcagagccgtgaagtgcagcgagctgcacgtgaacaagcccatcgccatgaactgcagcaacctgtggggcaacttcagctacggcagcatctgcagcttccactgcctggagggccagctgctgaacggcagcgcccagaccgcctgccaggagaacggccactggagcaccaccgtgcccacctgccaggccggccccctgaccatccaggaggccctgacctacttcggcggcgccgtggccagcaccatcggcctgatcatgggcggcaccctgctggccctgctgagaaagagattcagacagaaggacgacggcaagtgccccctgaacccccacagccacctgggcacctacggcgtgttcaccaacgccgccttcgaccccagcccctag

SEQ ID NO: 98267 - DNA, 1941 bp, synthetic construct
  misc_feature 1..1941: note = Description of Artificial Sequence: Synthetic coding sequence
  source 1..1941: mol_type = other DNA
atggccaactgccagatcgccatcctgtaccagagattccagagagtggtgttcggcatcagccagctgctgtgcttcagcgccctgatcagcgagctgaccaaccagaaggaggtggccgcctggacctaccactacagcaccaaggcctacagctggaacatcagcagaaagtactgccagaacagatacaccgacctggtggccatccagaacaagaacgagatcgactacctgaacaaggtgctgccctactacagcagctactactggatcggcatcagaaagaacaacaagacctggacctgggtgggcaccaagaaggccctgaccaacgaggccgagaactgggccgacaacgagcccaacaacaagagaaacaacgaggactgcgtggagatctacatcaagagccccagcgcccccggcaagtggaacgacgagcactgcctgaagaagaagcacgccctgtgctacaccgccagctgccaggacatgagctgcagcaagcagggcgagtgcctggagaccatcggcaactacacctgcagctgctaccccggcttctacggccccgagtgcgagtacgtgagagagtgcggcgagctggagctgccccagcacgtgctgatgaactgcagccaccccctgggcaacttcagcttcaacagccagtgcagcttccactgcaccgacggctaccaggtgaacggccccagcaagctggagtgcctggccagcggcatctggaccaacaagcccccccagtgcctggccgcccagtgcccccccctgaagatccccgagagaggcaacatgacctgcctgcacagcgccaaggccttccagcaccagagcagctgcagcttcagctgcgaggagggcttcgccctggtgggccccgaggtggtgcagtgcaccgccagcggcgtgtggaccgcccccgcccccgtgtgcaaggccatcagctgcgagcccctggagagccccgtgcacggcagcatggactgcagccccagcctgagagccttccagtacgacaccaactgcagcttcagatgcgccgagggcttcatgctgagaggcgccgacatcgtgagatgcgacaacctgggccagtggaccgcccccgcccccgtgtgccaggccctgcagtgccaggacctgcccgtgcccaacgaggccagagtgaactgcagccaccccttcggcgccttcagataccagagcgtgtgcagcttcacctgcaacgagggcctgctgctggtgggcgccagcgtgctgcagtgcctggccaccggcaactggaacagcgtgccccccgagtgccagggcaagagcatcgccagcctgcccacccccggcgtgcagtgccccgccctgaccacccccggccagggcaccatgtactgcagacaccaccccggcaccttcggcttcaacaccacctgctacttcggctgcaacgccggcttcaccctgatcggcgacagcaccctgagctgcagacccagcggccagtggaccgccgtgacccccgcctgcagagccgtgaagtgcagcgagctgcacgtgaacaagcccatcgccatgaactgcagcaacctgtggggcaacttcagctacggcagcatctgcagcttccactgcctggagggccagctgctgaacggcagcgcccagaccgcctgccaggagaacggccactggagcaccaccgtgcccacctgccaggccggccccctgaccatccaggaggccctgacctacttcggcggcgccgtggccagcaccatcggcctgatcatgggcggcaccctgctggccctgctgagaaagagattcagacagaaggacgacggcaagtgccccctgaacccccacagccacctgggcacctacggcgtgttcaccaacgccgccttcgaccccagcccctag

SEQ ID NO: 98268 - DNA, 2493 bp, synthetic construct; identical to SEQ ID NO: 98264
  misc_feature 1..2493: note = Description of Artificial Sequence: Synthetic coding sequence
  source 1..2493: mol_type = other DNA

SEQ ID NO: 98269 - DNA, 1935 bp, synthetic construct
  misc_feature 1..1935: note = Description of Artificial Sequence: Synthetic coding sequence
  source 1..1935: mol_type = other DNA
atggccaactgccagatcgccatcctgtaccagagattccagagagtggtgttcggcatcagccagctgctgtgcttcagcgccctgatcagcgagctgaccaaccagaaggaggtggccgcctggacctaccactacagcaccaaggcctacagctggaacatcagcagaaagtactgccagaacagatacaccgacctggtggccatccagaacaagaacgagatcgactacctgaacaaggtgctgccctactacagcagctactactggatcggcatcagaaagaacaacaagacctggacctgggtgggcaccaagaaggccctgaccaacgaggccgagaactgggccgacaacgagcccaacaacaagagaaacaacgaggactgcgtggagatctacatcaagagccccagcgcccccggcaagtggaacgacgagcactgcctgaagaagaagcacgccctgtgctacaccgccagctgccaggacatgagctgcagcaagcagggcgagtgcctggagaccatcggcaactacacctgcagctgctaccccggcttctacggccccgagtgcgagtacgtgagagagtgcggcgagctggagctgccccagcacgtgctgatgaactgcagccaccccctgggcaacttcagcttcaacagccagtgcagcttccactgcaccgacggctaccaggtgaacggccccagcaagctggagtgcctggccagcggcatctggaccaacaagcccccccagtgcctggccgcccagtgcccccccctgaagatccccgagagaggcaacatgacctgcctgcacagcgccaaggccttccagcaccagagcagctgcagcttcagctgcgaggagggcttcgccctggtgggccccgaggtggtgcagtgcaccgccagcggcgtgtggaccgcccccgcccccgtgtgcaaggccctgcagtgccaggacctgcccgtgcccaacgaggccagagtgaactgcagccaccccttcggcgccttcagataccagagcgtgtgcagcttcacctgcaacgagggcctgctgctggtgggcgccagcgtgctgcagtgcctggccaccggcaactggaacagcgtgccccccgagtgccaggccatcccctgcacccccctgctgagcccccagaacggcaccatgacctgcgtgcagcccctgggcagcagcagctacaagagcacctgccagttcatctgcgacgagggctacagcctgagcggccccgagagactggactgcaccagaagcggcagatggaccgacagcccccccatgtgcgagggcatcgccagcctgcccacccccggcgtgcagtgccccgccctgaccacccccggccagggcaccatgtactgcagacaccaccccggcaccttcggcttcaacaccacctgctacttcggctgcaacgccggcttcaccctgatcggcgacagcaccctgagctgcagacccagcggccagtggaccgccgtgacccccgcctgcagagccgtgaagtgcagcgagctgcacgtgaacaagcccatcgccatgaactgcagcaacctgtggggcaacttcagctacggcagcatctgcagcttccactgcctggagggccagctgctgaacggcagcgcccagaccgcctgccaggagaacggccactggagcaccaccgtgcccacctgccaggccggccccctgaccatccaggaggccctgacctacttcggcggcgccgtggccagcaccatcggcctgatcatgggcggcaccctgctggccctgctgagaaagagattcagacagaaggacgacggcaagtgccccctgaacccccacagccacctgggcacctacggcgtgttcaccaacgccgccttcgaccccagcccctag

SEQ ID NO: 98270 - DNA, 1941 bp, synthetic construct; identical to SEQ ID NO: 98267
  misc_feature 1..1941: note = Description of Artificial Sequence: Synthetic coding sequence
  source 1..1941: mol_type = other DNA

SEQ ID NO: 98271 - DNA, 2307 bp, synthetic construct; identical to SEQ ID NO: 98266
  misc_feature 1..2307: note = Description of Artificial Sequence: Synthetic coding sequence
  source 1..2307: mol_type = other DNA

SEQ ID NO: 98272 - DNA, 2307 bp, synthetic construct; identical to SEQ ID NO: 98265
  misc_feature 1..2307: note = Description of Artificial Sequence: Synthetic coding sequence
  source 1..2307: mol_type = other DNA

SEQ ID NO: 98273 - DNA, 1935 bp, synthetic construct; identical to SEQ ID NO: 98269
  misc_feature 1..1935: note = Description of Artificial Sequence: Synthetic coding sequence
  source 1..1935: mol_type = other DNA

SEQ ID NO: 98274 - DNA, 2490 bp, synthetic construct
  misc_feature 1..2490: note = Description of Artificial Sequence: Synthetic coding sequence
  source 1..2490: mol_type = other DNA
gccaactgccagatcgccatcctgtaccagagattccagagagtggtgttcggcatcagccagctgctgtgcttcagcgccctgatcagcgagctgaccaaccagaaggaggtggccgcctggacctaccactacagcaccaaggcctacagctggaacatcagcagaaagtactgccagaacagatacaccgacctggtggccatccagaacaagaacgagatcgactacctgaacaaggtgctgccctactacagcagctactactggatcggcatcagaaagaacaacaagacctggacctgggtgggcaccaagaaggccctgaccaacgaggccgagaactgggccgacaacgagcccaacaacaagagaaacaacgaggactgcgtggagatctacatcaagagccccagcgcccccggcaagtggaacgacgagcactgcctgaagaagaagcacgccctgtgctacaccgccagctgccaggacatgagctgcagcaagcagggcgagtgcctggagaccatcggcaactacacctgcagctgctaccccggcttctacggccccgagtgcgagtacgtgagagagtgcggcgagctggagctgccccagcacgtgctgatgaactgcagccaccccctgggcaacttcagcttcaacagccagtgcagcttccactgcaccgacggctaccaggtgaacggccccagcaagctggagtgcctggccagcggcatctggaccaacaagcccccccagtgcctggccgcccagtgcccccccctgaagatccccgagagaggcaacatgacctgcctgcacagcgccaaggccttccagcaccagagcagctgcagcttcagctgcgaggagggcttcgccctggtgggccccgaggtggtgcagtgcaccgccagcggcgtgtggaccgcccccgcccccgtgtgcaaggccgtgcagtgccagcacctggaggcccccagcgagggcaccatggactgcgtgcaccccctgaccgccttcgcctacggcagcagctgcaagttcgagtgccagcccggctacagagtgagaggcctggacatgctgagatgcatcgacagcggccactggagcgcccccctgcccacctgcgaggccatcagctgcgagcccctggagagccccgtgcacggcagcatggactgcagccccagcctgagagccttccagtacgacaccaactgcagcttcagatgcgccgagggcttcatgctgagaggcgccgacatcgtgagatgcgacaacctgggccagtggaccgcccccgcccccgtgtgccaggccctgcagtgccaggacctgcccgtgcccaacgaggccagagtgaactgcagccaccccttcggcgccttcagataccagagcgtgtgcagcttcacctgcaacgagggcctgctgctggtgggcgccagcgtgctgcagtgcctggccaccggcaactggaacagcgtgccccccgagtgccaggccatcccctgcacccccctgctgagcccccagaacggcaccatgacctgcgtgcagcccctgggcagcagcagctacaagagcacctgccagttcatctgcgacgagggctacagcctgagcggccccgagagactggactgcaccagaagcggcagatggaccgacagcccccccatgtgcgaggccatcaagtgccccgagctgttcgcccccgagcagggcagcctggactgcagcgacaccagaggcgagttcaacgtgggcagcacctgccacttcagctgcgacaacggcttcaagctggagggccccaacaacgtggagtgcaccaccagcggcagatggagcgccaccccccccacctgcaagggcatcgccagcctgcccacccccggcgtgcagtgccccgccctgaccacccccggccagggcaccatgtactgcagacaccaccccggcaccttcggcttcaacaccacctgctacttcggctgcaacgccggcttcaccctgatcggcgacagcaccctgagctgcagacccagcggccagtggaccgccgtgacccccgcctgcagagccgtgaagtgcagcgagctgcacgtgaacaagcccatcgccatgaactgcagcaacctgtggggcaacttcagctacggcagcatctgcagcttccactgcctggagggccagctgctgaacggcagcgcccagaccgcctgccaggagaacggccactggagcaccaccgtgcccacctgccaggccggccccctgaccatccaggaggccctgacctacttcggcggcgccgtggccagcaccatcggcctgatcatgggcggcaccctgctggccctgctgagaaagagattcagacagaaggacgacggcaagtgccccctgaacccccacagccacctgggcacctacggcgtgttcaccaacgccgccttcgaccccagcccctag

SEQ ID NO: 98275 - DNA, 1941 bp, synthetic construct
  misc_feature 1..1941: note = Description of Artificial Sequence: Synthetic coding sequence
  source 1..1941: mol_type = other DNA
tgagccaactgccagatcgccatcctgtaccagagattccagagagtggtgttcggcatcagccagctgctgtgcttcagcgccctgatcagcgagctgaccaaccagaaggaggtggccgcctggacctaccactacagcaccaaggcctacagctggaacatcagcagaaagtactgccagaacagatacaccgacctggtggccatccagaacaagaacgagatcgactacctgaacaaggtgctgccctactacagcagctactactggatcggcatcagaaagaacaacaagacctggacctgggtgggcaccaagaaggccctgaccaacgaggccgagaactgggccgacaacgagcccaacaacaagagaaacaacgaggactgcgtggagatctacatcaagagccccagcgcccccggcaagtggaacgacgagcactgcctgaagaagaagcacgccctgtgctacaccgccagctgccaggacatgagctgcagcaagcagggcgagtgcctggagaccatcggcaactacacctgcagctgctaccccggcttctacggccccgagtgcgagtacgtgagagagtgcggcgagctggagctgccccagcacgtgctgatgaactgcagccaccccctgggcaacttcagcttcaacagccagtgcagcttccactgcaccgacggctaccaggtgaacggccccagcaagctggagtgcctggccagcggcatctggaccaacaagcccccccagtgcctggccgcccagtgcccccccctgaagatccccgagagaggcaacatgacctgcctgcacagcgccaaggccttccagcaccagagcagctgcagcttcagctgcgaggagggcttcgccctggtgggccccgaggtggtgcagtgcaccgccagcggcgtgtggaccgcccccgcccccgtgtgcaaggccatcagctgcgagcccctggagagccccgtgcacggcagcatggactgcagccccagcctgagagccttccagtacgacaccaactgcagcttcagatgcgccgagggcttcatgctgagaggcgccgacatcgtgagatgcgacaacctgggccagtggaccgcccccgcccccgtgtgccaggccctgcagtgccaggacctgcccgtgcccaacgaggccagagtgaactgcagccaccccttcggcgccttcagataccagagcgtgtgcagcttcacctgcaacgagggcctgctgctggtgggcgccagcgtgctgcagtgcctggccaccggcaactggaacagcgtgccccccgagtgccagggcaagagcatcgccagcctgcccacccccggcgtgcagtgccccgccctgaccacccccggccagggcaccatgtactgcagacaccaccccggcaccttcggcttcaacaccacctgctacttcggctgcaacgccggcttcaccctgatcggcgacagcaccctgagctgcagacccagcggccagtggaccgccgtgacccccgcctgcagagccgtgaagtgcagcgagctgcacgtgaacaagcccatcgccatgaactgcagcaacctgtggggcaacttcagctacggcagcatctgcagcttccactgcctggagggccagctgctgaacggcagcgcccagaccgcctgccaggagaacggccactggagcaccaccgtgcccacctgccaggccggccccctgaccatccaggaggccctgacctacttcggcggcgccgtggccagcaccatcggcctgatcatgggcggcaccctgctggccctgctgagaaagagattcagacagaaggacgacggcaagtgccccctgaacccccacagccacctgggcacctacggcgtgttcaccaacgccgccttcgaccccagcccctag

SEQ ID NO: 98276 - DNA, 2262 bp, synthetic construct
  misc_feature 1..2262: note = Description of Artificial Sequence: Synthetic coding sequence
  source 1..2262: mol_type = other DNA
gtggtgttcggcatcagccagctgctgtgcttcagcgccctgatcagcgagctgaccaaccagaaggaggtggccgcctggacctaccactacagcaccaaggcctacagctggaacatcagcagaaagtactgccagaacagatacaccgacctggtggccatccagaacaagaacgagatcgactacctgaacaaggtgctgccctactacagcagctactactggatcggcatcagaaagaacaacaagacctggacctgggtgggcaccaagaaggccctgaccaacgaggccgagaactgggccgacaacgagcccaacaacaagagaaacaacgaggactgcgtggagatctacatcaagagccccagcgcccccggcaagtggaacgacgagcactgcctgaagaagaagcacgccctgtgctacaccgccagctgccaggacatgagctgcagcaagcagggcgagtgcctggagaccatcggcaactacacctgcagctgctaccccggcttctacggccccgagtgcgagtacgtgagagagtgcggcgagctggagctgccccagcacgtgctgatgaactgcagccaccccctgggcaacttcagcttcaacagccagtgcagcttccactgcaccgacggctaccaggtgaacggccccagcaagctggagtgcctggccagcggcatctggaccaacaagcccccccagtgcctggccgcccagtgcccccccctgaagatccccgagagaggcaacatgacctgcctgcacagcgccaaggccttccagcaccagagcagctgcagcttcagctgcgaggagggcttcgccctggtgggccccgaggtggtgcagtgcaccgccagcggcgtgtggaccgcccccgcccccgtgtgcaaggccatcagctgcgagcccctggagagccccgtgcacggcagcatggactgcagccccagcctgagagccttccagtacgacaccaactgcagcttcagatgcgccgagggcttcatgctgagaggcgccgacatcgtgagatgcgacaacctgggccagtggaccgcccccgcccccgtgtgccaggccctgcagtgccaggacctgcccgtgcccaacgaggccagagtgaactgcagccaccccttcggcgccttcagataccagagcgtgtgcagcttcacctgcaacgagggcctgctgctggtgggcgccagcgtgctgcagtgcctggccaccggcaactggaacagcgtgccccccgagtgccaggccatcccctgcacccccctgctgagcccccagaacggcaccatgacctgcgtgcagcccctgggcagcagcagctacaagagcacctgccagttcatctgcgacgagggctacagcctgagcggccccgagagactggactgcaccagaagcggcagatggaccgacagcccccccatgtgcgaggccatcaagtgccccgagctgttcgcccccgagcagggcagcctggactgcagcgacaccagaggcgagttcaacgtgggcagcacctgccacttcagctgcgacaacggcttcaagctggagggccccaacaacgtggagtgcaccaccagcggcagatggagcgccaccccccccacctgcaagggcatcgccagcctgcccacccccggcgtgcagtgccccgccctgaccacccccggccagggcaccatgtactgcagacaccaccccggcaccttcggcttcaacaccacctgctacttcggctgcaacgccggcttcaccctgatcggcgacagcaccctgagctgcagacccagcggccagtggaccgccgtgacccccgcctgcagagccgtgaagtgcagcgagctgcacgtgaacaagcccatcgccatgaactgcagcaacctgtggggcaacttcagctacggcagcatctgcagcttccactgcctggagggccagctgctgaacggcagcgcccagaccgcctgccaggagaacggccactggagcaccaccgtgcccacctgccaggccggccccctgaccatccaggaggccctgacctacttcggcggcgccgtggccagcaccatcggcctgatcatgggcggcaccctgctggccctgctgagaaagagattcagacagaaggacgacggcaagtgccccctgaacccccacagccacctgggcacctacggcgtgttcaccaacgccgccttcgaccccagcccctag

SEQ ID NO: 98277 - DNA, 2373 bp, synthetic construct
  misc_feature 1..2373: note = Description of Artificial Sequence: Synthetic coding sequence
  source 1..2373: mol_type = other DNA
atggccaactgccagatcgccatcctgtaccagagattccagagagtggtgttcggcatcagccagctgctgtgcttcagcgccctgatcagcgagctgaccaaccagaaggaggtggccgcctggacctaccactacagcaccaaggcctacagctggaacatcagcagaaagtactgccagaacagatacaccgacctggtggccatccagaacaagaacgagatcgactacctgaacaaggtgctgccctactacagcagctactactggatcggcatcagaaagaacaacaagacctggacctgggtgggcaccaagaaggccctgaccaacgaggccgagaactgggccgacaacgagcccaacaacaagagaaacaacgaggactgcgtggagatctacatcaagagccccagcgcccccggcaagtggaacgacgagcactgcctgaagaagaagcacgccctgtgctacaccgccagctgccaggacatgagctgcagcaagcagggcgagtgcctggagaccatcggcaactacacctgcagctgctaccccggcttctacggccccgagtgcgagtacgtgagagagtgcggcgagctggagctgccccagcacgtgctgatgaactgcagccaccccctgggcaacttcagcttcaacagccagtgcagcttccactgcaccgacggctaccaggtgaacggccccagcaagctggagtgcctggccagcggcatctggaccaacaagcccccccagtgcctggccgcccagtgcccccccctgaagatccccgagagaggcaacatgacctgcctgcacagcgccaaggccttccagcaccagagcagctgcagcttcagctgcgaggagggcttcgccctggtgggccccgaggtggtgcagtgcaccgccagcggcgtgtggaccgcccccgcccccgtgtgcaaggccgtgcagtgccagcacctggaggcccccagcgagggcaccatggactgcgtgcaccccctgaccgccttcgcctacggcagcagctgcaagttcgagtgccagcccggctacagagtgagaggcctggacatgctgagatgcatcgacagcggccactggagcgcccccctgcccacctgcgaggccatcagctgcgagcccctggagagccccgtgcacggcagcatggactgcagccccagcctgagagccttccagtacgacaccaactgcagcttcagatgcgccgagggcttcatgctgagaggcgccgacatcgtgagatgcgacaacctgggccagtggaccgcccccgcccccgtgtgccaggccctgcagtgccaggacctgcccgtgcccaacgaggccagagtgaactgcagccaccccttcggcgccttcagataccagagcgtgtgcagcttcacctgcaacgagggcctgctgctggtgggcgccagcgtgctgcagtgcctggccaccggcaactggaacagcgtgccccccgagtgccaggccatcccctgcacccccctgctgagcccccagaacggcaccatgacctgcgtgcagcccctgggcagcagcagctacaagagcacctgccagttcatctgcgacgagggctacagcctgagcggccccgagagactggactgcaccagaagcggcagatggaccgacagcccccccatgtgcgaggccatcaagtgccccgagctgttcgcccccgagcagggcagcctggactgcagcgacaccagaggcgagttcaacgtgggcagcacctgccacttcagctgcgacaacggcttcaagctggagggccccaacaacgtggagtgcaccaccagcggcagatggagcgccaccccccccacctgcaagggcatcgccagcctgcccacccccggcgtgcagtgccccgccctgaccacccccggccagggcaccatgtactgcagacaccaccccggcaccttcggcttcaacaccacctgctacttcggctgcaacgccggcttcaccctgatcggcgacagcaccctgagctgcagacccagcggccagtggaccgccgtgacccccgcctgcagagccgtgaagtgcagcgagctgcacgtgaacaagcccatcgccatgaactgcagcaacctgtggggcaacttcagctacggcagcatctgcagcttccactgcctggagggccagctgctgaacggcagcgcccagaccgcctgccaggagaacggccactggagcaccaccgtgcccacctgccaggacgacggcaagtgccccctgaacccccacagccacctgggcacctacggcgtgttcaccaacgccgccttcgaccccagcccctag

SEQ ID NO: 98278 - DNA, 450 bp, synthetic construct
  misc_feature 1..450: note = Description of Artificial Sequence: Synthetic coding sequence
  source 1..450: mol_type = other DNA
atgatgaccaagcacaagaagtgcttcatcatcgtgggcgtgctgatcaccaccaacatcatcaccctgatcgtgaagctgaccagagacagccagagcctgtgcccctacgactggatcggcttccagaacaagtgctactacttcagcaaggaggagggcgactggaacagcagcaagtacaactgcagcacccagcacgccgacctgaccatcatcgacaacatcgaggagatgaacttcctgagaagatacaagtgcagcagcgaccactggatcggcctgaagatggccaagaacagaaccggccagtgggtggacggcgccaccttcaccaagagcttcggcatgagaggcagcgagggctgcgcctacctgagcgacgacggcgccgccaccgccagatgctacaccgagagaaagtggatctgcagaaagagaatccactag

SEQ ID NO: 98279 - DNA, 1209 bp, synthetic construct
  misc_feature 1..1209: note = Description of Artificial Sequence: Synthetic coding sequence
  source 1..1209: mol_type = other DNA
atgcccctgcagctgctgctgctgctgatcctgctgggccccggcaacagcctgcagctgtgggacacctgggccgacgaggccgagaaggccctgggccccctgctggccagagacagaagacaggccaccgagtacgagtacctggactacgacttcctgcccgagaccgagccccccgagatgctgagaaacagcaccgacaccacccccctgaccggccccggcacccccgagagcaccaccgtggagcccgccgccagaagaagcaccggcctggacgccggcggcgccgtgaccgagctgaccaccgagctggccaacatgggcaacctgagcaccgacagcgccgccatggagatccagaccacccagcccgccgccaccgaggcccagaccacccccctggccgccaccgaggcccagaccaccagactgaccgccaccgaggcccagaccacccccctggccgccaccgaggcccagaccaccccccccgccgccaccgaggcccagaccacccagcccaccggcctggaggcccagaccaccgcccccgccgccatggaggcccagaccaccgcccccgccgccatggaggcccagaccaccccccccgccgccatggaggcccagaccacccagaccaccgccatggaggcccagaccaccgcccccgaggccaccgaggcccagaccacccagcccaccgccaccgaggcccagaccacccccctggccgccatggaggccctgagcaccgagcccagcgccaccgaggccctgagcatggagcccaccaccaagagaggcctgttcatccccttcagcgtgagcagcgtgacccacaagggcatccccatggccgccagcaacctgagcgtgaactaccccgtgggcgcccccgaccacatcagcgtgaagcagtgcctgctggccatcctgatcctggccctggtggccaccatcttcttcgtgtgcaccgtggtgctggccgtgagactgagcagaaagggccacatgtaccccgtgagaaactacagccccaccgagatggtgtgcatcagcagcctgctgcccgacggcggcgagggccccagcgccaccgccaacggcggcctgagcaaggccaagagccccggcctgacccccgagcccagagaggacagagagggcgacgacctgaccctgcacagcttcctgccctag

SEQ ID NO: 98280 - DNA, 1239 bp, synthetic construct
  misc_feature 1..1239: note = Description of Artificial Sequence: Synthetic coding sequence
  source 1..1239: mol_type = other DNA
atgcccctgcagctgctgctgctgctgatcctgctgggccccggcaacagcctgcagctgtgggacacctgggccgacgaggccgagaaggccctgggccccctgctggccagagacagaagacaggccaccgagtacgagtacctggactacgacttcctgcccgagaccgagccccccgagatgctgagaaacagcaccgacaccacccccctgaccggccccggcacccccgagagcaccaccgtggagcccgccgccagaagaagcaccggcctggacgccggcggcgccgtgaccgagctgaccaccgagctggccaacatgggcaacctgagcaccgacagcgccgccatggagatccagaccacccagcccgccgccaccgaggcccagaccacccagcccgtgcccaccgaggcccagaccacccccctggccgccaccgaggcccagaccaccagactgaccgccaccgaggcccagaccacccccctggccgccaccgaggcccagaccaccccccccgccgccaccgaggcccagaccacccagcccaccggcctggaggcccagaccaccgcccccgccgccatggaggcccagaccaccgcccccgccgccatggaggcccagaccaccccccccgccgccatggaggcccagaccacccagaccaccgccatggaggcccagaccaccgcccccgaggccaccgaggcccagaccacccagcccaccgccaccgaggcccagaccacccccctggccgccatggaggccctgagcaccgagcccagcgccaccgaggccctgagcatggagcccaccaccaagagaggcctgttcatccccttcagcgtgagcagcgtgacccacaagggcatccccatggccgccagcaacctgagcgtgaactaccccgtgggcgcccccgaccacatcagcgtgaagcagtgcctgctggccatcctgatcctggccctggtggccaccatcttcttcgtgtgcaccgtggtgctggccgtgagactgagcagaaagggccacatgtaccccgtgagaaactacagccccaccgagatggtgtgcatcagcagcctgctgcccgacggcggcgagggccccagcgccaccgccaacggcggcctgagcaaggccaagagccccggcctgacccccgagcccagagaggacagagagggcgacgacctgaccctgcacagcttcctgccctag

SEQ ID NO: 98281 - DNA, 1419 bp, synthetic construct
  misc_feature 1..1419: note = Description of Artificial Sequence: Synthetic coding sequence
  source 1..1419: mol_type = other DNA
atggccaccaagtgcggcaactgcggccccggctacagcacccccctggaggccatgaagggccccagagaggagatcgtgtacctgccctgcatctacagaaacaccggcaccgaggcccccgactacctggccaccgtggacgtggaccccaagagcccccagtactgccaggtgatccacagactgcccatgcccaacctgaaggacgagctgcaccacagcggctggaacacctgcagcagctgcttcggcgacagcaccaagagcagaaccaagctggtgctgcccagcctgatcagcagcagaatctacgtggtggacgtgggcagcgagcccagagcccccaagctgcacaaggtgatcgagcccaaggacatccacgccaagtgcgagctggccttcctgcacaccagccactgcctggccagcggcgaggtgatgatcagcagcctgggcgacgtgaagggcaacggcaagggcggcttcgtgctgctggacggcgagaccttcgaggtgaagggcacctgggagagacccggcggcgccgcccccctgggctacgacttctggtaccagcccagacacaacgtgatgatcagcaccgagtgggccgcccccaacgtgctgagagacggcttcaaccccgccgacgtggaggccggcctgtacggcagccacctgtacgtgtgggactggcagagacacgagatcgtgcagaccctgagcctgaaggacggcctgatccccctggagatcagattcctgcacaaccccgacgccgcccagggcttcgtgggctgcgccctgagcagcaccatccagagattctacaagaacgagggcggcacctggagcgtggagaaggtgatccaggtgccccccaagaaggtgaagggctggctgctgcccgagatgcccggcctgatcaccgacatcctgctgagcctggacgacagattcctgtacttcagcaactggctgcacggcgacctgagacagtacgacatcagcgacccccagagacccagactgaccggccagctgttcctgggcggcagcatcgtgaagggcggccccgtgcaggtgctggaggacgaggagctgaagagccagcccgagcccctggtggtgaagggcaagagagtggccggcggcccccagatgatccagctgagcctggacggcaagagactgtacatcaccaccagcctgtacagcgcctgggacaagcagttctaccccgacctgatcagagagggcagcgtgatgctgcaggtggacgtggacaccgtgaagggcggcctgaagctgaaccccaacttcctggtggacttcggcaaggagcccctgggccccgccctggcccacgagctgagataccccggcggcgactgcagcagcgacatctggatctag

SEQ ID NO: 98282 - DNA, 1227 bp, synthetic construct
  misc_feature 1..1227: note = Description of Artificial Sequence: Synthetic coding sequence
  source 1..1227: mol_type = other DNA
atgcccaacctgaaggacgagctgcaccacagcggctggaacacctgcagcagctgcttcggcgacagcaccaagagcagaaccaagctggtgctgcccagcctgatcagcagcagaatctacgtggtggacgtgggcagcgagcccagagcccccaagctgcacaaggtgatcgagcccaaggacatccacgccaagtgcgagctggccttcctgcacaccagccactgcctggccagcggcgaggtgatgatcagcagcctgggcgacgtgaagggcaacggcaagggcggcttcgtgctgctggacggcgagaccttcgaggtgaagggcacctgggagagacccggcggcgccgcccccctgggctacgacttctggtaccagcccagacacaacgtgatgatcagcaccgagtgggccgcccccaacgtgctgagagacggcttcaaccccgccgacgtggaggccggcctgtacggcagccacctgtacgtgtgggactggcagagacacgagatcgtgcagaccctgagcctgaaggacggcctgatccccctggagatcagattcctgcacaaccccgacgccgcccagggcttcgtgggctgcgccctgagcagcaccatccagagattctacaagaacgagggcggcacctggagcgtggagaaggtgatccaggtgccccccaagaaggtgaagggctggctgctgcccgagatgcccggcctgatcaccgacatcctgctgagcctggacgacagattcctgtacttcagcaactggctgcacggcgacctgagacagtacgacatcagcgacccccagagacccagactgaccggccagctgttcctgggcggcagcatcgtgaagggcggccccgtgcaggtgctggaggacgaggagctgaagagccagcccgagcccctggtggtgaagggcaagagagtggccggcggcccccagatgatccagctgagcctggacggcaagagactgtacatcaccaccagcctgtacagcgcctgggacaagcagttctaccccgacctgatcagagagggcagcgtgatgctgcaggtggacgtggacaccgtgaagggcggcctgaagctgaaccccaacttcctggtggacttcggcaaggagcccctgggccccgccctggcccacgagctgagataccccggcggcgactgcagcagcgacatctggatctag

SEQ ID NO: 98283 - DNA, 1233 bp, synthetic construct
  misc_feature 1..1233: note = Description of Artificial Sequence: Synthetic coding sequence
  source 1..1233: mol_type = other DNA
atggccaccaagtgcggcaactgcggccccggctacagcacccccctggaggccatgaagggccccagagaggagatcgtgtacctgccctgcatctacagaaacaccggcaccgaggcccccgactacctggccaccgtggacgtggaccccaagagcccccagtactgccaggtgatcgagcccaaggacatccacgccaagtgcgagctggccttcctgcacaccagccactgcctggccagcggcgaggtgatgatcagcagcctgggcgacgtgaagggcaacggcaagggcggcttcgtgctgctggacggcgagaccttcgaggtgaagggcacctgggagagacccggcggcgccgcccccctgggctacgacttctggtaccagcccagacacaacgtgatgatcagcaccgagtgggccgcccccaacgtgctgagagacggcttcaaccccgccgacgtggaggccggcctgtacggcagccacctgtacgtgtgggactggcagagacacgagatcgtgcagaccctgagcctgaaggacggcctgatccccctggagatcagattcctgcacaaccccgacgccgcccagggcttcgtgggctgcgccctgagcagcaccatccagagattctacaagaacgagggcggcacctggagcgtggagaaggtgatccaggtgccccccaagaaggtgaagggctggctgctgcccgagatgcccggcctgatcaccgacatcctgctgagcctggacgacagattcctgtacttcagcaactggctgcacggcgacctgagacagtacgacatcagcgacccccagagacccagactgaccggccagctgttcctgggcggcagcatcgtgaagggcggccccgtgcaggtgctggaggacgaggagctgaagagccagcccgagcccctggtggtgaagggcaagagagtggccggcggcccccagatgatccagctgagcctggacggcaagagactgtacatcaccaccagcctgtacagcgcctgggacaagcagttctaccccgacctgatcagagagggcagcgtgatgctgcaggtggacgtggacaccgtgaagggcggcctgaagctgaaccccaacttcctggtggacttcggcaaggagcccctgggccccgccctggcccacgagctgagataccccggcggcgactgcagcagcgacatctggatctag

SEQ ID NO: 98284 - DNA, 1362 bp, synthetic construct
  misc_feature 1..1362: note = Description of Artificial Sequence: Synthetic coding sequence
  source 1..1362: mol_type = other DNA
atgcccggcagcagcggcgccggcatggaggccgccgtggcccccggcagagacgcccccgcccccgccgccagccagcccagcggctgcggcaagcacaacagccccgagagaaaggtgtacatggactacaacgccaccacccccctggagcccgaggtgatccaggccatgaccaaggccatgtgggaggcctggggcaaccccagcagcccctacagcgccggcagaaaggccaaggacatcatcaacgccgccagagagagcctggccaagatgatcggcggcaagccccaggacatcatcttcaccagcggcggcaccgagagcaacaacctggtgatccacagcgtggtgaagcacttccacgccaaccagaccagcaagggccacaccggcggccaccacagccccgtgaagggcgccaagccccacttcatcaccagcagcgtggagcacgacagcatcagactgcccctggagcacctggtggaggagcaggtggccgccgtgaccttcgtgcccgtgagcaaggtgagcggccaggccgaggtggacgacatcctggccgccgtgagacccaccaccagactggtgaccatcatgctggccaacaacgagaccggcatcgtgatgcccgtgcccgagatcagccagagaatcaaggccctgaaccaggagagagtggccgccggcctgccccccatcctggtgcacaccgacgccgcccaggccctgggcaagcagagagtggacgtggaggacctgggcgtggacttcctgaccatcgtgggccacaagttctacggccccagaatcggcgccctgtacatcagaggcctgggcgagttcacccccctgtaccccatgctgttcggcggcggccaggagagaaacttcagacccggcaccgagaacacccccatgatcgccggcctgggcaaggccgccgagctggtgacccagaactgcgaggcctacgaggcccacatgagagacgtgagagactacctggaggagagactggaggccgagttcggccagaagagaatccacctgaacagccagttccccggcacccagagactgcccaacacctgcaacttcagcatcagaggccccagactgcagggccacgtggtgctggcccagtgcagagtgctgatggccagcgtgggcgccgcctgccacagcgaccacggcgaccagcccagccccgtgctgctgagctacggcgtgcccttcgacgtggccagaaacgccctgagactgagcgtgggcagaagcaccaccagagccgaggtggacctggtggtgcaggacctgaagcaggccgtggcccagctggaggaccaggcctag

SEQ ID NO: 98285 - DNA, 708 bp, synthetic construct
  misc_feature 1..708: note = Description of Artificial Sequence: Synthetic coding sequence
  source 1..708: mol_type = other DNA
ttcagcaaccccttctgcggcgagaccttccccagaaagcccgacctgaagggcacccacagatgggccccccagcccagcgagggcggccaggcccccttccactacttcctgggcggcaccagactgcaccccgccgcccccggcgcccccggcggcagaaccagcggcagcctgctgaacgtgaagatgatgaagatgaagaccttcatgatgatctgcttccacctgatcaacaccgtgaccttcgtgcccgtgagcaaggtgagcggccaggccgaggtggacgacatcctggccgccgtgagacccaccaccagactggtgaccatcatgctggccaacaacgagaccggcatcgtgatgcccgtgcccgagatcagccagagaatcaaggccctgaaccaggagagagtggccgccggcctgccccccatcctggtgcacaccgacgccgcccaggccctgggcaagcagagagtggacgtggaggacctgggcgtggacttcctgaccatcgtgggccacaagttctacggccccagaatcggcgccctgtacatcagaggcctgggcgagttcacccccctgtaccccatgctgttcggcggcggccaggagagaaacttcagacccggcaccgagaacacccccatgatcgccggcctgggcaaggtgagccccggcgagctggaggagatgagctag

SEQ ID NO: 98286 - DNA, 954 bp, synthetic construct
  misc_feature 1..954: note = Description of Artificial Sequence: Synthetic coding sequence
  source 1..954: mol_type = other DNA
atggaggccgccgtggcccccggcagagacgcccccgcccccgccgccagccagcccagcggctgcggcaagcacaacagccccgagagaaaggtgtacatggactacaacgccaccacccccctggagcccgaggtgatccaggccatgaccaaggccatgtgggaggcctggggcaaccccagcagcccctacagcgccggcagaaaggccaaggacatcatcaacgccgccagagagagcctggccaagatgatcggcggcaagccccaggacatcatcttcaccagcggcggcaccgagagcaacaacctggtgatccacagcgtggtgaagcacttccacgccaaccagaccagcaagggccacaccggcggccaccacagccccgtgaagggcgccaagccccacttcatcaccagcagcgtggagcacgacagcatcagactgcccctggagcacctggtggaggagcaggtggccgccgtgaccttcgtgcccgtgagcaaggtgagcggccaggccgaggtggacgacatcctggccgccgtgagacccaccaccagactggtgaccatcatgctggccaacaacgagaccggcatcgtgatgcccgtgcccgagatcagccagagaatcaaggccctgaaccaggagagagtggccgccggcctgccccccatcctggtgcacaccgacgccgcccaggccctgggcaagcagagagtggacgtggaggacctgggcgtggacttcctgaccatcgtgggccacaagttctacggccccagaatcggcgccctgtacatcagaggcctgggcgagttcacccccctgtaccccatgctgttcggcggcggccaggagagaaacttcagacccggcaccgagaacacccccatgatcgccggcctgggcaaggtgagccccggcgagctggaggagatgagctag

SEQ ID NO: 98287 - DNA, 1056 bp, synthetic construct
  misc_feature 1..1056: note = Description of Artificial Sequence: Synthetic coding sequence
  source 1..1056: mol_type = other DNA
atggaggccgccgtggcccccggcagagacgcccccgcccccgccgccagccagcccagcggctgcggcaagcacaacagccccgagagaaaggtgtacatggactacaacgccaccacccccctggagcccgaggtgatccaggccatgaccaaggccatgtgggaggcctggggcaaccccagcagcccctacagcgccgccgtgaccttcgtgcccgtgagcaaggtgagcggccaggccgaggtggacgacatcctggccgccgtgagacccaccaccagactggtgaccatcatgctggccaacaacgagaccggcatcgtgatgcccgtgcccgagatcagccagagaatcaaggccctgaaccaggagagagtggccgccggcctgccccccatcctggtgcacaccgacgccgcccaggccctgggcaagcagagagtggacgtggaggacctgggcgtggacttcctgaccatcgtgggccacaagttctacggccccagaatcggcgccctgtacatcagaggcctgggcgagttcacccccctgtaccccatgctgttcggcggcggccaggagagaaacttcagacccggcaccgagaacacccccatgatcgccggcctgggcaaggccgccgagctggtgacccagaactgcgaggcctacgaggcccacatgagagacgtgagagactacctggaggagagactggaggccgagttcggccagaagagaatccacctgaacagccagttccccggcacccagagactgcccaacacctgcaacttcagcatcagaggccccagactgcagggccacgtggtgctggcccagtgcagagtgctgatggccagcgtgggcgccgcctgccacagcgaccacggcgaccagcccagccccgtgctgctgagctacggcgtgcccttcgacgtggccagaaacgccctgagactgagcgtgggcagaagcaccaccagagccgaggtggacctggtggtgcaggacctgaagcaggccgtggcccagctggaggaccaggcctag

SEQ ID NO: 98288 - DNA, 720 bp, synthetic construct
  misc_feature 1..720: note = Description of Artificial Sequence: Synthetic coding sequence
  source 1..720: mol_type = other DNA
atggaggccgccgtggcccccggcagagacgcccccgcccccgccgccagccagcccagcggctgcggcaagcacaacagccccgagagaaaggtgtacatggactacaacgccaccacccccctggagcccgaggtgatccaggccatgaccaaggccatgtgggaggcctggggcaaccccagcagcccctacagcgccggcagaaaggccaaggacatcatcaacgccgccagagagagcctggccaagatgatcggcggcaagccccaggacatcatcttcaccagcggcggcaccgaggccgccgagctggtgacccagaactgcgaggcctacgaggcccacatgagagacgtgagagactacctggaggagagactggaggccgagttcggccagaagagaatccacctgaacagccagttccccggcacccagagactgcccaacacctgcaacttcagcatcagaggccccagactgcagggccacgtggtgctggcccagtgcagagtgctgatggccagcgtgggcgccgcctgccacagcgaccacggcgaccagcccagccccgtgctgctgagctacggcgtgcccttcgacgtggccagaaacgccctgagactgagcgtgggcagaagcaccaccagagccgaggtggacctggtggtgcaggacctgaagcaggccgtggcccagctggaggaccaggcctag

SEQ ID NO: 98289 - DNA, 1338 bp, synthetic construct
  misc_feature 1..1338: note = Description of Artificial Sequence: Synthetic coding sequence
  source 1..1338: mol_type = other DNA
atggaggccgccgtggcccccggcagagacgcccccgcccccgccgccagccagcccagcggctgcggcaagcacaacagccccgagagaaaggtgtacatggactacaacgccaccacccccctggagcccgaggtgatccaggccatgaccaaggccatgtgggaggcctggggcaaccccagcagcccctacagcgccggcagaaaggccaaggacatcatcaacgccgccagagagagcctggccaagatgatcggcggcaagccccaggacatcatcttcaccagcggcggcaccgagagcaacaacctggtgatccacagcgtggtgaagcacttccacgccaaccagaccagcaagggccacaccggcggccaccacagccccgtgaagggcgccaagccccacttcatcaccagcagcgtggagcacgacagcatcagactgcccctggagcacctggtggaggagcaggtggccgccgtgaccttcgtgcccgtgagcaaggtgagcggccaggccgaggtggacgacatcctggccgccgtgagacccaccaccagactggtgaccatcatgctggccaacaacgagaccggcatcgtgatgcccgtgcccgagatcagccagagaatcaaggccctgaaccaggagagagtggccgccggcctgccccccatcctggtgcacaccgacgccgcccaggccctgggcaagcagagagtggacgtggaggacctgggcgtggacttcctgaccatcgtgggccacaagttctacggccccagaatcggcgccctgtacatcagaggcctgggcgagttcacccccctgtaccccatgctgttcggcggcggccaggagagaaacttcagacccggcaccgagaacacccccatgatcgccggcctgggcaaggccgccgagctggtgacccagaactgcgaggcctacgaggcccacatgagagacgtgagagactacctggaggagagactggaggccgagttcggccagaagagaatccacctgaacagccagttccccggcacccagagactgcccaacacctgcaacttcagcatcagaggccccagactgcagggccacgtggtgctggcccagtgcagagtgctgatggccagcgtgggcgccgcctgccacagcgaccacggcgaccagcccagccccgtgctgctgagctacggcgtgcccttcgacgtggccagaaacgccctgagactgagcgtgggcagaagcaccaccagagccgaggtggacctggtggtgcaggacctgaagcaggccgtggcccagctggaggaccaggcctag

SEQ ID NO: 98290 - DNA, 966 bp, synthetic construct
  misc_feature 1..966: note = Description of Artificial Sequence: Synthetic coding sequence
  source 1..966: mol_type = other DNA
atgagcaccagagagagcttcaaccccgagagctacgagctggacaagagcttcagactgaccagattcaccgagctgaagggcaccggctgcaaggtgccccaggacgtgctgcagaagctgctggagagcctgcaggagaaccacttccaggaggacgagcagttcctgggcgccgtgatgcccagactgggcatcggcatggacacctgcgtgatccccctgagacacggcggcctgagcctggtgcagaccaccgactacatctaccccatcgtggacgacccctacatgatgggcagaatcgcctgcgccaacgtgctgagcgacctgtacgccatgggcgtgaccgagtgcgacaacatgctgatgctgctgggcgtgagcaacaagatgaccgacagagagagagacaaggtgatgcccctgatcatccagggcttcaaggacgccgccgaggaggccggcaccagcgtgaccggcggccagaccgtgctgaacccctggatcgtgctgggcggcgtggccaccaccgtgtgccagcccaacgagttcatcatgcccgacaacgccgtgcccggcgacgtgctggtgctgaccaagcccctgggcacccaggtggccgtggccgtgcaccagtggctggacatccccgagaagtggaacaagatcaagctggtggtgacccaggaggacgtggagctggcctaccaggaggccatgatgaacatggccagactgaacagaaccggcggcctgctgatctgcctgcccagagagcaggccgccagattctgcgccgagatcaagagccccaagtacggcgagggccaccaggcctggatcatcggcatcgtggagaagggcaacagaaccgccagaatcatcgacaagcccagaatcatcgaggtggccccccaggtggccacccagaacgtgaaccccacccccggcgccaccagctag

SEQ ID NO: 98291 - DNA, 1179 bp, synthetic construct
  misc_feature 1..1179: note = Description of Artificial Sequence: Synthetic coding sequence
  source 1..1179: mol_type = other DNA
atgagcaccagagagagcttcaaccccgagagctacgagctggacaagagcttcagactgaccagattcaccgagctgaagggcaccggctgcaaggtgccccaggacgtgctgcagaagctgctggagagcctgcaggagaaccacttccaggaggacgagcagttcctgggcgccgtgatgcccagactgggcatcggcatggacacctgcgtgatccccctgagacacggcggcctgagcctggtgcagaccaccgactacatctaccccatcgtggacgacccctacatgatgggcagaatcgcctgcgccaacgtgctgagcgacctgtacgccatgggcgtgaccgagtgcgacaacatgctgatgctgctgggcgtgagcaacaagatgaccgacagagagagagacaaggtgatgcccctgatcatccagggcttcaaggacgccgccgaggaggccggcaccagcgtgaccggcggccagaccgtgctgaacccctggatcgtgctgggcggcgtggccaccaccgtgtgccagcccaacgagttcatcatgcccgacaacgccgtgcccggcgacgtgctggtgctgaccaagcccctgggcacccaggtggccgtggccgtgcaccagtggctggacatccccgagaagtggaacaagatcaagctggtggtgacccaggaggacgtggagctggcctaccaggaggccatgatgaacatggccagactgaacagaaccgccgccggcctgatgcacaccttcaacgcccacgccgccaccgacatcaccggcttcggcatcctgggccacgcccagaacctggccaagcagcagagaaacgaggtgagcttcgtgatccacaacctgcccgtgctggccaagatggccgccgtgagcaaggcctgcggcaacatgttcggcctgatgcacggcacctgccccgagaccagcggcggcctgctgatctgcctgcccagagagcaggccgccagattctgcgccgagatcaagagccccaagtacggcgagggccaccaggcctggatcatcggcatcgtggagaagggcaacagaaccgccagaatcatcgacaagcccagaatcatcgaggtggccccccaggtggccacccagaacgtgaaccccacccccggcgccaccagctag

SEQ ID NO: 98292 - DNA, 966 bp, synthetic construct; identical to SEQ ID NO: 98290
  misc_feature 1..966: note = Description of Artificial Sequence: Synthetic coding sequence
  source 1..966: mol_type = other DNA

SEQ ID NO: 98293 - DNA, 501 bp, synthetic construct
  misc_feature 1..501: note = Description of Artificial Sequence: Synthetic coding sequence
  source 1..501: mol_type = other DNA
atgagcaccagagagagcttcaaccccgagagctacgagctggacaagagcttcagactgaccagattcaccgagctgaagggcaccggctgcaaggtgccccaggacgtgctgcagaagctgctggagagcctgcaggagaaccacttccaggaggacgagcagttcctgggcgccgtgatgcccagactgggcatcggcatggacacctgcgtgatccccctgagacacggcggcctgagcctggtgcagaccaccgactacatctaccccatcgtggacgacccctacatgatgggcagaatcgcctgcgccaacgtgctgagcgacctgtacgccatgggcgtgaccgagtgcgacaacatgctgatgctgctgggcgtgagcaacaagatgaccgacagagagagagacaaggtgatgcccctgatcatccagggcttcaaggacgccgccgaggaggccggcaccagcgtgaccggcggccagaccgtgctgtag

SEQ ID NO: 98294 - DNA, 279 bp, synthetic construct
  misc_feature 1..279: note = Description of Artificial Sequence: Synthetic coding sequence
  source 1..279: mol_type = other DNA
atggacacctgcgtgatccccctgagacacggcggcctgagcctggtgcagaccaccgactacatctaccccatcgtggacgacccctacatgatgggcagaatcgcctgcgccaacgtgctgagcgacctgtacgccatgggcgtgaccgagtgcgacaacatgctgatgctgctgggcgtgagcaacaagatgaccgacagagagagagacaaggtgatgcccctgatcatccagggcttcaaggacgccgccgaggaggccggcaccagcgtgtag

SEQ ID NO: 98295 - DNA, 978 bp, synthetic construct
  misc_feature 1..978: note = Description of Artificial Sequence: Synthetic coding sequence
  source 1..978: mol_type = other DNA
atggacacctgcgtgatccccctgagacacggcggcctgagcctggtgcagaccaccgactacatctaccccatcgtggacgacccctacatgatgggcagaatcgcctgcgccaacgtgctgagcgacctgtacgccatgggcgtgaccgagtgcgacaacatgctgatgctgctgggcgtgagcaacaagatgaccgacagagagagagacaaggtgatgcccctgatcatccagggcttcaaggacgccgccgaggaggccggcaccagcgtgaccggcggccagaccgtgctgaacccctggatcgtgctgggcggcgtggccaccaccgtgtgccagcccaacgagttcatcatgcccgacaacgccgtgcccggcgacgtgctggtgctgaccaagcccctgggcacccaggtggccgtggccgtgcaccagtggctggacatccccgagaagtggaacaagatcaagctggtggtgacccaggaggacgtggagctggcctaccaggaggccatgatgaacatggccagactgaacagaaccgccgccggcctgatgcacaccttcaacgcccacgccgccaccgacatcaccggcttcggcatcctgggccacgcccagaacctggccaagcagcagagaaacgaggtgagcttcgtgatccacaacctgcccgtgctggccaagatggccgccgtgagcaaggcctgcggcaacatgttcggcctgatgcacggcacctgccccgagaccagcggcggcctgctgatctgcctgcccagagagcaggccgccagattctgcgccgagatcaagagccccaagtacggcgagggccaccaggcctggatcatcggcatcgtggagaagggcaacagaaccgccagaatcatcgacaagcccagaatcatcgaggtggccccccaggtggccacccagaacgtgaaccccacccccggcgccaccagctag

SEQ ID NO: 98296 - DNA, 975 bp, synthetic construct
  misc_feature 1..975: note = Description of Artificial Sequence: Synthetic coding sequence
  source 1..975: mol_type = other DNA
atgagcaccagagagagcttcaaccccgagagctacgagctggacaagagcttcagactgaccagattcaccgagctgaagggcaccggctgcaaggtgccccaggacgtgctgcagaagctgctggagagcctgcaggagaaccacttccaggaggacgagcagttcctgggcgccgtgatgcccagactgggcatcggcatggacacctgcgtgatccccctgagacacggcggcctgagcctggtgcagaccaccgactacatctaccccatcgtggacgacccctacatgatgggcagaatcgcctgcgccaacgtgctgagcgacctgtacgccatgggcgtgaccgagtgcgacaacatgctgatgctgctgggcgtgagcaacaagatgaccgacagagagagagacaaggtgatgcccctgatcatccagggcttcaaggacgccgccgaggaggccggcaccagcgtgaccggcggccagaccgtgctgaacccctggatcgtgctgggcggcgtggccaccaccgtgtgccagcccaacgagttcatcatgcccgacaacgccgtgcccggcgacgtgctggtgctgaccaagcccctgggcacccaggtggccgtggccgtgcaccagtggctggacatccccgagaagtggaacaagatcaagctggtggtgacccaggaggacgtggagctggcctaccaggaggccatgatgaacatggccagactgaacagaaccgccgccggcctgatgcacaccttcaacgcccacgccgccaccgacatcaccggcttcggcatcctgggccacgcccagaacctggccaagcagcagagaaacgaggtgagcttcgtgatccacaacctgcccgtgctggccaagatggccgccgtgagcaaggcctgcggcaacatgttcggcctgatgcacggcacctgccccgagaccagcgacgtgcagtag

SEQ ID NO: 98297 - DNA, 1200 bp, synthetic construct
  misc_feature 1..1200: note = Description of Artificial Sequence: Synthetic coding sequence
  source 1..1200: mol_type = other DNA
atggccgaggccagcgccaccggcgcctgcggcgaggccatggccgccgccgagggcagcagcggccccgccggcctgaccctgggcagactgaccggcttcagcggcatgaagggcctggtgggcggccaggaggaggccagccaggaggccggcctgcccgccggcgccggccccagccccaccttccccgccctgggcatcggcatggacagctgcgtgatccccctgagacacggcggcctgagcctggtgcagaccaccgacttcttctaccccctggtggaggacccctacatgatgggcagaatcgcctgcgccaacgtgctgagcgacctgtacgccatgggcatcaccgagtgcgacaacatgctgatgctgctgagcgtgagccagagcatgagcgaggaggagagagagaaggtgacccccctgatggtgaagggcttcagagacgccgccgaggagggcggcaccgccgtgaccggcggccagaccgtggtgaacccctggatcatcatcggcggcgtggccaccgtggtgtgccagcccaacgagttcatcatgcccgacagcgccgtggtgggcgacgtgctggtgctgaccaagcccctgggcacccaggtggccgtgaacgcccaccagtggctggacaaccccgagagatggaacaaggtgaagatggtggtgagcagagaggaggtggagctggcctaccaggaggccatgttcaacatggccaccctgaacagaaccgccgccggcctgatgcacaccttcaacgcccacgccgccaccgacatcaccggcttcggcatcctgggccacagccagaacctggccaagcagcagagaaacgaggtgagcttcgtgatccacaacctgcccatcatcgccaagatggccgccgtgagcaaggccagcggcagattcggcctgctgcagggcaccagcgccgagaccagcggcggcctgctgatctgcctgcccagagagcaggccgccagattctgcagcgagatcaagagcagcaagtacggcgagggccaccaggcctggatcgtgggcatcgtggagaagggcaacagaaccgccagaatcatcgacaagcccagagtgatcgaggtgctgcccagaggcgccaccgccgccgtgctggcccccgacagcagcaacgccagcagcgagcccagcagctag

SEQ ID NO: 98298 - DNA, 1452 bp, synthetic construct
  misc_feature 1..1452: note = Description of Artificial Sequence: Synthetic coding sequence
  source 1..1452: mol_type = other DNA
  misc_feature 1..177: note = DNA
  misc_feature 178: note = RNA
  misc_feature 179..1344: note = DNA
  misc_feature 1345: note = RNA
  misc_feature 1346..1452: note = DNA
atggccgaggccagcgccaccggcgcctgcggcgaggccatggccgccgccgagggcagcagcggccccgccggcctgaccctgggcagaagcttcagcaactacagacccttcgagccccaggccctgggcctgagccccagctggagactgaccggcttcagcggcatgaagggctgaggctgcaaggtgccccaggaggccctgctgaagctgctggccggcctgaccagacccgacgtgagaccccccctgggcagaggcctggtgggcggccaggaggaggccagccaggaggccggcctgcccgccggcgccggccccagccccaccttccccgccctgggcatcggcatggacagctgcgtgatccccctgagacacggcggcctgagcctggtgcagaccaccgacttcttctaccccctggtggaggacccctacatgatgggcagaatcgcctgcgccaacgtgctgagcgacctgtacgccatgggcatcaccgagtgcgacaacatgctgatgctgctgagcgtgagccagagcatgagcgaggaggagagagagaaggtgacccccctgatggtgaagggcttcagagacgccgccgaggagggcggcaccgccgtgaccggcggccagaccgtggtgaacccctggatcatcatcggcggcgtggccaccgtggtgtgccagcccaacgagttcatcatgcccgacagcgccgtggtgggcgacgtgctggtgctgaccaagcccctgggcacccaggtggccgtgaacgcccaccagtggctggacaaccccgagagatggaacaaggtgaagatggtggtgagcagagaggaggtggagctggcctaccaggaggccatgttcaacatggccaccctgaacagaaccgccgccggcctgatgcacaccttcaacgcccacgccgccaccgacatcaccggcttcggcatcctgggccacagccagaacctggccaagcagcagagaaacgaggtgagcttcgtgatccacaacctgcccatcatcgccaagatggccgccgtgagcaaggccagcggcagattcggcctgctgcagggcaccagcgccgagaccagcggcggcctgctgatctgcctgcccagagagcaggccgccagattctgcagcgagatcaagagcagcaagtacggcgagggccaccaggcctggatcgtgggcatcgtggagaagggcaacagaaccgccagaatcatcgacaagcccagagtgatcgaggtgctgcccagaggcgccaccgccgccgtgctggcccccgacagcagcaacgccagcagcgagcccagcagctgagacgagagaaccgaggtggtgtggaccctggagcccctgagcaccatcaccgacggcagccaggagctgatcgtgagaaacttccagagaagactgcccgcctag

SEQ ID NO: 98299 - DNA, 1347 bp, synthetic construct
  misc_feature 1..1347: note = Description of Artificial Sequence: Synthetic coding sequence
  source 1..1347: mol_type = other DNA
  misc_feature 1..177: note = DNA
  misc_feature 178: note = RNA
  misc_feature 179..1347: note = DNA
atggccgaggccagcgccaccggcgcctgcggcgaggccatggccgccgccgagggcagcagcggccccgccggcctgaccctgggcagaagcttcagcaactacagacccttcgagccccaggccctgggcctgagccccagctggagactgaccggcttcagcggcatgaagggctgaggctgcaaggtgccccaggaggccctgctgaagctgctggccggcctgaccagacccgacgtgagaccccccctgggcagaggcctggtgggcggccaggaggaggccagccaggaggccggcctgcccgccggcgccggccccagccccaccttccccgccctgggcatcggcatggacagctgcgtgatccccctgagacacggcggcctgagcctggtgcagaccaccgacttcttctaccccctggtggaggacccctacatgatgggcagaatcgcctgcgccaacgtgctgagcgacctgtacgccatgggcatcaccgagtgcgacaacatgctgatgctgctgagcgtgagccagagcatgagcgaggaggagagagagaaggtgacccccctgatggtgaagggcttcagagacgccgccgaggagggcggcaccgccgtgaccggcggccagaccgtggtgaacccctggatcatcatcggcggcgtggccaccgtggtgtgccagcccaacgagttcatcatgcccgacagcgccgtggtgggcgacgtgctggtgctgaccaagcccctgggcacccaggtggccgtgaacgcccaccagtggctggacaaccccgagagatggaacaaggtgaagatggtggtgagcagagaggaggtggagctggcctaccaggaggccatgttcaacatggccaccctgaacagaaccgccgccggcctgatgcacaccttcaacgcccacgccgccaccgacatcaccggcttcggcatcctgggccacagccagaacctggccaagcagcagagaaacgaggtgagcttcgtgatccacaacctgcccatcatcgccaagatggccgccgtgagcaaggccagcggcagattcggcctgctgcagggcaccagcgccgagaccagcggcggcctgctgatctgcctgcccagagagcaggccgccagattctgcagcgagatcaagagcagcaagtacggcgagggccaccaggcctggatcgtgggcatcgtggagaagggcaacagaaccgccagaatcatcgacaagcccagagtgatcgaggtgctgcccagaggcgccaccgccgccgtgctggcccccgacagcagcaacgccagcagcgagcccagcagctag

SEQ ID NO: 98300 - DNA, 1176 bp, synthetic construct
  misc_feature 1..1176: note = Description of Artificial Sequence: Synthetic coding sequence
  source 1..1176: mol_type = other DNA
atggccgaggccagcgccaccggcgcctgcggcgaggccatggccgccgccgagggcagcagcggccccgccggcctgaccctgggcagaagcttcagcaactacagacccttcgagccccaggaggccggcctgcccgccggcgccggccccagccccaccttccccgccctgggcatcggcatggacagctgcgtgatccccctgagacacggcggcctgagcctggtgcagaccaccgacttcttctaccccctggtggaggacccctacatgatgggcagaatcgcctgcgccaacgtgctgagcgacctgtacgccatgggcatcaccgagtgcgacaacatgctgatgctgctgagcgtgagccagagcatgagcgaggaggagagagagaaggtgacccccctgatggtgaagggcttcagagacgccgccgaggagggcggcaccgccgtgaccggcggccagaccgtggtgaacccctggatcatcatcggcggcgtggccaccgtggtgtgccagcccaacgagttcatcatgcccgacagcgccgtggtgggcgacgtgctggtgctgaccaagcccctgggcacccaggtggccgtgaacgcccaccagtggctggacaaccccgagagatggaacaaggtgaagatggtggtgagcagagaggaggtggagctggcctaccaggaggccatgttcaacatggccaccctgaacagaaccgccgccggcctgatgcacaccttcaacgcccacgccgccaccgacatcaccggcttcggcatcctgggccacagccagaacctggccaagcagcagagaaacgaggtgagcttcgtgatccacaacctgcccatcatcgccaagatggccgccgtgagcaaggccagcggcagattcggcctgctgcagggcaccagcgccgagaccagcggcggcctgctgatctgcctgcccagagagcaggccgccagattctgcagcgagatcaagagcagcaagtacggcgagggccaccaggcctggatcgtgggcatcgtggagaagggcaacagaaccgccagaatcatcgacaagcccagagtgatcgaggtgctgcccagaggcgccaccgccgccgtgctggcccccgacagcagcaacgccagcagcgagcccagcagctag

SEQ ID NO: 98301 - DNA, 1671 bp, synthetic construct
  misc_feature 1..1671: note = Description of Artificial Sequence: Synthetic coding sequence
  source 1..1671: mol_type = other DNA
atgggcagagccagacccggccagagaggcccccccagccccggccccgccgcccagccccccgccccccccagaagaagagccagaagcctggccctgctgggcgccctgctggccgccgccgccgccgccgccgtgagagtgtgcgccagacacgccgaggcccaggccgccgccagacaggagctggccctgaagaccctgggcaccgacggcctgttcctgttcagcagcctggacaccgacggcgacatgtacatcagccccgaggagttcaagcccatcgccgagaagctgaccggcagcacccccgccgccagctgcgaggaggaggagctgccccccgaccccagcgaggagaccctgaccatcgaggccagattccagcccctgctgcccgagaccatgaccaagagcaaggacggcttcctgggcgtgagcagactggccctgagcggcctgagaaactggaccgccgccgccagccccagcgccgtgttcgccaccagacacttccagcccttcctgcccccccccggccaggagctgggcgagccctggtggatcatccccagcgagctgagcatgttcaccggctacctgagcaacaacagattctacccccccccccccaagggcaaggaggtgatcatccacagactgctgagcatgttccaccccagacccttcgtgaagaccagattcgccccccagggcgccgtggcctgcctgaccgccatcagcgacttctactacaccgtgatgttcagaatccacgccgagttccagctgagcgagccccccgacttccccttctggttcagccccgcccagttcaccggccacatcatcctgagcaaggacgccacccacgtgagagacttcagactgttcgtgcccaaccacagaagcctgaacgtggacatggagtggctgtacggcgccagcgagagcagcaacatggaggtggacatcggctacatcccccagatggagctggaggccaccggccccagcgtgcccagcgtgatcctggacgaggacggcagcatgatcgacagccacctgcccagcggcgagcccctgcagttcgtgttcgaggagatcaagtggcagcaggagctgagctgggaggaggccgccagaagactggaggtggccatgtaccccttcaagaaggtgagctacctgcccttcaccgaggccttcgacagagccaaggccgagaacaagctggtgcacagcatcctgctgtggggcgccctggacgaccagagctgccactgcagcggcagaaccctgagagagaccgtgctggagagcagccccatcctgaccctgctgaacgagagcttcatcagcacctggagcctggtgaaggagctggaggagctgcagaacaaccaggagaacagcagccaccagaagctggccggcctgcacctggagaagtacagcttccccgtggagatgatgatctgcctgcccaacggcaccgtggtgcaccacatcaacgccaactacttcctggacatcaccagcgtgaagcccgaggagatcgagagcaacctgttcagcttcagcagcaccttcgaggaccccagcaccgccacctacatgcagttcctgaaggagggcctgagaagaggcctgcccctgctgcagccctag

SEQ ID NO: 98302 - DNA, 1773 bp, synthetic construct
  misc_feature 1..1773: note = Description of Artificial Sequence: Synthetic coding sequence
  source 1..1773: mol_type = other DNA
  misc_feature 1..378: note = DNA
  misc_feature 379: note = RNA
  misc_feature 380..1383: note = DNA
  misc_feature 1384: note = RNA
  misc_feature 1385..1773: note = DNA
atgggcagagccagacccggccagagaggcccccccagccccggccccgccgcccagccccccgccccccccagaagaagagccagaagcctggccctgctgggcgccctgctggccgccgccgccgccgccgccgtgagagtgtgcgccagacacgccgaggcccaggccgccgccagacaggagctggccctgaagaccctgggcaccgacggcctgttcctgttcagcagcctggacaccgacggcgacatgtacatcagccccgaggagttcaagcccatcgccgagaagctgaccggcagctgcagcgtgacccagaccggcgtgcagtggtgcagccacagcagcctgcagccccagctgccctggctgaactgaagcagctgcctgagcctgctgagaagcacccccgccgccagctgcgaggaggaggagctgccccccgaccccagcgaggagaccctgaccatcgaggccagattccagcccctgctgcccgagaccatgaccaagagcaaggacggcttcctgggcgtgagcagactggccctgagcggcctgagaaactggaccgccgccgccagccccagcgccgtgttcgccaccagacacttccagcccttcctgcccccccccggccaggagctgggcgagccctggtggatcatccccagcgagctgagcatgttcaccggctacctgagcaacaacagattctacccccccccccccaagggcaaggaggtgatcatccacagactgctgagcatgttccaccccagacccttcgtgaagaccagattcgccccccagggcgccgtggcctgcctgaccgccatcagcgacttctactacaccgtgatgttcagaatccacgccgagttccagctgagcgagccccccgacttccccttctggttcagccccgcccagttcaccggccacatcatcctgagcaaggacgccacccacgtgagagacttcagactgttcgtgcccaaccacagaagcctgaacgtggacatggagtggctgtacggcgccagcgagagcagcaacatggaggtggacatcggctacatcccccagatggagctggaggccaccggccccagcgtgcccagcgtgatcctggacgaggacggcagcatgatcgacagccacctgcccagcggcgagcccctgcagttcgtgttcgaggagatcaagtggcagcaggagctgagctgggaggaggccgccagaagactggaggtggccatgtaccccttcaagaaggtgagctacctgcccttcaccgaggccttcgacagagccaaggccgagaacaagctggtgcacagcatcctgctgtggggcgccctggacgaccagagctgctgaggcagcggcagaaccctgagagagaccgtgctggagagcagccccatcctgaccctgctgaacgagagcttcatcagcacctggagcctggtgaaggagctggaggagctgcagaacaaccaggagaacagcagccaccagaagctggccggcctgcacctggagaagtacagcttccccgtggagatgatgatctgcctgcccaacggcaccgtggtgcaccacatcaacgccaactacttcctggacatcaccagcgtgaagcccgaggagatcgagagcaacctgttcagcttcagcagcaccttcgaggaccccagcaccgccacctacatgcagttcctgaaggagggcctgagaagaggcctgcccctgctgcagccctag

SEQ ID NO: 98303 - DNA, 1671 bp, synthetic construct
  misc_feature 1..1671: note = Description of Artificial Sequence: Synthetic coding sequence
  source 1..1671: mol_type = other DNA
  misc_feature 1..1281: note = DNA
  misc_feature 1282: note = RNA
  misc_feature 1283..1671: note = DNA
atgggcagagccagacccggccagagaggcccccccagccccggccccgccgcccagccccccgccccccccagaagaagagccagaagcctggccctgctgggcgccctgctggccgccgccgccgccgccgccgtgagagtgtgcgccagacacgccgaggcccaggccgccgccagacaggagctggccctgaagaccctgggcaccgacggcctgttcctgttcagcagcctggacaccgacggcgacatgtacatcagccccgaggagttcaagcccatcgccgagaagctgaccggcagcacccccgccgccagctgcgaggaggaggagctgccccccgaccccagcgaggagaccctgaccatcgaggccagattccagcccctgctgcccgagaccatgaccaagagcaaggacggcttcctgggcgtgagcagactggccctgagcggcctgagaaactggaccgccgccgccagccccagcgccgtgttcgccaccagacacttccagcccttcctgcccccccccggccaggagctgggcgagccctggtggatcatccccagcgagctgagcatgttcaccggctacctgagcaacaacagattctacccccccccccccaagggcaaggaggtgatcatccacagactgctgagcatgttccaccccagacccttcgtgaagaccagattcgccccccagggcgccgtggcctgcctgaccgccatcagcgacttctactacaccgtgatgttcagaatccacgccgagttccagctgagcgagccccccgacttccccttctggttcagccccgcccagttcaccggccacatcatcctgagcaaggacgccacccacgtgagagacttcagactgttcgtgcccaaccacagaagcctgaacgtggacatggagtggctgtacggcgccagcgagagcagcaacatggaggtggacatcggctacatcccccagatggagctggaggccaccggccccagcgtgcccagcgtgatcctggacgaggacggcagcatgatcgacagccacctgcccagcggcgagcccctgcagttcgtgttcgaggagatcaagtggcagcaggagctgagctgggaggaggccgccagaagactggaggtggccatgtaccccttcaagaaggtgagctacctgcccttcaccgaggccttcgacagagccaaggccgagaacaagctggtgcacagcatcctgctgtggggcgccctggacgaccagagctgctgaggcagcggcagaaccctgagagagaccgtgctggagagcagccccatcctgaccctgctgaacgagagcttcatcagcacctggagcctggtgaaggagctggaggagctgcagaacaaccaggagaacagcagccaccagaagctggccggcctgcacctggagaagtacagcttccccgtggagatgatgatctgcctgcccaacggcaccgtggtgcaccacatcaacgccaactacttcctggacatcaccagcgtgaagcccgaggagatcgagagcaacctgttcagcttcagcagcaccttcgaggaccccagcaccgccacctacatgcagttcctgaaggagggcctgagaagaggcctgcccctgctgcagccctag

SEQ ID NO: 98304 - DNA, 1146 bp, synthetic construct
  misc_feature 1..1146: note = Description of Artificial Sequence: Synthetic coding sequence
  source 1..1146: mol_type = other DNA
  misc_feature 1..174: note = DNA
  misc_feature 175: note = RNA
  misc_feature 176..897: note = DNA
  misc_feature 898: note = RNA
  misc_feature 899..951: note = DNA
  misc_feature 952: note = RNA
  misc_feature 953..987: note = DNA
  misc_feature 988: note = RNA
  misc_feature 989..1032: note = DNA
  misc_feature 1033: note = RNA
  misc_feature 1034..1053: note = DNA
  misc_feature 1054: note = RNA
  misc_feature 1055..1098: note = DNA
  misc_feature 1099: note = RNA
  misc_feature 1100..1104: note = DNA
  misc_feature 1105: note = RNA
  misc_feature 1106..1125: note = DNA
  misc_feature 1126: note = RNA
  misc_feature 1127..1131: note = DNA
  misc_feature 1132: note = RNA
  misc_feature 1133..1146: note = DNA
atgtggagaagcctgggcctggccctggccctgtgcctgctgcccagcggcggcaccgagagccaggaccagagcagcctgtgcaagcagccccccgcctggagcatcagagaccaggaccccatgctgaacagcaacggcagcgtgaccgtggtggccctgctgcaggccagctgatacctgtgcatcctgcaggccagcaagctggaggacctgagagtgaagctgaagaaggagggctacagcaacatcagctacatcgtggtgaaccaccagggcatcagcagcagactgaagtacacccacctgaagaacaaggtgagcgagcacatccccgtgtaccagcaggaggagaaccagaccgacgtgtggaccctgctgaacggcagcaaggacgacttcctgatctacgacagatgcggcagactggtgtaccacctgggcctgcccttcagcttcctgaccttcccctacgtggaggaggccatcaagatcgcctactgcgagaagaagtgcggcaactgcagcctgaccaccctgaaggacgaggacttctgcaagagagtgagcctggccaccgtggacaagaccgtggagacccccagcccccactaccaccacgagcaccaccacaaccacggccaccagcacctgggcagcagcgagctgagcgagaaccagcagcccggcgcccccaacgcccccacccaccccgccccccccggcctgcaccaccaccacaagcacaagggccagcacagacagggccaccccgagaacagagacatgcccgccagcgaggacctgcaggacctgcagaagaagctgtgcagaaagagatgcatcaaccagctgctgtgcaagctgcccaccgacagcgagctggcccccagaagctgatgctgccactgcagacacctgatcttcgagaagaccggcagcgccatcacctgacagtgcaaggagaacctgcccagcctgtgcagctgacagggcctgagagccgaggagaacatcaccgagagctgccagtgaagactgccccccgccgcctgacagatcagccagcagctgatccccaccgaggccagcgccagctgaagatgaaagaaccaggccaagaagtgagagtgacccagcaactag

SEQ ID NO: 98305 - DNA, 630 bp, synthetic construct
  misc_feature 1..630: note = Description of Artificial Sequence: Synthetic coding sequence
  source 1..630: mol_type = other DNA
  misc_feature 1..174: note = DNA
  misc_feature 175: note = RNA
  misc_feature 176..630: note = DNA
atgtggagaagcctgggcctggccctggccctgtgcctgctgcccagcggcggcaccgagagccaggaccagagcagcctgtgcaagcagccccccgcctggagcatcagagaccaggaccccatgctgaacagcaacggcagcgtgaccgtggtggccctgctgcaggccagctgatacctgtgcatcctgcaggccagcaagctggaggacctgagagtgaagctgaagaaggagggctacagcaacatcagctacatcgtggtgaaccaccagggcatcagcagcagactgaagtacacccacctgaagaacaaggtgagcgagcacatccccgtgtaccagcaggaggagaaccagaccgacgtgtggaccctgctgaacggcagcaaggacgacttcctgatctacgacagatgcggcagactggtgtaccacctgggcctgcccttcagcttcctgaccttcccctacgtggaggaggccatcaagatcgcctactgcgagaagaagtgcggcaactgcagcctgaccaccctgaaggacgaggacttctgcaagagagtgagcctggccaccgtggacaagaccgtggagacccccagcccccactaccaccacgagcactag

SEQ ID NO: 98306 - DNA, 1146 bp, synthetic construct; identical to SEQ ID NO: 98304
  misc_feature 1..1146: note = Description of Artificial Sequence: Synthetic coding sequence
  source 1..1146: mol_type = other DNA
  misc_feature 1..174: note = DNA
  misc_feature 175: note = RNA
  misc_feature 176..897: note = DNA
  misc_feature 898: note = RNA
  misc_feature 899..951: note = DNA
  misc_feature 952: note = RNA
  misc_feature 953..987: note = DNA
  misc_feature 988: note = RNA
  misc_feature 989..1032: note = DNA
  misc_feature 1033: note = RNA
  misc_feature 1034..1053: note = DNA
  misc_feature 1054: note = RNA
  misc_feature 1055..1098: note = DNA
  misc_feature 1099: note = RNA
  misc_feature 1100..1104: note = DNA
  misc_feature 1105: note = RNA
  misc_feature 1106..1125: note = DNA
  misc_feature 1126: note = RNA
  misc_feature 1127..1131: note = DNA
  misc_feature 1132: note = RNA
  misc_feature 1133..1146: note = DNA

SEQ ID NO: 98307 - DNA, 933 bp, synthetic construct
  misc_feature 1..933: note = Description of Artificial Sequence: Synthetic coding sequence
  source 1..933: mol_type = other DNA
  misc_feature 1..174: note = DNA
  misc_feature 175: note = RNA
  misc_feature 176..897: note = DNA
  misc_feature 898: note = RNA
  misc_feature 899..933: note = DNA
atgtggagaagcctgggcctggccctggccctgtgcctgctgcccagcggcggcaccgagagccaggaccagagcagcctgtgcaagcagccccccgcctggagcatcagagaccaggaccccatgctgaacagcaacggcagcgtgaccgtggtggccctgctgcaggccagctgatacctgtgcatcctgcaggccagcaagctggaggacctgagagtgaagctgaagaaggagggctacagcaacatcagctacatcgtggtgaaccaccagggcatcagcagcagactgaagtacacccacctgaagaacaaggtgagcgagcacatccccgtgtaccagcaggaggagaaccagaccgacgtgtggaccctgctgaacggcagcaaggacgacttcctgatctacgacagatgcggcagactggtgtaccacctgggcctgcccttcagcttcctgaccttcccctacgtggaggaggccatcaagatcgcctactgcgagaagaagtgcggcaactgcagcctgaccaccctgaaggacgaggacttctgcaagagagtgagcctggccaccgtggacaagaccgtggagacccccagcccccactaccaccacgagcaccaccacaaccacggccaccagcacctgggcagcagcgagctgagcgagaaccagcagcccggcgcccccaacgcccccacccaccccgccccccccggcctgcaccaccaccacaagcacaagggccagcacagacagggccaccccgagaacagagacatgcccgccagcgaggacctgcaggacctgcagaagaagctgtgcagaaagagatgcatcaaccagctgctgtgcaagctgcccaccgacagcgagctggcccccagaagctgatgctgccactgcagacacctgatcttcgagtag

SEQ ID NO: 98308 - DNA, 1146 bp, synthetic construct; identical to SEQ ID NO: 98304
  misc_feature 1..1146: note = Description of Artificial Sequence: Synthetic coding sequence
  source 1..1146: mol_type = other DNA
  misc_feature 1..174: note = DNA
  misc_feature 175: note = RNA
  misc_feature 176..897: note = DNA
  misc_feature 898: note = RNA
  misc_feature 899..951: note = DNA
  misc_feature 952: note = RNA
  misc_feature 953..987: note = DNA
  misc_feature 988: note = RNA
  misc_feature 989..1032: note = DNA
  misc_feature 1033: note = RNA
  misc_feature 1034..1053: note = DNA
  misc_feature 1054: note = RNA
  misc_feature 1055..1098: note = DNA
  misc_feature 1099: note = RNA
  misc_feature 1100..1104: note = DNA
  misc_feature 1105: note = RNA
  misc_feature 1106..1125: note = DNA
  misc_feature 1126: note = RNA
  misc_feature 1127..1131: note = DNA
  misc_feature 1132: note = RNA
  misc_feature 1133..1146: note = DNA

SEQ ID NO: 98309 - DNA, 264 bp, synthetic construct
  misc_feature 1..264: note = Description of Artificial Sequence: Synthetic coding sequence
  source 1..264: mol_type = other DNA
  misc_feature 1..36: note = DNA
  misc_feature 37: note = RNA
  misc_feature 38..264: note = DNA
atggccctggccgtgagagtggtgtactgcggcgcctgaggctacaagagcaagtacctgcagctgaagaagaagctggaggacgagttccccggcagactggacatctgcggcgagggcaccccccaggccaccggcttcttcgaggtgatggtggccggcaagctgatccacagcaagaagaagggcgacggctacgtggacaccgagagcaagttcctgaagctggtggccgccatcaaggccgccctggcccagggctag

SEQ ID NO: 98310 - DNA, 267 bp, synthetic construct
  misc_feature 1..267: note = Description of Artificial Sequence: Synthetic coding sequence
  source 1..267: mol_type = other DNA
atggccctggccgtgagagtggtgtactgctgcggcgccggcggctacaagagcaagtacctgcagctgaagaagaagctggaggacgagttccccggcagactggacatctgcggcgagggcaccccccaggccaccggcttcttcgaggtgatggtggccggcaagctgatccacagcaagaagaagggcgacggctacgtggacaccgagagcaagttcctgaagctggtggccgccatcaaggccgccctggcccagggctag

SEQ ID NO: 98311 - DNA, 351 bp, synthetic construct
  misc_feature 1..351: note = Description of Artificial Sequence: Synthetic coding sequence
  source 1..351: mol_type = other DNA
  misc_feature 1..282: note = DNA
  misc_feature 283: note = RNA
  misc_feature 284..351: note = DNA
atgagcttctgcagcttcttcggcggcgaggtgttccagaaccacttcgagcccggcgtgtacgtgtgcgccaagtgcggctacgagctgttcagcagcagaagcaagtacgcccacagcagcccctggcccgccttcaccgagaccatccacgccgacagcgtggccaagagacccgagcacaacagaagcgaggccctgaaggtgagctgcggcaagtgcggcaacggcctgggccacgagttcctgaacgacggccccaagcccggccagagcagattctgaatcttcagcagcagcctgaagttcgtgcccaagggcaaggagaccagcgccagccagggccactag

SEQ ID NO: 98312 - DNA, 681 bp, synthetic construct
  misc_feature 1..681: note = Description of Artificial Sequence: Synthetic coding sequence
  source 1..681: mol_type = other DNA
atgagcttctgcagcttcttcggcggcgaggtgttccagaaccacttcgagcccggcgtgtacgtgtgcgccaagtgcggctacgagctgttcagcagcagaagcaagtacgcccacagcagcccctggcccgccttcaccgagaccatccacgccgacagcgtggccaagagacccgagcacaacagaagcgaggccctgaaggtgagaggccacagaggcggcggcggcaccggcgccgccagagagagcagagagcccgtgccccccagcagcctgtgcctgccccacagcagcagaggcctggaggccagcatccccggcctgctgcccctgcccggcagctgccaccccagactgagcggcgagcccggcctgctggtgcagatgtgggagaccggccaggtgagctgcaccggcagcagaaccaaggtgaacctgctgtgcagaagaagcgcctgggagatcggcgtgtgggaggagacccccagcgccagccccagcaagggcctgcactgcggctgcatcatggccagaagcagccccagctgcctggtgatcttccccggcgtgctgtggcaggtgtggcagtgggtgggccccagagtgcccgagagaagaccccaggccggcgccgtgcccatcctgaacatccagcagctggccgaggtgtgcccctag

SEQ ID NO: 98313 - DNA, 2328 bp, synthetic construct
  misc_feature 1..2328: note = Description of Artificial Sequence: Synthetic coding sequence
  source 1..2328: mol_type = other DNA
atggccagcgccggccacatcatcaccctgctgctgtggggctacctgctggagctgtggaccggcggccacaccgccgacaccacccaccccagactgagactgagccacaaggagctgctgaacctgaacagaaccagcatcttccacagccccttcggcttcctggacctgcacaccatgctgctggacgagtaccaggagagactgttcgtgggcggcagagacctggtgtacagcctgagcctggagagaatcagcgacggctacaaggagatccactggcccagcaccgccctgaagatggaggagtgcatcatgaagggcaaggacgccggcgagtgcgccaactacgtgagagtgctgcaccactacaacagaacccacctgctgacctgcggcaccggcgccttcgaccccgtgtgcgccttcatcagagtgggctaccacctggaggaccccctgttccacctggagagccccagaagcgagagaggcagaggcagatgccccttcgaccccagcagcagcttcatcagcaccctgatcggcagcgagctgttcgccggcctgtacagcgactactggagcagagacgccgccatcttcagaagcatgggcagactggcccacatcagaaccgagcacgacgacgagagactgctgaaggagcccaagttcgtgggcagctacatgatccccgacaacgaggacagagacgacaacaaggtgtacttcttcttcaccgagaaggccctggaggccgagaacaacgcccacgccatctacaccagagtgggcagactgtgcgtgaacgacgtgggcggccagagaatcctggtgaacaagtggagcaccttcctgaaggccagactggtgtgcagcgtgcccggcatgaacggcatcgacacctacttcgacgagctggaggacgtgttcctgctgcccaccagagaccacaagaaccccgtgatcttcggcctgttcaacaccaccagcaacatcttcagaggccacgccatctgcgtgtaccacatgagcagcatcagagccgccttcaacggcccctacgcccacaaggagggccccgagtaccactggagcgtgtacgagggcaaggtgccctaccccagacccggcagctgcgccagcaaggtgaacggcggcagatacggcaccaccaaggactaccccgacgacgccatcagattcgccagaagccaccccctgatgtaccaggccatcaagcccgcccacaagaagcccatcctggtgaagaccgacggcaagtacaacctgaagcagatcgccgtggacagagtggaggccgaggacggccagtacgacgtgctgttcatcggcaccgacaacggcatcgtgctgaaggtgatcaccatctacaaccaggagatggagagcatggaggaggtgatcctggaggagctgcagatcttcaaggaccccgtgcccatcatcagcatggagatcagcagcaagagacagcagctgtacatcggcagcgccagcgccgtggcccaggtgagattccaccactgcgacatgtacggcagcgcctgcgccgactgctgcctggccagagacccctactgcgcctgggacggcatcagctgcagcagatactaccccaccggcacccacgccaagagaagattcagaagacaggacgtgagacacggcaacgccgcccagcagtgcttcggccagcagttcgtgggcgacgccctggacaagaccgaggagcacctggcctacggcatcgagaacaacagcaccctgctggagtgcacccccagaagcctgcaggccaaggtgatctggttcgtgcagaagggcagagagaccagaaaggaggaggtgaagaccgacgacagagtggtgaagatggacctgggcctgctgttcctgagactgcacaagagcgacgccggcacctacttctgccagaccgtggagcacagcttcgtgcacaccgtgagaaagatcaccctggaggtggtggaggaggagaaggtggaggacatgttcaacaaggacgacgaggaggacagacaccacagaatgccctgccccgcccagagcagcatcagccagggcgccaagccctggtacaaggagttcctgcagctgatcggctacagcaacttccagagagtggaggagtactgcgagaaggtgtggtgcaccgacagaaagagaaagaagctgaagatgagccccagcaagtggaagtacgccaacccccaggagaagaagctgagaagcaagcccgagcactacagactgcccagacacaccctggacagctag

SEQ ID NO: 98314 - DNA, 2148 bp, synthetic construct
  misc_feature 1..2148: note = Description of Artificial Sequence: Synthetic coding sequence
  source 1..2148: mol_type = other DNA
atgctgctggacgagtaccaggagagactgttcgtgggcggcagagacctggtgtacagcctgagcctggagagaatcagcgacggctacaaggagatccactggcccagcaccgccctgaagatggaggagtgcatcatgaagggcaaggacgccggcgagtgcgccaactacgtgagagtgctgcaccactacaacagaacccacctgctgacctgcggcaccggcgccttcgaccccgtgtgcgccttcatcagagtgggctaccacctggaggaccccctgttccacctggagagccccagaagcgagagaggcagaggcagatgccccttcgaccccagcagcagcttcatcagcaccctgatcggcagcgagctgttcgccggcctgtacagcgactactggagcagagacgccgccatcttcagaagcatgggcagactggcccacatcagaaccgagcacgacgacgagagactgctgaaggagcccaagttcgtgggcagctacatgatccccgacaacgaggacagagacgacaacaaggtgtacttcttcttcaccgagaaggccctggaggccgagaacaacgcccacgccatctacaccagagtgggcagactgtgcgtgaacgacgtgggcggccagagaatcctggtgaacaagtggagcaccttcctgaaggccagactggtgtgcagcgtgcccggcatgaacggcatcgacacctacttcgacgagctggaggacgtgttcctgctgcccaccagagaccacaagaaccccgtgatcttcggcctgttcaacaccaccagcaacatcttcagaggccacgccatctgcgtgtaccacatgagcagcatcagagccgccttcaacggcccctacgcccacaaggagggccccgagtaccactggagcgtgtacgagggcaaggtgccctaccccagacccggcagctgcgccagcaaggtgaacggcggcagatacggcaccaccaaggactaccccgacgacgccatcagattcgccagaagccaccccctgatgtaccaggccatcaagcccgcccacaagaagcccatcctggtgaagaccgacggcaagtacaacctgaagcagatcgccgtggacagagtggaggccgaggacggccagtacgacgtgctgttcatcggcaccgacaacggcatcgtgctgaaggtgatcaccatctacaaccaggagatggagagcatggaggaggtgatcctggaggagctgcagatcttcaaggaccccgtgcccatcatcagcatggagatcagcagcaagagacagcagctgtacatcggcagcgccagcgccgtggcccaggtgagattccaccactgcgacatgtacggcagcgcctgcgccgactgctgcctggccagagacccctactgcgcctgggacggcatcagctgcagcagatactaccccaccggcacccacgccaagagaagattcagaagacaggacgtgagacacggcaacgccgcccagcagtgcttcggccagcagttcgtgggcgacgccctggacaagaccgaggagcacctggcctacggcatcgagaacaacagcaccctgctggagtgcacccccagaagcctgcaggccaaggtgatctggttcgtgcagaagggcagagagaccagaaaggaggaggtgaagaccgacgacagagtggtgaagatggacctgggcctgctgttcctgagactgcacaagagcgacgccggcacctacttctgccagaccgtggagcacagcttcgtgcacaccgtgagaaagatcaccctggaggtggtggaggaggagaaggtggaggacatgttcaacaaggacgacgaggaggacagacaccacagaatgccctgccccgcccagagcagcatcagccagggcgccaagccctggtacaaggagttcctgcagctgatcggctacagcaacttccagagagtggaggagtactgcgagaaggtgtggtgcaccgacagaaagagaaagaagctgaagatgagccccagcaagtggaagtacgccaacccccaggagaagaagctgagaagcaagcccgagcactacagactgcccagacacaccctggacagctag

SEQ ID NO: 98315 - DNA, 2301 bp, synthetic construct
  misc_feature 1..2301: note = Description of Artificial Sequence: Synthetic coding sequence
  source 1..2301: mol_type = other DNA
atggccagcgccggccacatcatcaccctgctgctgtggggctacctgctggagctgtggaccggcggccacaccgccgacaccacccaccccagactgagactgagccacaaggagctgctgaacctgaacagaaccagcatcttccacagccccttcggcttcctggacctgcacaccatgctgctggacgagtaccaggagagactgttcgtgggcggcagagacctggtgtacagcctgagcctggagagaatcagcgacggctacaaggagatccactggcccagcaccgccctgaagatggaggagtgcatcatgaagggcaaggacgccggcgagtgcgccaactacgtgagagtgctgcaccactacaacagaacccacctgctgacctgcggcaccggcgccttcgaccccgtgtgcgccttcatcagagtgggctaccacctggaggaccccctgttccacctggagagccccagaagcgagagaggcagaggcagatgccccttcgaccccagcagcagcttcatcagcaccctgatcggcagcgagctgttcgccggcctgtacagcgactactggagcagagacgccgccatcttcagaagcatgggcagactggcccacatcagaaccgagcacgacgacgagagactgctgaaggagcccaagttcgtgggcagctacatgatccccgacaacgaggacagagacgacaacaaggtgtacttcttcttcaccgagaaggccctggaggccgagaacaacgcccacgccatctacaccagagtgggcagactgtgcgtgaacgacgtgggcggccagagaatcctggtgaacaagtggagcaccttcctgaaggccagactggtgtgcagcgtgcccggcatgaacggcatcgacacctacttcgacgagctggaggacgtgttcctgctgcccaccagagaccacaagaaccccgtgatcttcggcctgttcaacaccaccagcaacatcttcagaggccacgccatctgcgtgtaccacatgagcagcatcagagccgccttcaacggcccctacgcccacaaggagggccccgagtaccactggagcgtgtacgagggcaaggtgccctaccccagacccggcagctgcgccagcaaggtgaacggcggcagatacggcaccaccaaggactaccccgacgacgccatcagattcgccagaagccaccccctgatgtaccaggccatcaagcccgcccacaagaagcccatcctggtgaagaccgacggcaagtacaacctgaagcagatcgccgtggacagagtggaggccgaggacggccagtacgacgtgctgttcatcggcaccgacaacggcatcgtgctgaaggtgatcaccatctacaaccaggagatggagagcatggaggaggtgatcctggaggagctgcagatcttcaaggaccccgtgcccatcatcagcatggagatcagcagcaagagacagcagctgtacatcggcagcgccagcgccgtggcccaggtgagattccaccactgcgacatgtacggcagcgcctgcgccgactgctgcctggccagagacccctactgcgcctgggacggcatcagctgcagcagatactaccccaccggcacccacgccaagagaagattcagaagacaggacgtgagacacggcaacgccgcccagcagtgcttcggccagcagttcgtgggcgacgccctggacaagaccgaggagcacctggcctacggcatcgagaacaacagcaccctgctggagtgcacccccagaagcctgcaggccaaggtgatctggttcgtgcagaagggcagagagaccagaaaggaggaggtgaagaccgacgacagagtggtgaagatggacctgggcctgctgttcctgagactgcacaagagcgacgccggcacctacttctgccagaccgtggagcacagcttcgtgcacaccgtgagaaagatcaccctggaggtggtggaggaggagaaggtggaggacatgttcaacaaggacgacgaggaggacagacaccacagaatgccctgccccgcccagagcagcatcagccagggcgccaagccctggtacaaggagttcctgcagctgatcggctacagcaacttccagagagtggaggagtactgcgagaaggtgtggtgcaccgacagaaagagaaagaagctgaagatgagccccagcaagtggaagtacgccaacccccagcactacagactgcccagacacaccctggacagctag

SEQ ID NO: 98316 - DNA, 2286 bp, synthetic construct
  misc_feature 1..2286: note = Description of Artificial Sequence: Synthetic coding sequence
  source 1..2286: mol_type = other DNA
atggccctgcccgccctgggcctggacccctggagcctgctgggcctgttcctgttccagctgctgcagctgctgctgcccaccaccaccgccggcggcggcggccagggccccatgcccagagtgagatactacgccggcgacgagagaagagccctgagcttcttccaccagaagggcctgcaggacttcgacaccctgctgctgagcggcgacggcaacaccctgtacgtgggcgccagagaggccatcctggccctggacatccaggaccccggcgtgcccagactgaagaacatgatcccctggcccgccagcgacagaaagaagagcgagtgcgccttcaagaagaagagcaacgagacccagtgcttcaacttcatcagagtgctggtgagctacaacgtgacccacctgtacacctgcggcaccttcgccttcagccccgcctgcaccttcatcgagctgcaggacagctacctgctgcccatcagcgaggacaaggtgatggagggcaagggccagagccccttcgaccccgcccacaagcacaccgccgtgctggtggacggcatgctgtacagcggcaccatgaacaacttcctgggcagcgagcccatcctgatgagaaccctgggcagccagcccgtgctgaagaccgacaacttcctgagatggctgcaccacgacgccagcttcgtggccgccatccccagcacccaggtggtgtacttcttcttcgaggagaccgccagcgagttcgacttcttcgagagactgcacaccagcagagtggccagagtgtgcaagaacgacgtgggcggcgagaagctgctgcagaagaagtggaccaccttcctgaaggcccagctgctgtgcacccagcccggccagctgcccttcaacgtgatcagacacgccgtgctgctgcccgccgacagccccaccgccccccacatctacgccgtgttcaccagccagtggcaggtgggcggcaccagaagcagcgccgtgtgcgccttcagcctgctggacatcgagagagtgttcaagggcaagtacaaggagctgaacaaggagaccagcagatggaccacctacagaggccccgagaccaaccccagacccggcagctgcagcgtgggccccagcagcgacaaggccctgaccttcatgaaggaccacttcctgatggacgagcaggtggtgggcacccccctgctggtgaagagcggcgtggagtacaccagactggccgtggagaccgcccagggcctggacggccacagccacctggtgatgtacctgggcaccaccaccggcagcctgcacaaggccgtggtgagcggcgacagcagcgcccacctggtggaggagatccagctgttccccgaccccgagcccgtgagaaacctgcagctggcccccacccagggcgccgtgttcgtgggcttcagcggcggcgtgtggagagtgcccagagccaactgcagcgtgtacgagagctgcgtggactgcgtgctggccagagacccccactgcgcctgggaccccgagagcagaacctgctgcctgctgagcgcccccaacctgaacagctggaagcaggacatggagagaggcaaccccgagtgggcctgcgccagcggccccatgagcagaagcctgagaccccagagcagaccccagatcatcaaggaggtgctggccgtgcccaacagcatcctggagctgccctgcccccacctgagcgccctggccagctactactggagccacggccccgccgccgtgcccgaggccagcagcaccgtgtacaacggcagcctgctgctgatcgtgcaggacggcgtgggcggcctgtaccagtgctgggccaccgagaacggcttcagctaccccgtgatcagctactgggtggacagccaggaccagaccctggccctggaccccgagctggccggcatccccagagagcacgtgaaggtgcccctgaccagagtgagcggcggcgccgccctggccgcccagcagagctactggccccacttcgtgaccgtgaccgtgctgttcgccctggtgctgagcggcgccctgatcatcctggtggccagccccctgagagccctgagagccagaggcaaggtgcagggctgcgagaccctgagacccggcgagaaggcccccctgagcagagagcagcacctgcagagccccaaggagtgcagaaccagcgccagcgacgtggacgccgacaacaactgcctgggcaccgaggtggcctag

SEQ ID NO: 98317 - DNA, 2286 bp, synthetic construct; identical to SEQ ID NO: 98316
  misc_feature 1..2286: note = Description of Artificial Sequence: Synthetic coding sequence
  source 1..2286: mol_type = other DNA

SEQ ID NO: 98318 - DNA, 2172 bp, synthetic construct
  misc_feature 1..2172: note = Description of Artificial Sequence: Synthetic coding sequence
  source 1..2172: mol_type = other DNA
atgcccagagtgagatactacgccggcgacgagagaagagccctgagcttcttccaccagaagggcctgcaggacttcgacaccctgctgctgagcggcgacggcaacaccctgtacgtgggcgccagagaggccatcctggccctggacatccaggaccccggcgtgcccagactgaagaacatgatcccctggcccgccagcgacagaaagaagagcgagtgcgccttcaagaagaagagcaacgagacccagtgcttcaacttcatcagagtgctggtgagctacaacgtgacccacctgtacacctgcggcaccttcgccttcagccccgcctgcaccttcatcgagctgcaggacagctacctgctgcccatcagcgaggacaaggtgatggagggcaagggccagagccccttcgaccccgcccacaagcacaccgccgtgctggtggacggcatgctgtacagcggcaccatgaacaacttcctgggcagcgagcccatcctgatgagaaccctgggcagccagcccgtgctgaagaccgacaacttcctgagatggctgcaccacgacgccagcttcgtggccgccatccccagcacccaggtggtgtacttcttcttcgaggagaccgccagcgagttcgacttcttcgagagactgcacaccagcagagtggccagagtgtgcaagaacgacgtgggcggcgagaagctgctgcagaagaagtggaccaccttcctgaaggcccagctgctgtgcacccagcccggccagctgcccttcaacgtgatcagacacgccgtgctgctgcccgccgacagccccaccgccccccacatctacgccgtgttcaccagccagtggcaggtgggcggcaccagaagcagcgccgtgtgcgccttcagcctgctggacatcgagagagtgttcaagggcaagtacaaggagctgaacaaggagaccagcagatggaccacctacagaggccccgagaccaaccccagacccggcagctgcagcgtgggccccagcagcgacaaggccctgaccttcatgaaggaccacttcctgatggacgagcaggtggtgggcacccccctgctggtgaagagcggcgtggagtacaccagactggccgtggagaccgcccagggcctggacggccacagccacctggtgatgtacctgggcaccaccaccggcagcctgcacaaggccgtggtgagcggcgacagcagcgcccacctggtggaggagatccagctgttccccgaccccgagcccgtgagaaacctgcagctggcccccacccagggcgccgtgttcgtgggcttcagcggcggcgtgtggagagtgcccagagccaactgcagcgtgtacgagagctgcgtggactgcgtgctggccagagacccccactgcgcctgggaccccgagagcagaacctgctgcctgctgagcgcccccaacctgaacagctggaagcaggacatggagagaggcaaccccgagtgggcctgcgccagcggccccatgagcagaagcctgagaccccagagcagaccccagatcatcaaggaggtgctggccgtgcccaacagcatcctggagctgccctgcccccacctgagcgccctggccagctactactggagccacggccccgccgccgtgcccgaggccagcagcaccgtgtacaacggcagcctgctgctgatcgtgcaggacggcgtgggcggcctgtaccagtgctgggccaccgagaacggcttcagctaccccgtgatcagctactgggtggacagccaggaccagaccctggccctggaccccgagctggccggcatccccagagagcacgtgaaggtgcccctgaccagagtgagcggcggcgccgccctggccgcccagcagagctactggccccacttcgtgaccgtgaccgtgctgttcgccctggtgctgagcggcgccctgatcatcctggtggccagccccctgagagccctgagagccagaggcaaggtgcagggctgcgagaccctgagacccggcgagaaggcccccctgagcagagagcagcacctgcagagccccaaggagtgcagaaccagcgccagcgacgtggacgccgacaacaactgcctgggcaccgaggtggcctag

SEQ ID NO: 98319 - DNA, 1890 bp, synthetic construct
  misc_feature 1..1890: note = Description of Artificial Sequence: Synthetic coding sequence
  source 1..1890: mol_type = other DNA
atgatcccctggcccgccagcgacagaaagaagagcgagtgcgccttcaagaagaagagcaacgaggagctgcaggacagctacctgctgcccatcagcgaggacaaggtgatggagggcaagggccagagccccttcgaccccgcccacaagcacaccgccgtgctggtggacggcatgctgtacagcggcaccatgaacaacttcctgggcagcgagcccatcctgatgagaaccctgggcagccagcccgtgctgaagaccgacaacttcctgagatggctgcaccacgacgccagcttcgtggccgccatccccagcacccaggtggtgtacttcttcttcgaggagaccgccagcgagttcgacttcttcgagagactgcacaccagcagagtggccagagtgtgcaagaacgacgtgggcggcgagaagctgctgcagaagaagtggaccaccttcctgaaggcccagctgctgtgcacccagcccggccagctgcccttcaacgtgatcagacacgccgtgctgctgcccgccgacagccccaccgccccccacatctacgccgtgttcaccagccagtggcaggtgggcggcaccagaagcagcgccgtgtgcgccttcagcctgctggacatcgagagagtgttcaagggcaagtacaaggagctgaacaaggagaccagcagatggaccacctacagaggccccgagaccaaccccagacccggcagctgcagcgtgggccccagcagcgacaaggccctgaccttcatgaaggaccacttcctgatggacgagcaggtggtgggcacccccctgctggtgaagagcggcgtggagtacaccagactggccgtggagaccgcccagggcctggacggccacagccacctggtgatgtacctgggcaccaccaccggcagcctgcacaaggccgtggtgagcggcgacagcagcgcccacctggtggaggagatccagctgttccccgaccccgagcccgtgagaaacctgcagctggcccccacccagggcgccgtgttcgtgggcttcagcggcggcgtgtggagagtgcccagagccaactgcagcgtgtacgagagctgcgtggactgcgtgctggccagagacccccactgcgcctgggaccccgagagcagaacctgctgcctgctgagcgcccccaacctgaacagctggaagcaggacatggagagaggcaaccccgagtgggcctgcgccagcggccccatgagcagaagcctgagaccccagagcagaccccagatcatcaaggaggtgctggccgtgcccaacagcatcctggagctgccctgcccccacctgagcgccctggccagctactactggagccacggccccgccgccgtgcccgaggccagcagcaccgtgtacaacggcagcctgctgctgatcgtgcaggacggcgtgggcggcctgtaccagtgctgggccaccgagaacggcttcagctaccccgtgatcagctactgggtggacagccaggaccagaccctggccctggaccccgagctggccggcatccccagagagcacgtgaaggtgcccctgaccagagtgagcggcggcgccgccctggccgcccagcagagctactggccccacttcgtgaccgtgaccgtgctgttcgccctggtgctgagcggcgccctgatcatcctggtggccagccccctgagagccctgagagccagaggcaaggtgcagggctgcgagaccctgagacccggcgagaaggcccccctgagcagagagcagcacctgcagagccccaaggagtgcagaaccagcgccagcgacgtggacgccgacaacaactgcctgggcaccgaggtggcctag

SEQ ID NO: 98320 - DNA, 2286 bp, synthetic construct; identical to SEQ ID NO: 98316
  misc_feature 1..2286: note = Description of Artificial Sequence: Synthetic coding sequence
  source 1..2286: mol_type = other DNA

SEQ ID NO: 98321 - DNA, 1890 bp, synthetic construct; identical to SEQ ID NO: 98319
  misc_feature 1..1890: note = Description of Artificial Sequence: Synthetic coding sequence
  source 1..1890: mol_type = other DNA

SEQ ID NO: 98322 - DNA, 663 bp, synthetic construct
  misc_feature 1..663: note = Description of Artificial Sequence: Synthetic coding sequence
  source 1..663: mol_type = other DNA
atgatcccctggcccgccagcgacagaaagaagagcgagtgcgccttcaagaagaagagcaacgagacccagtgcttcaacttcatcagagtgctggtgagctacaacgtgacccacctgtacacctgcggcaccttcgccttcagccccgcctgcaccttcatcgagctgcaggacagctacctgctgcccatcagcgaggacaaggtgatggagggcaagggccagagccccttcgaccccgcccacaagcacaccgccgtgctggtggacggcatgctgtacagcggcaccatgaacaacttcctgggcagcgagcccatcctgatgagaaccctgggcagccagcccgtgctgaagaccgacaacttcctgagatggctgcaccacgacgccagcttcgtggccgccatccccagcacccaggtggtgtacttcttcttcgaggagaccgccagcgagttcgacttcttcgagagactgcacaccagcagagtggccagagtgtgcaagaacgacgtgggcggcgagaagctgctgcagaagaagtggaccaccttcctgaaggcccagctgctgtgcacccagcccggccagctgcccttcaacgtgatcagacacgccgtgctgctgcccgccgacagccccaccgccccccactag

SEQ ID NO: 98323 - DNA, 966 bp, synthetic construct
  misc_feature 1..966: note = Description of Artificial Sequence: Synthetic coding sequence
  source 1..966: mol_type = other DNA
atggccctgcccgccctgggcctggacccctggagcctgctgggcctgttcctgttccagctgctgcagctgctgctgcccaccaccaccgccggcggcggcggccagggccccatgcccagagtgagatactacgccggcgacgagagaagagccctgagcttcttccaccagaagggcctgcaggacttcgacaccctgctgctgagcggcgacggcaacaccctgtacgtgggcgccagagaggccatcctggccctggacatccaggaccccggcgtgcccagactgaagaacatgatcccctggcccgccagcgacagaaagaagagcgagtgcgccttcaagaagaagagcaacgagacccagtgcttcaacttcatcagagtgctggtgagctacaacgtgacccacctgtacacctgcggcaccttcgccttcagccccgcctgcaccttcatcgagctgcaggacagctacctgctgcccatcagcgaggacaaggtgatggagggcaagggccagagccccttcgaccccgcccacaagcacaccgccgtgctggtggacggcatgctgtacagcggcaccatgaacaacttcctgggcagcgagcccatcctgatgagaaccctgggcagccagcccgtgctgaagaccgacaacttcctgagatggctgcaccacgacgccagcttcgtggccgccatccccagcacccaggtggtgtacttcttcttcgaggagaccgccagcgagttcgacttcttcgagagactgcacaccagcagagtggccagagtgtgcaagaacgacgtgggcggcgagaagctgctgcagaagaagtggaccaccttcctgaaggcccagctgctgtgcacccagcccggccagctgcccttcaacgtgatcagacacgccgtgctgctgcccgccgacagccccaccgccccccacatctactag

SEQ ID NO: 98324 - DNA, 711 bp, synthetic construct
  misc_feature 1..711: note = Description of Artificial Sequence: Synthetic coding sequence
  source 1..711: mol_type = other DNA
atggccctgcccgccctgggcctggacccctggagcctgctgggcctgttcctgttccagctgctgcagctgctgctgcccaccaccaccgccggcggcggcggccagggccccatgcccagagtgagatactacgccggcgacgagagaagagccctgagcttcttccaccagaagggcctgcaggacttcgacaccctgctgctgagcggcgacggcaacaccctgtacgtgggcgccagagaggccatcctggccctggacatccaggaccccggcgtgcccagactgaagaacatgatcccctggcccgccagcgacagaaagaagagcgagtgcgccttcaagaagaagagcaacgaggagctgcaggacagctacctgctgcccatcagcgaggacaaggtgatggagggcaagggccagagccccttcgaccccgcccacaagcacaccgccgtgctggtggacggcatgctgtacagcggcaccatgaacaacttcctgggcagcgagcccatcctgatgagaaccctgggcagccagcccgtgctgaagaccgacaacttcctgagatggctgcaccacgacgccagcttcgtggccgccatccccagcacccaggtggtgtacttcttcttcgaggagaccgccagcgagttcgacttcttcgagagactgcacaccagcagagtggccagagtgtgctag

SEQ ID NO: 98325 - DNA, 2172 bp, synthetic construct; identical to SEQ ID NO: 98318
  misc_feature 1..2172: note = Description of Artificial Sequence: Synthetic coding sequence
  source 1..2172: mol_type = other DNA

SEQ ID NO: 98326 - DNA, 3225 bp, synthetic construct
  misc_feature 1..3225: note = Description of Artificial Sequence: Synthetic coding sequence
  source 1..3225: mol_type = other DNA
atgaagggcacctgcgtgatcgcctggctgttcagcagcctgggcctgtggagactggcccaccccgaggcccagggcaccacccagtgccagagaaccgagcaccccgtgatcagctacaaggagatcggcccctggctgagagagttcagagccaagaacgccgtggacttcagccagctgaccttcgaccccggccagaaggagctggtggtgggcgccagaaactacctgttcagactgcagctggaggacctgagcctgatccaggccgtggagtgggagtgcgacgaggccaccaagaaggcctgctacagcaagggcaagagcaaggaggagtgccagaactacatcagagtgctgctggtgggcggcgacagactgttcacctgcggcaccaacgccttcacccccgtgtgcaccaacagaagcctgagcaacctgaccgagatccacgaccagatcagcggcatggccagatgcccctacagcccccagcacaacagcaccgccctgctgaccgccggcggcgagctgtacgccgccaccgccatggacttccccggcagagaccccgccatctacagaagcctgggcatcctgccccccctgagaaccgcccagtacaacagcaagtggctgaacgagcccaacttcgtgagcagctacgacatcggcaacttcacctacttcttcttcagagagaacgccgtggagcacgactgcggcaagaccgtgttcagcagagccgccagagtgtgcaagaacgacatcggcggcagattcctgctggaggacacctggaccaccttcatgaaggccagactgaactgcagcagacccggcgaggtgcccttctactacaacgagctgcagagcaccttcttcctgcccgagctggacctgatctacggcatcttcaccaccaacgtgaacagcatcgccgccagcgccgtgtgcgtgttcaacctgagcgccatcgcccaggccttcagcggccccttcaagtaccaggagaacagcagaagcgcctggctgccctaccccaaccccaacccccacttccagtgcggcaccgtggaccagggcctgtacgtgaacctgaccgagagaaacctgcaggacgcccagaagttcatcctgatgcacgaggtggtgcagcccgtgaccaccgtgcccagcttcatggaggacaacagcagattcagccacgtggccgtggacgtggtgcagggcagagaggccctggtgcacatcatctacctggccaccgactacggcaccatcaagaaggtgagagtgcccctgaaccagaccagcagcagctgcctgctggaggagatcgagctgttccccgagagaagaagagagcccatcagaagcctgcagatcctgcacagccagagcgtgctgttcgtgggcctgagagagcacgtggtgaagatccccctgaagagatgccagttctacagaaccagaagcacctgcatcggcgcccaggacccctactgcggctgggacgtggtgatgaagaagtgcaccagcctggaggagagcctgagcatgacccagtgggagcagagcatcagcgcctgccccaccagaaacctgaccgtggacggccacttcggcgtgtggagcccctggaccccctgcacccacaccgacggcagcgccgtgggcagctgcctgtgcagaaccagaagctgcgacagccccgccccccagtgcggcggctggcagtgcgagggccccggcatggagatcgccaactgcagcagaaacggcggctggaccccctggaccagctggagcccctgcagcaccacctgcggcatcggcttccaggtgagacagagaagctgcagcaaccccacccccagacacggcggcagagtgtgcgtgggccagaacagagaggagagatactgcaacgagcacctgctgtgccccccccacatgttctggaccggctggggcccctgggagagatgcaccgcccagtgcggcggcggcatccaggccagaagaagaatctgcgagaacggccccgactgcgccggctgcaacgtggagtaccagagctgcaacaccaacccctgccccgagctgaagaagaccaccccctggaccccctggacccccgtgaacatcagcgacaacggcggccactacgagcagagattcagatacacctgcaaggccagactggccgaccccaacctgctggaggtgggcagacagagaatcgagatgagatactgcagcagcgacggcaccagcggctgcagcaccgacggcctgagcggcgacttcctgagagccggcagatacagcgcccacaccgtgaacggcgcctggagcgcctggaccagctggagccagtgcagcagagactgcagcagaggcatcagaaacagaaagagagtgtgcaacaaccccgagcccaagtacggcggcatgccctgcctgggccccagcctggagtaccaggagtgcaacatcctgccctgccccgtggacggcgtgtggagctgctggagcccctggaccaagtgcagcgccacctgcggcggcggccactacatgagaaccagaagctgcagcaaccccgcccccgcctacggcggcgacatctgcctgggcctgcacaccgaggaggccctgtgcaacacccagccctgccccgagagctggagcgagtggagcgactggagcgagtgcgaggccagcggcgtgcaggtgagagccagacagtgcatcctgctgttccccatgggcagccagtgcagcggcaacaccaccgagagcagaccctgcgtgttcgacagcaacttcatccccgaggtgagcgtggccagaagcagcagcgtggaggagaagagatgcggcgagttcaacatgttccacatgatcgccgtgggcctgagcagcagcatcctgggctgcctgctgaccctgctggtgtacacctactgccagagataccagcagcagagccacgacgccaccgtgatccaccccgtgagccccgcccccctgaacaccagcatcaccaaccacatcaacaagctggacaagtacgacagcgtggaggccatcaaggccttcaacaagaacaacctgatcctggaggagagaaacaagtacttcaacccccacctgaccggcaagacctacagcaacgcctacttcaccgacctgaacaactacgacgagtactag

SEQ ID NO: 98327 - DNA, 765 bp, synthetic construct
  misc_feature 1..765: note = Description of Artificial Sequence: Synthetic coding sequence
  source 1..765: mol_type = other DNA
atgaagggcacctgcgtgatcgcctggctgttcagcagcctgggcctgtggagactggcccaccccgaggcccagggcaccacccagtgccagagaaccgagcaccccgtgatcagctacaaggagatcggcccctggctgagagagttcagagccaagaacgccgtggacttcagccagctgaccttcgaccccggccagaaggagctggtggtgggcgccagaaactacctgttcagactgcagctggaggacctgagcctgatccaggccgtggagtgggagtgcgacgaggccaccaagaaggcctgctacagcaagggcaagagcaaggaggagtgccagaactacatcagagtgctgctggtgggcggcgacagactgttcacctgcggcaccaacgccttcacccccgtgtgcaccaacagaagcctgagcaacctgaccgagatccacgaccagatcagcggcatggccagatgcccctacagcccccagcacaacagcaccgccctgctgaccgccggcggcgagctgtacgccgccaccgccatggacttccccggcagagaccccgccatctacagaagcctgggcatcctgccccccctgagaaccgcccagtacaacagcaagtggctgaacgagcccaacttcgtgagcagctacgacatcggcaacttcacctacttcttcttcagagagaacgccgtggagcacgactgcggcaagaccgtgttcagcagagccgccagagtgtgctag

SEQ ID NO: 98328 - DNA, 2001 bp, synthetic construct
  misc_feature 1..2001: note = Description of Artificial Sequence: Synthetic coding sequence
  source 1..2001: mol_type = other DNA
atgaccccccccccccccggcagagccgcccccagcgcccccagagccagagtgcccggcccccccgccagactgggcctgcccctgagactgagactgctgctgctgctgtgggccgccgccgccagcgcccagggccacctgagaagcggccccagaatcttcgccgtgtggaagggccacgtgggccaggacagagtggacttcggccagaccgagccccacaccgtgctgttccacgagcccggcagcagcagcgtgtgggtgggcggcagaggcaaggtgtacctgttcgacttccccgagggcaagaacgccagcgtgagaaccgtgaacatcggcagcaccaagggcagctgcctggacaagagagactgcgagaactacatcaccctgctggagagaagaagcgagggcctgctggcctgcggcaccaacgccagacaccccagctgctggaacctggtgaacggcaccgtggtgcccctgggcgagatgagaggctacgcccccttcagccccgacgagaacagcctggtgctgttcgagggcgacgaggtgtacagcaccatcagaaagcaggagtacaacggcaagatccccagattcagaagaatcagaggcgagagcgagctgtacaccagcgacaccgtgatgcagaacccccagttcatcaaggccaccatcgtgcaccaggaccaggcctacgacgacaagatctactacttcttcagagaggacaaccccgacaagaaccccgaggcccccctgaacgtgagcagagtggcccagctgtgcagaggcgaccagggcggcgagagcagcctgagcgtgagcaagtggaacaccttcctgaaggccatgctggtgtgcagcgacgccgccaccaacaagaacttcaacagactgcaggacgtgttcctgctgcccgaccccagcggccagtggagagacaccagagtgtacggcgtgttcagcaacccctggaactacagcgccgtgtgcgtgtacagcctgggcgacatcgacaaggtgttcagaaccagcagcctgaagggctaccacagcagcctgcccaaccccagacccggcaagtgcctgcccgaccagcagcccatccccaccgagaccttccaggtggccgacagacaccccgaggtggcccagagagtggagcccatgggccccctgaagacccccctgttccacagcaagtaccactaccagaaggtggccgtgcacagaatgcaggccagccacggcgagaccttccacgtgctgtacctgaccaccgacagaggcaccatccacaaggtggtggagcccggcgagcaggagcacagcttcgccttcaacatcatggagatccagcccttcagaagagccgccgccatccagaccatgagcctggacgccgagagaagaaagctgtacgtgagcagccagtgggaggtgagccaggtgcccctggacctgtgcgaggtgtacggcggcggctgccacggctgcctgatgagcagagacccctactgcggctgggaccagggcagatgcatcagcatctacagcagcgagagaagcgtgctgcagagcatcaaccccgccgagccccacaaggagtgccccaaccccaagcccgacaaggcccccctgcagaaggtgagcctggcccccaacagcagatactacctgagctgccccatggagagcagacacgccacctacagctggagacacaaggagaacgtggagcagagctgcgagcccggccaccagagccccaactgcatcctgttcatcgagaacctgaccgcccagcagtacggccactacttctgcgaggcccaggagggcagctacttcagagaggcccagcactggcagctgctgcccgaggacggcatcatggccgagcacctgctgggccacgcctgcgccctggccgccagcctgtggctgggcgtgctgcccaccctgaccctgggcctgctggtgcactag

SEQ ID NO: 98329 - DNA, 1506 bp, synthetic construct
  misc_feature 1..1506: note = Description of Artificial Sequence: Synthetic coding sequence
  source 1..1506: mol_type = other DNA
atgagaggctacgcccccttcagccccgacgagaacagcctggtgctgttcgagggcgacgaggtgtacagcaccatcagaaagcaggagtacaacggcaagatccccagattcagaagaatcagaggcgagagcgagctgtacaccagcgacaccgtgatgcagaacccccagttcatcaaggccaccatcgtgcaccaggaccaggcctacgacgacaagatctactacttcttcagagaggacaaccccgacaagaaccccgaggcccccctgaacgtgagcagagtggcccagctgtgcagaggcgaccagggcggcgagagcagcctgagcgtgagcaagtggaacaccttcctgaaggccatgctggtgtgcagcgacgccgccaccaacaagaacttcaacagactgcaggacgtgttcctgctgcccgaccccagcggccagtggagagacaccagagtgtacggcgtgttcagcaacccctggaactacagcgccgtgtgcgtgtacagcctgggcgacatcgacaaggtgttcagaaccagcagcctgaagggctaccacagcagcctgcccaaccccagacccggcaagtgcctgcccgaccagcagcccatccccaccgagaccttccaggtggccgacagacaccccgaggtggcccagagagtggagcccatgggccccctgaagacccccctgttccacagcaagtaccactaccagaaggtggccgtgcacagaatgcaggccagccacggcgagaccttccacgtgctgtacctgaccaccgacagaggcaccatccacaaggtggtggagcccggcgagcaggagcacagcttcgccttcaacatcatggagatccagcccttcagaagagccgccgccatccagaccatgagcctggacgccgagagaagaaagctgtacgtgagcagccagtgggaggtgagccaggtgcccctggacctgtgcgaggtgtacggcggcggctgccacggctgcctgatgagcagagacccctactgcggctgggaccagggcagatgcatcagcatctacagcagcgagagaagcgtgctgcagagcatcaaccccgccgagccccacaaggagtgccccaaccccaagcccgacaaggcccccctgcagaaggtgagcctggcccccaacagcagatactacctgagctgccccatggagagcagacacgccacctacagctggagacacaaggagaacgtggagcagagctgcgagcccggccaccagagccccaactgcatcctgttcatcgagaacctgaccgcccagcagtacggccactacttctgcgaggcccaggagggcagctacttcagagaggcccagcactggcagctgctgcccgaggacggcatcatggccgagcacctgctgggccacgcctgcgccctggccgccagcctgtggctgggcgtgctgcccaccctgaccctgggcctgctggtgcactag

SEQ ID NO: 98330 - DNA, 1959 bp, synthetic construct
  misc_feature 1..1959: note = Description of Artificial Sequence: Synthetic coding sequence
  source 1..1959: mol_type = other DNA
atgaccccccccccccccggcagagccgcccccagcgcccccagagccagagtgcccggcccccccgccagactgggcctgcccctgagactgagactgctgctgctgctgtgggccgccgccgccagcgcccagggccacctgagaagcggccccagaatcttcgccgtgtggaagggccacgtgggccaggacagagtggacttcggccagaccgagccccacaccgtgctgttccacgagcccggcagcagcagcgtgtgggtgggcggcagaggcaaggtgtacctgttcgacttccccgagggcaagaacgccagcgtgagaaccgactgcgagaactacatcaccctgctggagagaagaagcgagggcctgctggcctgcggcaccaacgccagacaccccagctgctggaacctggtgaacggcaccgtggtgcccctgggcgagatgagaggctacgcccccttcagccccgacgagaacagcctggtgctgttcgagggcgacgaggtgtacagcaccatcagaaagcaggagtacaacggcaagatccccagattcagaagaatcagaggcgagagcgagctgtacaccagcgacaccgtgatgcagaacccccagttcatcaaggccaccatcgtgcaccaggaccaggcctacgacgacaagatctactacttcttcagagaggacaaccccgacaagaaccccgaggcccccctgaacgtgagcagagtggcccagctgtgcagaggcgaccagggcggcgagagcagcctgagcgtgagcaagtggaacaccttcctgaaggccatgctggtgtgcagcgacgccgccaccaacaagaacttcaacagactgcaggacgtgttcctgctgcccgaccccagcggccagtggagagacaccagagtgtacggcgtgttcagcaacccctggaactacagcgccgtgtgcgtgtacagcctgggcgacatcgacaaggtgttcagaaccagcagcctgaagggctaccacagcagcctgcccaaccccagacccggcaagtgcctgcccgaccagcagcccatccccaccgagaccttccaggtggccgacagacaccccgaggtggcccagagagtggagcccatgggccccctgaagacccccctgttccacagcaagtaccactaccagaaggtggccgtgcacagaatgcaggccagccacggcgagaccttccacgtgctgtacctgaccaccgacagaggcaccatccacaaggtggtggagcccggcgagcaggagcacagcttcgccttcaacatcatggagatccagcccttcagaagagccgccgccatccagaccatgagcctggacgccgagagaagaaagctgtacgtgagcagccagtgggaggtgagccaggtgcccctggacctgtgcgaggtgtacggcggcggctgccacggctgcctgatgagcagagacccctactgcggctgggaccagggcagatgcatcagcatctacagcagcgagagaagcgtgctgcagagcatcaaccccgccgagccccacaaggagtgccccaaccccaagcccgacaaggcccccctgcagaaggtgagcctggcccccaacagcagatactacctgagctgccccatggagagcagacacgccacctacagctggagacacaaggagaacgtggagcagagctgcgagcccggccaccagagccccaactgcatcctgttcatcgagaacctgaccgcccagcagtacggccactacttctgcgaggcccaggagggcagctacttcagagaggcccagcactggcagctgctgcccgaggacggcatcatggccgagcacctgctgggccacgcctgcgccctggccgccagcctgtggctgggcgtgctgcccaccctgaccctgggcctgctggtgcactag

SEQ ID NO: 98331 - DNA, 1209 bp, synthetic construct
  misc_feature 1..1209: note = Description of Artificial Sequence: Synthetic coding sequence
  source 1..1209: mol_type = other DNA
atgaagcccaacatcatcttcgtgctgagcctgctgctgatcctggagaagcaggccgccgtgatgggccagaagggcggcagcaagggcagactgcccagcgagttcagccagttcccccacggccagaagggccagcactacagcggccagaagggcaagcagcagaccgagagcaagggcagcttcagcatccagtacacctaccacgtggacgccaacgaccacgaccagagcagaaagagccagcagtacgacctgaacgccctgcacaagaccaccaagagccagagacacctgggcggcagccagcagctgctgcacaacaagcaggagggcagagaccacgacaagagcaagggccacttccacagagtggtgatccaccacaagggcggcaaggcccacagaggcacccagaaccccagccaggaccagggcaacagccccagcggcaagggcatcagcagccagtacagcaacaccgaggagagactgtgggtgcacggcctgagcaaggagcagaccagcgtgagcggcgcccagaagggcagaaagcagggcggcagccagagcagctacgtgctgcagaccgaggagctggtggccaacaagcagcagagagagaccaagaacagccaccagaacaagggccactaccagaacgtggtggaggtgagagaggagcacagcagcaaggtgcagaccagcctgtgccccgcccaccaggacaagctgcagcacggcagcaaggacatcttcagcacccaggacgagctgctggtgtacaacaagaaccagcaccagaccaagaacctgaaccaggaccagcagcacggcagaaaggccaacaagatcagctaccagagcagcagcaccgaggagagaagactgcactacggcgagaacggcgtgcagaaggacgtgagccagagaagcatctacagccagaccgagaagctggtggccggcaagagccagatccaggcccccaaccccaagcaggagccctggcacggcgagaacgccaagggcgagagcggccagagcaccaacagagagcaggacctgctgagccacgagcagaagggcagacaccagcacggcagccacggcggcctggacatcgtgatcatcgagcaggaggacgacagcgacagacacctggcccagcacctgaacaacgacagaaaccccctgttcacctag

SEQ ID NO: 98332 - DNA, 1389 bp, synthetic construct
  misc_feature 1..1389: note = Description of Artificial Sequence: Synthetic coding sequence
  source 1..1389: mol_type = other DNA
atgaagcccaacatcatcttcgtgctgagcctgctgctgatcctggagaagcaggccgccgtgatgggccagaagggcggcagcaagggcagactgcccagcgagttcagccagttcccccacggccagaagggccagcactacagcggccagaagggcaagcagcagaccgagagcaagggcagcttcagcatccagtacacctaccacgtggacgccaacgaccacgaccagagcagaaagagccagcagtacgacctgaacgccctgcacaagaccaccaagagccagagacacctgggcggcagccagcagctgctgcacaacaagcaggagggcagagaccacgacaagagcaagggccacttccacagagtggtgatccaccacaagggcggcaaggcccacagaggcacccagaaccccagccaggaccagggcaacagccccagcggcaagggcatcagcagccagtacagcaacaccgaggagagactgtgggtgcacggcctgagcaaggagcagaccagcgtgagcggcgcccagaagggcagaaagcagggcggcagccagagcagctacgtgctgcagaccgaggagctggtggccaacaagcagcagagagagaccaagaacagccaccagaacaagggccactaccagaacgtggtggaggtgagagaggagcacagcagcaaggtgcagaccagcctgtgccccgcccaccaggacaagctgcagcacggcagcaaggacatcttcagcacccaggacgagctgctggtgtacaacaagaaccagcaccagaccaagaacctgaaccaggaccagcagcacggcagaaaggccaacaagatcagctaccagagcagcagcaccgaggagagaagactgcactacggcgagaacggcgtgcagaaggacgtgagccagagcagcatctacagccagaccgaggagaaggcccagggcaagagccagaagcagatcaccatccccagccaggagcaggagcacagccagaaggccaacaagatcagctaccagagcagcagcaccgaggagagaagactgcactacggcgagaacggcgtgcagaaggacgtgagccagagaagcatctacagccagaccgagaagctggtggccggcaagagccagatccaggcccccaaccccaagcaggagccctggcacggcgagaacgccaagggcgagagcggccagagcaccaacagagagcaggacctgctgagccacgagcagaagggcagacaccagcacggcagccacggcggcctggacatcgtgatcatcgagcaggaggacgacagcgacagacacctggcccagcacctgaacaacgacagaaaccccctgttcacctag

SEQ ID NO: 98333 - DNA, 1749 bp, synthetic construct
  misc_feature 1..1749: note = Description of Artificial Sequence: Synthetic coding sequence
  source 1..1749: mol_type = other DNA
atgaagagcatcatcctgttcgtgctgagcctgctgctgatcctggagaagcaggccgccgtgatgggccagaagggcggcagcaagggccagctgcccagcggcagcagccagttcccccacggccagaagggccagcactacttcggccagaaggaccagcagcacaccaagagcaagggcagcttcagcatccagcacacctaccacgtggacatcaacgaccacgactggaccagaaagagccagcagtacgacctgaacgccctgcacaaggccaccaagagcaagcagcacctgggcggcagccagcagctgctgaactacaagcaggagggcagagaccacgacaagagcaagggccacttccacatgatcgtgatccaccacaagggcggccaggcccaccacggcacccagaaccccagccaggaccagggcaacagccccagcggcaagggcctgagcagccagtgcagcaacaccgagaagagactgtgggtgcacggcctgagcaaggagcaggccagcgccagcggcgcccagaagggcagaacccagggcggcagccagagcagctacgtgctgcagaccgaggagctggtggtgaacaagcagcagagagagaccaagaacagccaccagaacaagggccactaccagaacgtggtggacgtgagagaggagcacagcagcaagctgcagaccagcctgcaccccgcccaccaggacagactgcagcacggccccaaggacatcttcaccacccaggacgagctgctggtgtacaacaagaaccagcaccagaccaagaacctgagccaggaccaggagcacggcagaaaggcccacaagatcagctaccccagcagcagaaccgaggagagacagctgcaccacggcgagaagagcgtgcagaaggacgtgagcaagggcagcatcagcatccagaccgaggagaagatccacggcaagagccagaaccaggtgaccatccacagccaggaccaggagcacggccacaaggagaacaagatcagctaccagagcagcagcaccgaggagagacacctgaactgcggcgagaagggcatccagaagggcgtgagcaagggcagcatcagcatccagaccgaggagcagatccacggcaagagccagaaccaggtgagaatccccagccaggcccaggagtacggccacaaggagaacaagatcagctaccagagcagcagcaccgaggagagaagactgaacagcggcgagaaggacgtgcagaagggcgtgagcaagggcagcatcagcatccagaccgaggagaagatccacggcaagagccagaaccaggtgaccatccccagccaggaccaggagcacggccacaaggagaacaagatgagctaccagagcagcagcaccgaggagagaagactgaactacggcggcaagagcacccagaaggacgtgagccagagcagcatcagcttccagatcgagaagctggtggagggcaagagccagatccagacccccaaccccaaccaggaccagtggagcggccagaacgccaagggcaagagcggccagagcgccgacagcaagcaggacctgctgagccacgagcagaagggcagatacaagcaggagagcagcgagagccacaacatcgtgatcaccgagcacgaggtggcccaggacgaccacctgacccagcagtacaacgaggacagaaaccccatcagcacctag

SEQ ID NO: 98334 - DNA, 447 bp, synthetic construct
  misc_feature 1..447: note = Description of Artificial Sequence: Synthetic coding sequence
  source 1..447: mol_type = other DNA
atggccgagagcgactgggacaccgtgaccgtgctgagaaagaagggccccaccgccgcccaggccaagagcaagcaggccatcctggccgcccagagaagaggcgaggacgtggagaccagcaagaagtgggccgccggccagaacaagcagcacagcatcaccaagaacaccgccaagctggacagagagaccgaggagctgcaccacgacagagtgaccctggaggtgggcaaggtgatccagcagggcagacagagcaagggcctgacccagaaggacctggccaccaagatcaacgagaagccccaggtgatcgccgactacgagagcggcagagccatccccaacaaccaggtgctgggcaagatcgagagagccatcggcctgaagctgagaggcaaggacatcggcaagcccatcgagaagggccccagagccaagtag

SEQ ID NO: 98335 - DNA, 8121 bp, synthetic construct
  misc_feature 1..8121: note = Description of Artificial Sequence: Synthetic coding sequence
  source 1..8121: mol_type = other DNA
atgagcacctgctgctggtgcacccccggcggcgccagcaccatcgacttcctgaagagatacgccagcaacacccccagcggcgagttccagaccgccgacgaggacctgtgctactgcctggagtgcgtggccgagtaccacaaggccagagacgagctgcccttcctgcacgaggtgctgtgggagctggagaccctgagactgatcaaccacttcgagaagagcatgaaggccgagatcggcgacgacgacgagctgtacatcgtggacaacaacggcgagatgcccctgttcgacatcaccggccaggacttcgagaacaagctgagagtgcccctgctggagatcctgaagtacccctacctgctgctgcacgagagagtgaacgagctgtgcgtggaggccctgtgcagaatggagcaggccaactgcagcttccaggtgttcgacaagcaccccggcatctacctgttcctggtgcaccccaacgagatggtgagaagatgggccatcctgaccgccagaaacctgggcaaggtggacagagacgactactacgacctgcaggaggtgctgctgtgcctgttcaaggtgatcgagctgggcctgctggagagccccgacatctacaccagcagcgtgctggagaagggcaagctgatcctgctgcccagccacatgtacgacaccaccaactacaagagctactggctgggcatctgcatgctgctgaccatcctggaggagcaggccatggacagcctgctgctgggcagcgacaagcagaacgacttcatgcagagcatcctgcacaccatggagagagaggccgacgacgacagcgtggaccccttctggcccgccctgcactgcttcatggtgatcctggacagactgggcagcaaggtgtggggccagctgatggaccccatcgtggccttccagaccatcatcaacaacgccagctacaacagagagatcagacacatcagaaacagcagcgtgagaaccaagctggagcccgagagctacctggacgacatggtgacctgcagccagatcgtgtacaactacaaccccgagaagaccaagaaggacagcggctggagaaccgccatctgccccgactactgccccaacatgtacgaggagatggagaccctggccagcgtgctgcagagcgacatcggccaggacatgagagtgcacaacagcaccttcctgtggttcatccccttcgtgcagagcctgatggacctgaaggacctgggcgtggcctacatcgcccaggtggtgaaccacctgtacagcgaggtgaaggaggtgctgaaccagaccgacgccgtgtgcgacaaggtgaccgagttcttcctgctgatcctggtgagcgtgatcgagctgcacagaaacaagaagtgcctgcacctgctgtgggtgagcagccagcagtgggtggaggccgtggtgaagtgcgccaagctgcccaccaccgccttcaccagaagcagcgagaagagcagcggcaactgcagcaagggcaccgccatgatcagcagcctgagcctgcacagcatgcccagcaacagcgtgcagctggcctacgtgcagctgatcagaagcctgctgaaggagggctaccagctgggccagcagagcctgtgcaagagattctgggacaagctgaacctgttcctgagaggcaacctgagcctgggctggcagctgaccagccaggagacccacgagctgcagagctgcctgaagcagatcatcagaaacatcaagttcaaggcccccccctgcaacaccttcgtggacctgaccagcgcctgcaagatcagccccgccagctacaacaaggaggagagcgagcagatgggcaagaccagcagaaaggacatgcactgcctggaggccagcagccccaccttcagcaaggagcccatgaaggtgcaggacagcgtgctgatcaaggccgacaacaccatcgagggcgacaacaacgagcagaactacatcaaggacgtgaagctggaggaccacctgctggccggcagctgcctgaagcagagcagcaagaacatcttcaccgagagagccgaggaccagatcaagatcagcaccagaaagcagaagagcgtgaaggagatcagcagctacacccccaaggactgcaccagcagaaacggccccgagagaggctgcgacagaggcatcatcgtgagcaccagactgctgaccgacagcagcaccgacgccctggagaaggtgagcaccagcaacgaggacttcagcctgaaggacgacgccctggccaagaccagcaagagaaagaccaaggtgcagaaggacgagatctgcgccaagctgagccacgtgatcaagaagcagcacagaaagagcaccctggtggacaacaccatcaacctggacgagaacctgaccgtgagcaacatcgagagcttctacagcagaaaggacaccggcgtgcagaagggcgacggcttcatccacaacctgagcctggaccccagcggcgtgctggacgacaagaacggcgagcagaagagccagaacaacgtgctgcccaaggagaagcagctgaagaacgaggagctggtgatcttcagcttccacgagaacaactgcaagatccaggagttccacgtggacggcaaggagctgatccccttcaccgagatgaccaacgccagcgagaagaagagcagccccttcaaggacctgatgaccgtgcccgagagcagagacgaggagatgagcaacagcaccagcgtgatctacagcaacctgaccagagagcaggcccccgacatcagccccaagagcgacaccctgaccgacagccagatcgacagagacctgcacaagctgagcctgctggcccaggccagcgtgatcaccttccccagcgacagcccccagaacagcagccagctgcagagaaaggtgaaggaggacaagagatgcttcaccgccaaccagaacaacgtgggcgacaccagcagaggccaggtgatcatcatcagcgacagcgacgacgacgacgacgagagaatcctgagcctggagaagctgaccaagcaggacaagatctgcctggagagagagcaccccgagcagcacgtgagcaccgtgaacagcaaggaggagaagaaccccgtgaaggaggagaagaccgagaccctgttccagttcgaggagagcgacagccagtgcttcgagttcgagagcagcagcgaggtgttcagcgtgtggcaggaccaccccgacgacaacaacagcgtgcaggacggcgagaagaagtgcctggcccccatcgccaacaccaccaacggccagggctgcaccgactacgtgagcgaggtggtgaagaagggcgccgagggcatcgaggagcacaccagacccagaagcatcagcgtggaggagttctgcgagatcgaggtgaagaagcccaagagaaagagaagcgagaagcccatggccgaggaccccgtgagacccagcagcagcgtgagaaacgagggccagagcgacaccaacaagagagacctggtgggcaacgacttcaagagcatcgacagaagaaccagcacccccaacagcagaatccagagagccaccaccgtgagccagaagaagagcagcaagctgtgcacctgcaccgagcccatcagaaaggtgcccgtgagcaagacccccaagaagacccacagcgacgccaagaagggccagaacagaagcagcaactacctgagctgcagaaccacccccgccatcgtgccccccaagaagttcagacagtgccccgagcccaccagcaccgccgagaagctgggcctgaagaagggccccagaaaggcctacgagctgagccagagaagcctggactacgtggcccagctgagagaccacggcaagaccgtgggcgtggtggacaccagaaagaagaccaagctgatcagcccccagaacctgagcgtgagaaacaacaagaagctgctgaccagccaggagctgcagatgcagagacagatcagacccaagagccagaagaacagaagaagactgagcgactgcgagagcaccgacgtgaagagagccggcagccacaccgcccagaacagcgacatcttcgtgcccgagagcgacagaagcgactacaactgcaccggcggcaccgaggtgctggccaacagcaacagaaagcagctgatcaagtgcatgcccagcgagcccgagaccatcaaggccaagcacggcagccccgccaccgacgacgcctgccccctgaaccagtgcgacagcgtggtgctgaacggcaccgtgcccaccaacgaggtgatcgtgagcaccagcgaggaccccctgggcggcggcgaccccaccgccagacacatcgagatggccgccctgaaggagggcgagcccgacagcagcagcgacgccgaggaggacaacctgttcctgacccagaacgaccccgaggacatggacctgtgcagccagatggagaacgacaactacaagctgatcgagctgatccacggcaaggacaccgtggaggtggaggaggacagcgtgagcagaccccagctggagagcctgagcggcaccaagtgcaagtacaaggactgcctggagaccaccaagaaccagggcgagtactgccccaagcacagcgaggtgaaggccgccgacgaggacgtgttcagaaagcccggcctgcccccccccgccagcaagcccctgagacccaccaccaagatcttcagcagcaagagcaccagcagaatcgccggcctgagcaagagcctggagaccagcagcgccctgagccccagcctgaagaacaagagcaagggcatccagagcatcctgaaggtgccccagcccgtgcccctgatcgcccagaagcccgtgggcgagatgaagaacagctgcaacgtgctgcacccccagagccccaacaacagcaacagacagggctgcaaggtgcccttcggcgagagcaagtacttccccagcagcagccccgtgaacatcctgctgagcagccagagcgtgagcgacaccttcgtgaaggaggtgctgaagtggaagtacgagatgttcctgaacttcggccagtgcggcccccccgccagcctgtgccagagcatcagcagacccgtgcccgtgagattccacaactacggcgactacttcaacgtgttcttccccctgatggtgctgaacaccttcgagaccgtggcccaggagtggctgaacagccccaacagagagaacttctaccagctgcaggtgagaaagttccccgccgactacatcaagtactgggagttcgccgtgtacctggaggagtgcgagctggccaagcagctgtaccccaaggagaacgacctggtgttcctggcccccgagagaatcaacgaggagaagaaggacaccgagagaaacgacatccaggacctgcacgagtaccacagcggctacgtgcacaagttcagaagaaccagcgtgatgagaaacggcaagaccgagtgctacctgagcatccagacccaggagaacttccccgccaacctgaacgagctggtgaactgcatcgtgatcagcagcctggtgaccacccagagaaagctgaaggccatgagcctgctgggcagcagaaaccagctggccagagccgtgctgaaccccaaccccatggacttctgcaccaaggacctgctgaccaccaccagcgagagaatcatcgcctacctgagagacttcaacgaggaccagaagaaggccatcgagaccgcctacgccatggtgaagcacagccccagcgtggccaagatctgcctgatccacggcccccccggcaccggcaagagcaagaccatcgtgggcctgctgtacagactgctgaccgagaaccagagaaagggccacagcgacgagaacagcaacgccaagatcaagcagaacagagtgctggtgtgcgcccccagcaacgccgccgtggacgagctgatgaagaagatcatcctggagttcaaggagaagtgcaaggacaagaagaaccccctgggcaactgcggcgacatcaacctggtgagactgggccccgagaagagcatcaacagcgaggtgctgaagttcagcctggacagccaggtgaaccacagaatgaagaaggagctgcccagccacgtgcaggccatgcacaagagaaaggagttcctggactaccagctggacgagctgagcagacagagagccctgtgcagaggcggcagagagatccagagacaggagctggacgagaacatcagcaaggtgagcaaggagagacaggagctggccagcaagatcaaggaggtgcagggcagaccccagaagacccagagcatcatcatcctggagagccacatcatctgctgcaccctgagcaccagcggcggcctgctgctggagagcgccttcagaggccagggcggcgtgcccttcagctgcgtgatcgtggacgaggccggccagagctgcgagatcgagaccctgacccccctgatccacagatgcaacaagctgatcctggtgggcgaccccaagcagctgccccccaccgtgatcagcatgaaggcccaggagtacggctacgaccagagcatgatggccagattctgcagactgctggaggagaacgtggagcacaacatgatcagcagactgcccatcctgcagctgaccgtgcagtacagaatgcaccccgacatctgcctgttccccagcaactacgtgtacaacagaaacctgaagaccaacagacagaccgaggccatcagatgcagcagcgactggcccttccagccctacctggtgttcgacgtgggcgacggcagcgagagaagagacaacgacagctacatcaacgtgcaggagatcaagctggtgatggagatcatcaagctgatcaaggacaagagaaaggacgtgagcttcagaaacatcggcatcatcacccactacaaggcccagaagaccatgatccagaaggacctggacaaggagttcgacagaaagggccccgccgaggtggacaccgtggacgccttccagggcagacagaaggactgcgtgatcgtgacctgcgtgagagccaacagcatccagggcagcatcggcttcctggccagcctgcagagactgaacgtgaccatcaccagagccaagtacagcctgttcatcctgggccacctgagaaccctgatgcagctgctgcccagaagcttctgcgtgcacgtgaaccacagccccttcttcagccccgagcccaagtacctgcactgggccctgaaggagaaccagcactggaaccagctgatccaggacgcccagaagagaggcgccatcatcaagacctgcgacaagaactacagacacgacgccgtgaagatcctgaagctgaagcccgtgctgcagagaagcctgacccacccccccaccatcgcccccgagggcagcagaccccagggcggcctgcccagcagcaagctggacagcggcttcgccaagaccagcgtggccgccagcctgtaccacacccccagcgacagcaaggagatcaccctgaccgtgaccagcaaggaccccgagagaccccccgtgcacgaccagctgcaggaccccagactgctgaagagaatgggcatcgaggtgaagggcggcatcttcctgtgggacccccagcccagcagcccccagcaccccggcgccaccccccccaccggcgagcccggcttccccgtggtgcaccaggacctgagccacatccagcagcccgccgccgtggtggccgccctgagcagccacaagccccccgtgagaggcgagccccccgccgccagccccgaggccagcacctgccagagcaagtgcgacgaccccgaggaggagctgtgccacagaagagaggccagagccttcagcgagggcgagcaggagaagtgcggcagcgagacccaccacaccagaagaaacagcagatgggacaagagaaccctggagcaggaggacagcagcagcaagaagagaaagctgctgtag

SEQ ID NO: 98336 - DNA, 7935 bp, synthetic construct
  misc_feature 1..7935: note = Description of Artificial Sequence: Synthetic coding sequence
  source 1..7935: mol_type = other DNA
atgagcacctgctgctggtgcacccccggcggcgccagcaccatcgacttcctgaagagatacgccagcaacacccccagcggcgagttccagaccgccgacgaggacctgtgctactgcctggagtgcgtggccgagtaccacaaggccagagacgagctgcccttcctgcacgaggtgctgtgggagctggagaccctgagactgatcaaccacttcgagaagagcatgaaggccgagatcggcgacgacgacgagctgtacatcgtggacaacaacggcgagatgcccctgttcgacatcaccggccaggacttcgagaacaagctgagagtgcccctgctggagatcctgaagtacccctacctgctgctgcacgagagagtgaacgagctgtgcgtggaggccctgtgcagaatggagcaggccaactgcagcttccaggtgttcgacaagcaccccggcatctacctgttcctggtgcaccccaacgagatggtgagaagatgggccatcctgaccgccagaaacctgggcaaggtggacagagacgactactacgacctgcaggaggtgctgctgtgcctgttcaaggtgatcgagctgggcctgctggagagccccgacatctacaccagcagcgtgctggagaagggcaagctgatcctgctgcccagccacatgtacgacaccaccaactacaagagctactggctgggcatctgcatgctgctgaccatcctggaggagcaggccatggacagcctgctgctgggcagcgacaagcagaacgacttcatgcagagcatcctgcacaccatggagagagaggccgacgacgacagcgtggaccccttctggcccgccctgcactgcttcatggtgatcctggacagactgggcagcaaggtgtggggccagctgatggaccccatcgtggccttccagaccatcatcaacaacgccagctacaacagagagatcagacacatcagaaacagcagcgtgagaaccaagctggagcccgagagctacctggacgacatggtgacctgcagccagatcgtgtacaactacaaccccgagaagaccaagaaggacagcggctggagaaccgccatctgccccgactactgccccaacatgtacgaggagatggagaccctggccagcgtgctgcagagcgacatcggccaggacatgagagtgcacaacagcaccttcctgtggttcatccccttcgtgcagagcctgatggacctgaaggacctgggcgtggcctacatcgcccaggtggtgaaccacctgtacagcgaggtgaaggaggtgctgaaccagaccgacgccgtgtgcgacaaggtgaccgagttcttcctgctgatcctggtgagcgtgatcgagctgcacagaaacaagaagtgcctgcacctgctgtgggtgagcagccagcagtgggtggaggccgtggtgaagtgcgccaagctgcccaccaccgccttcaccagaagcagcgagaagagcagcggcaactgcagcaagggcaccgccatgatcagcagcctgagcctgcacagcatgcccagcaacagcgtgcagctggcctacgtgcagctgatcagaagcctgctgaaggagggctaccagctgggccagcagagcctgtgcaagagattctgggacaagctgaacctgttcctgagaggcaacctgagcctgggctggcagctgaccagccaggagacccacgagctgcagagctgcctgaagcagatcatcagaaacatcaagttcaaggcccccccctgcaacaccttcgtggacctgaccagcgcctgcaagatcagccccgccagctacaacaaggaggagagcgagcagatgggcaagaccagcagaaaggacatgcactgcctggaggccagcagccccaccttcagcaaggagcccatgaaggtgcaggacagcgtgctgatcaaggccgacaacaccatcgagggcgacaacaacgagcagaactacatcaaggacgtgaagctggaggaccacctgctggccggcagctgcctgaagcagagcagcaagaacatcttcaccgagagagccgaggaccagatcaagatcagcaccagaaagcagaagagcgtgaaggagatcagcagctacacccccaaggactgcaccagcagaaacggccccgagagaggctgcgacagaggcatcatcgtgagcaccagactgctgaccgacagcagcaccgacgccctggagaaggtgagcaccagcaacgaggacttcagcctgaaggacgacgccctggccaagaccagcaagagaaagaccaaggtgcagaaggacgagatctgcgccaagctgagccacgtgatcaagaagcagcacagaaagagcaccctggtggacaacaccatcaacctggacgagaacctgaccgtgagcaacatcgagagcttctacagcagaaaggacaccggcgtgcagaagggcgacggcttcatccacaacctgagcctggaccccagcggcgtgctggacgacaagaacggcgagcagaagagccagaacaacgtgctgcccaaggagaagcagctgaagaacgaggagctggtgatcttcagcttccacgagaacaactgcaagatccaggagttccacgtggacggcaaggagctgatccccttcaccgagatgaccaacgccagcgagaagaagagcagccccttcaaggacctgatgaccgtgcccgagagcagagacgaggagatgagcaacagcaccagcgtgatctacagcaacctgaccagagagcaggcccccgacatcagccccaagagcgacaccctgaccgacagccagatcgacagagacctgcacaagctgagcctgctggcccaggccagcgtgatcaccttccccagcgacagcccccagaacagcagccagctgcagagaaaggtgaaggaggacaagagatgcttcaccgccaaccagaacaacgtgggcgacaccagcagaggccaggtgatcatcatcagcgacagcgacgacgacgacgacgagagaatcctgagcctggagaagctgaccaagcaggacaagatctgcctggagagagagcaccccgagcagcacgtgagcaccgtgaacagcaaggaggagaagaaccccgtgaaggaggagaagaccgagaccctgttccagttcgaggagagcgacagccagtgcttcgagttcgagagcagcagcgaggtgttcagcgtgtggcaggaccaccccgacgacaacaacagcgtgcaggacggcgagaagaagtgcctggcccccatcgccaacaccaccaacggccagggctgcaccgactacgtgagcgaggtggtgaagaagggcgccgagggcatcgaggagcacaccagacccagaagcatcagcgtggaggagttctgcgagatcgaggtgaagaagcccaagagaaagagaagcgagaagcccatggccgaggaccccgtgagacccagcagcagcgtgagaaacgagggccagagcgacaccaacaagagagacctggtgggcaacgacttcaagagcatcgacagaagaaccagcacccccaacagcagaatccagagagccaccaccgtgagccagaagaagagcagcaagctgtgcacctgcaccgagcccatcagaaaggtgcccgtgagcaagacccccaagaagacccacagcgacgccaagaagggccagaacagaagcagcaactacctgagctgcagaaccacccccgccatcgtgccccccaagaagttcagacagtgccccgagcccaccagcaccgccgagaagctgggcctgaagaagggccccagaaaggcctacgagctgagccagagaagcctggactacgtggcccagctgagagaccacggcaagaccgtgggcgtggtggacaccagaaagaagaccaagctgatcagcccccagaacctgagcgtgagaaacaacaagaagctgctgaccagccaggagctgcagatgcagagacagatcagacccaagagccagaagaacagaagaagactgagcgactgcgagagcaccgacgtgaagagagccggcagccacaccgcccagaacagcgacatcttcgtgcccgagagcgacagaagcgactacaactgcaccggcggcaccgaggtgctggccaacagcaacagaaagcagctgatcaagtgcatgcccagcgagcccgagaccatcaaggccaagcacggcagccccgccaccgacgacgcctgccccctgaaccagtgcgacagcgtggtgctgaacggcaccgtgcccaccaacgaggtgatcgtgagcaccagcgaggaccccctgggcggcggcgaccccaccgccagacacatcgagatggccgccctgaaggagggcgagcccgacagcagcagcgacgccgaggaggacaacctgttcctgacccagaacgaccccgaggacatggacctgtgcagccagatggagaacgacaactacaagctgatcgagctgatccacggcaaggacaccgtggaggtggaggaggacagcgtgagcagaccccagctggagagcctgagcggcaccaagtgcaagtacaaggactgcctggagaccaccaagaaccagggcgagtactgccccaagcacagcgaggtgaaggccgccgacgaggacgtgttcagaaagcccggcctgcccccccccgccagcaagcccctgagacccaccaccaagatcttcagcagcaagagcaccagcagaatcgccggcctgagcaagagcctggagaccagcagcgccctgagccccagcctgaagaacaagagcaagggcatccagagcatcctgaaggtgccccagcccgtgcccctgatcgcccagaagcccgtgggcgagatgaagaacagctgcaacgtgctgcacccccagagccccaacaacagcaacagacagggctgcaaggtgcccttcggcgagagcaagtacttccccagcagcagccccgtgaacatcctgctgagcagccagagcgtgagcgacaccttcgtgaaggaggtgctgaagtggaagtacgagatgttcctgaacttcggccagtgcggcccccccgccagcctgtgccagagcatcagcagacccgtgcccgtgagattccacaactacggcgactacttcaacgtgttcttccccctgatggtgctgaacaccttcgagaccgtggcccaggagtggctgaacagccccaacagagagaacttctaccagctgcaggtgagaaagttccccgccgactacatcaagtactgggagttcgccgtgtacctggaggagtgcgagctggccaagcagctgtaccccaaggagaacgacctggtgttcctggcccccgagagaatcaacgaggagaagaaggacaccgagagaaacgacatccaggacctgcacgagtaccacagcggctacgtgcacaagttcagaagaaccagcgtgatgagaaacggcaagaccgagtgctacctgagcatccagacccaggagaacttccccgccaacctgaacgagctggtgaactgcatcgtgatcagcagcctggtgaccacccagagaaagctgaaggccatgagcctgctgggcagcagaaaccagctggccagagccgtgctgaaccccaaccccatggacttctgcaccaaggacctgctgaccaccaccagcgagagaatcatcgcctacctgagagacttcaacgaggaccagaagaaggccatcgagaccgcctacgccatggtgaagcacagccccagcgtggccaagatctgcctgatccacggcccccccggcaccggcaagagcaagaccatcgtgggcctgctgtacagactgctgaccgagaaccagagaaagggccacagcgacgagaacagcaacgccaagatcaagcagaacagagtgctggtgtgcgcccccagcaacgccgccgtggacgagctgatgaagaagatcatcctggagttcaaggagaagtgcaaggacaagaagaaccccctgggcaactgcggcgacatcaacctggtgagactgggccccgagaagagcatcaacagcgaggtgctgaagttcagcctggacagccaggtgaaccacagaatgaagaaggagctgcccagccacgtgcaggccatgcacaagagaaaggagttcctggactaccagctggacgagctgagcagacagagagccctgtgcagaggcggcagagagatccagagacaggagctggacgagaacatcagcaaggtgagcaaggagagacaggagctggccagcaagatcaaggaggtgcagggcagaccccagaagacccagagcatcatcatcctggagagccacatcatctgctgcaccctgagcaccagcggcggcctgctgctggagagcgccttcagaggccagggcggcgtgcccttcagctgcgtgatcgtggacgaggccggccagagctgcgagatcgagaccctgacccccctgatccacagatgcaacaagctgatcctggtgggcgaccccaagcagctgccccccaccgtgatcagcatgaaggcccaggagtacggctacgaccagagcatgatggccagattctgcagactgctggaggagaacgtggagcacaacatgatcagcagactgcccatcctgcagctgaccgtgcagtacagaatgcaccccgacatctgcctgttccccagcaactacgtgtacaacagaaacctgaagaccaacagacagaccgaggccatcagatgcagcagcgactggcccttccagccctacctggtgttcgacgtgggcgacggcagcgagagaagagacaacgacagctacatcaacgtgcaggagatcaagctggtgatggagatcatcaagctgatcaaggacaagagaaaggacgtgagcttcagaaacatcggcatcatcacccactacaaggcccagaagaccatgatccagaaggacctggacaaggagttcgacagaaagggcttcctggccagcctgcagagactgaacgtgaccatcaccagagccaagtacagcctgttcatcctgggccacctgagaaccctgatggagaaccagcactggaaccagctgatccaggacgcccagaagagaggcgccatcatcaagacctgcgacaagaactacagacacgacgccgtgaagatcctgaagctgaagcccgtgctgcagagaagcctgacccacccccccaccatcgcccccgagggcagcagaccccagggcggcctgcccagcagcaagctggacagcggcttcgccaagaccagcgtggccgccagcctgtaccacacccccagcgacagcaaggagatcaccctgaccgtgaccagcaaggaccccgagagaccccccgtgcacgaccagctgcaggaccccagactgctgaagagaatgggcatcgaggtgaagggcggcatcttcctgtgggacccccagcccagcagcccccagcaccccggcgccaccccccccaccggcgagcccggcttccccgtggtgcaccaggacctgagccacatccagcagcccgccgccgtggtggccgccctgagcagccacaagccccccgtgagaggcgagccccccgccgccagccccgaggccagcacctgccagagcaagtgcgacgaccccgaggaggagctgtgccacagaagagaggccagagccttcagcgagggcgagcaggagaagtgcggcagcgagacccaccacaccagaagaaacagcagatgggacaagagaaccctggagcaggaggacagcagcagcaagaagagaaagctgctgtag

SEQ ID NO: 98337 - DNA, 2847 bp, synthetic construct
  misc_feature 1..2847: note = Description of Artificial Sequence: Synthetic coding sequence
  source 1..2847: mol_type = other DNA
gtggcccaggagtggctgaacagccccaacagagagaacttctaccagctgcaggtgagaaagttccccgccgactacatcaagtactgggagttcgccgtgtacctggaggagtgcgagctggccaagcagctgtaccccaaggagaacgacctggtgttcctggcccccgagagaatcaacgaggagaagaaggacaccgagagaaacgacatccaggacctgcacgagtaccacagcggctacgtgcacaagttcagaagaaccagcgtgatgagaaacggcaagaccgagtgctacctgagcatccagacccaggagaacttccccgccaacctgaacgagctggtgaactgcatcgtgatcagcagcctggtgaccacccagagaaagctgaaggccatgagcctgctgggcagcagaaaccagctggccagagccgtgctgaaccccaaccccatggacttctgcaccaaggacctgctgaccaccaccagcgagagaatcatcgcctacctgagagacttcaacgaggaccagaagaaggccatcgagaccgcctacgccatggtgaagcacagccccagcgtggccaagatctgcctgatccacggcccccccggcaccggcaagagcaagaccatcgtgggcctgctgtacagactgctgaccgagaaccagagaaagggccacagcgacgagaacagcaacgccaagatcaagcagaacagagtgctggtgtgcgcccccagcaacgccgccgtggacgagctgatgaagaagatcatcctggagttcaaggagaagtgcaaggacaagaagaaccccctgggcaactgcggcgacatcaacctggtgagactgggccccgagaagagcatcaacagcgaggtgctgaagttcagcctggacagccaggtgaaccacagaatgaagaaggagctgcccagccacgtgcaggccatgcacaagagaaaggagttcctggactaccagctggacgagctgagcagacagagagccctgtgcagaggcggcagagagatccagagacaggagctggacgagaacatcagcaaggtgagcaaggagagacaggagctggccagcaagatcaaggaggtgcagggcagaccccagaagacccagagcatcatcatcctggagagccacatcatctgctgcaccctgagcaccagcggcggcctgctgctggagagcgccttcagaggccagggcggcgtgcccttcagctgcgtgatcgtggacgaggccggccagagctgcgagatcgagaccctgacccccctgatccacagatgcaacaagctgatcctggtgggcgaccccaagcagctgccccccaccgtgatcagcatgaaggcccaggagtacggctacgaccagagcatgatggccagattctgcagactgctggaggagaacgtggagcacaacatgatcagcagactgcccatcctgcagctgaccgtgcagtacagaatgcaccccgacatctgcctgttccccagcaactacgtgtacaacagaaacctgaagaccaacagacagaccgaggccatcagatgcagcagcgactggcccttccagccctacctggtgttcgacgtgggcgacggcagcgagagaagagacaacgacagctacatcaacgtgcaggagatcaagctggtgatggagatcatcaagctgatcaaggacaagagaaaggacgtgagcttcagaaacatcggcatcatcacccactacaaggcccagaagaccatgatccagaaggacctggacaaggagttcgacagaaagggccccgccgaggtggacaccgtggacgccttccagggcagacagaaggactgcgtgatcgtgacctgcgtgagagccaacagcatccagggcagcatcggcttcctggccagcctgcagagactgaacgtgaccatcaccagagccaagtacagcctgttcatcctgggccacctgagaaccctgatgcagctgctgcccagaagcttctgcgtgcacgtgaaccacagccccttcttcagccccgagcccaagtacctgcactgggccctgaaggagaaccagcactggaaccagctgatccaggacgcccagaagagaggcgccatcatcaagacctgcgacaagaactacagacacgacgccgtgaagatcctgaagctgaagcccgtgctgcagagaagcctgacccacccccccaccatcgcccccgagggcagcagaccccagggcggcctgcccagcagcaagctggacagcggcttcgccaagaccagcgtggccgccagcctgtaccacacccccagcgacagcaaggagatcaccctgaccgtgaccagcaaggaccccgagagaccccccgtgcacgaccagctgcaggaccccagactgctgaagagaatgggcatcgaggtgaagggcggcatcttcctgtgggacccccagcccagcagcccccagcaccccggcgccaccccccccaccggcgagcccggcttccccgtggtgcaccaggacctgagccacatccagcagcccgccgccgtggtggccgccctgagcagccacaagccccccgtgagaggcgagccccccgccgccagccccgaggccagcacctgccagagcaagtgcgacgaccccgaggaggagctgtgccacagaagagaggccagagccttcagcgagggcgagcaggagaagtgcggcagcgagacccaccacaccagaagaaacagcagatgggacaagagaaccctggagcaggaggacagcagcagcaagaagagaaagctgctgtag

SEQ ID NO: 98338 - DNA, 1269 bp, synthetic construct
  misc_feature 1..1269: note = Description of Artificial Sequence: Synthetic coding sequence
  source 1..1269: mol_type = other DNA
atgagcaccagctacggctgcttctggagaagattcatccacggcatcggcagaagcggcgacatcagcgccgtgcagcccaaggccgccggcagcagcctgctgaacaagatcaccaacagcctggtgctggacatcatcaagctggccggcgtgcacaccgtggccaactgcttcgtggtgcccatggccaccggcatgagcctgaccctgtgcttcctgaccctgagacacaagagacccaaggccaagtacatcatctggcccagaatcgaccagaagagctgcttcaagagcatgatcaccgccggcttcgagcccgtggtgatcgagaacgtgctggagggcgacgagctgagaaccgacctgaaggccgtggaggccaaggtgcaggagctgggccccgactgcatcctgtgcatccacagcaccaccagctgcttcgcccccagagtgcccgacagactggaggagctggccgtgatctgcgccaactacgacatcccccacatcgtgaacaacgcctacggcgtgcagagcagcaagtgcatgcacctgatccagcagggcgccagagtgggcagaatcgacgccttcgtgcagagcctggacaagaacttcatggtgcccgtgggcggcgccatcatcgccggcttcaacgacagcttcatccaggagatcagcaagatgtaccccggcagagccagcgccagccccagcctggacgtgctgatcaccctgctgagcctgggcagcaacggctacaagaagctgctgaaggagagaaaggagatgttcagctacctgagcaaccagatcaagaagctgagcgaggcctacaacgagagactgctgcacaccccccacaaccccatcagcctggccatgaccctgaagaccctggacgagcacagagacaaggccgtgacccagctgggcagcatgctgttcaccagacaggtgagcggcgccagagtggtgcccctgggcagcatgcagaccgtgagcggctacaccttcagaggcttcatgagccacaccaacaactacccctgcgcctacctgaacgccgccagcgccatcggcatgaagatgcaggacgtggacctgttcatcaagagactggacagatgcctgaaggccgtgagaaaggagagaagcaaggagagcgacgacaactacgacaagaccgaggacgtggacatcgaggagatggccctgaagctggacaacgtgctgctggacacctaccaggacgccagcagctag

SEQ ID NO: 98339 - DNA, 1506 bp, synthetic construct
  misc_feature 1..1506: note = Description of Artificial Sequence: Synthetic coding sequence
  source 1..1506: mol_type = other DNA
atgaacagagagagcttcgccgccggcgagagactggtgagccccgcctacgtgagacagggctgcgaggccagaagaagccacgagcacctgatcagactgctgctggagaagggcaagtgccccgagaacggctgggacgagagcaccctggagctgttcctgcacgagctggccatcatggacagcaacaacttcctgggcaactgcggcgtgggcgagagagagggcagagtggccagcgccctggtggccagaagacactacagattcatccacggcatcggcagaagcggcgacatcagcgccgtgcagcccaaggccgccggcagcagcctgctgaacaagatcaccaacagcctggtgctggacatcatcaagctggccggcgtgcacaccgtggccaactgcttcgtggtgcccatggccaccggcatgagcctgaccctgtgcttcctgaccctgagacacaagagacccaaggccaagtacatcatctggcccagaatcgaccagaagagctgcttcaagagcatgatcaccgccggcttcgagcccgtggtgatcgagaacgtgctggagggcgacgagctgagaaccgacctgaaggccgtggaggccaaggtgcaggagctgggccccgactgcatcctgtgcatccacagcaccaccagctgcttcgcccccagagtgcccgacagactggaggagctggccgtgatctgcgccaactacgacatcccccacatcgtgaacaacgcctacggcgtgcagagcagcaagtgcatgcacctgatccagcagggcgccagagtgggcagaatcgacgccttcgtgcagagcctggacaagaacttcatggtgcccgtgggcggcgccatcatcgccggcttcaacgacagcttcatccaggagatcagcaagatgtaccccggcagagccagcgccagccccagcctggacgtgctgatcaccctgctgagcctgggcagcaacggctacaagaagctgctgaaggagagaaaggagatgttcagctacctgagcaaccagatcaagaagctgagcgaggcctacaacgagagactgctgcacaccccccacaaccccatcagcctggccatgaccctgaagaccctggacgagcacagagacaaggccgtgacccagctgggcagcatgctgttcaccagacaggtgagcggcgccagagtggtgcccctgggcagcatgcagaccgtgagcggctacaccttcagaggcttcatgagccacaccaacaactacccctgcgcctacctgaacgccgccagcgccatcggcatgaagatgcaggacgtggacctgttcatcaagagactggacagatgcctgaaggccgtgagaaaggagagaagcaaggagagcgacgacaactacgacaagaccgaggacgtggacatcgaggagatggccctgaagctggacaacgtgctgctggacacctaccaggacgccagcagctag

SEQ ID NO: 98340 - DNA, 903 bp, synthetic construct
  misc_feature 1..903: note = Description of Artificial Sequence: Synthetic coding sequence
  source 1..903: mol_type = other DNA
atggagggcgtgctgtacaagtggaccaactacctgaccggctggcagcccagatggttcgtgctggacaacggcatcctgagctactacgacagccaggacgacgtgtgcaagggcagcaagggcagcatcaagatggccgtgtgcgagatcaaggtgcacagcgccgacaacaccagaatggagctgatcatccccggcgagcagcacttctacatgaaggccgtgaacgccgccgagagacagagatggctggtggccctgggcagcagcaaggcctgcctgaccgacaccagaaccaagaaggagaaggagatcagcgagaccagcgagagcctgaagaccaagatgagcgagctgagactgtactgcgacctgctgatgcagcaggtgcacaccatccaggagttcgtgcaccacgacgagaaccacagcagccccagcgccgagaacatgaacgaggccagcagcctgctgagcgccacctgcaacaccttcatcaccaccctggaggagtgcgtgaagatcgccaacgccaagttcaagcccgagatgttccagctgcaccaccccgaccccctggtgagccccgtgagccccagccccgtgcagatgatgaagagaagcgtgagccaccccggcagctgcagcagcgagagaagcagccacagcatcaaggagcccgtgagcaccctgcacagactgagccagagaagaagaagaacctacagcgacaccgacagctgcagcgacatccccctggaggaccccgacagacccgtgcactgcagcaagaacaccctgaacggcgacctggccagcgccaccatccccgaggagagcagactgatggccaagaagcagagcgagagcgaggacaccctgcccagcttcagcagctag

SEQ ID NO: 98341 - DNA, 1104 bp, synthetic construct
  misc_feature 1..1104: note = Description of Artificial Sequence: Synthetic coding sequence
  source 1..1104: mol_type = other DNA
atggacaaggagtacgtgggcttcgccgccctgcccaaccagctgcacagaaagagcgtgaagaagggcttcgacttcaccctgatggtggccggcgagagcggcctgggcaagagcaccctgatcaacagcctgttcctgaccaacctgtacgaggacagacaggtgcccgaggccagcgccagactgacccagaccctggccatcgagagaagaggcgtggagatcgaggagggcggcgtgaaggtgaagctgaccctggtggacacccccggcttcggcgacagcgtggactgcagcgactgctggctgcccgtggtgaagttcatcgaggagcagttcgagcagtacctgagagacgagagcggcctgaacagaaagaacatccaggacagcagagtgcactgctgcctgtacttcatcagccccttcggcagaggcctgagacccctggacgtggccttcctgagagccgtgcacgagaaggtgaacatcatccccgtgatcggcaaggccgacgccctgatgccccaggagacccaggccctgaagcagaagatcagagaccagctgaaggaggaggagatccacatctaccagttccccgagtgcgacagcgacgaggacgaggacttcaagagacaggacgccgagatgaaggagagcatccccttcgccgtggtgggcagctgcgaggtggtgagagacggcggcaacagacccgtgagaggcagaagatacagctggggcaccgtggaggtggagaacccccaccactgcgacttcctgaacctgagaagaatgctggtgcagacccacctgcaggacctgaaggaggtgacccacgacctgctgtacgagggctacagagccagatgcctgcagagcctggccagacccggcgccagagacagagccagcagaagcaagctgagcagacagagcgccaccgagatccccctgcccatgctgcccctggccgacaccgagaagctgatcagagagaaggacgaggagctgagaagaatgcaggagatgctggagaagatgcaggcccagatgcagcagagccaggcccagggcgagcagagcgacgccctgtag

SEQ ID NO: 98342 - DNA, 1104 bp, synthetic construct; identical to SEQ ID NO: 98341
  misc_feature 1..1104: note = Description of Artificial Sequence: Synthetic coding sequence
  source 1..1104: mol_type = other DNA

SEQ ID NO: 98343 - DNA, 966 bp, synthetic construct
  misc_feature 1..966: note = Description of Artificial Sequence: Synthetic coding sequence
  source 1..966: mol_type = other DNA
atgatgaacagatactaccagcccatcgtggactacatcgacgcccagttcgaggcctacctgcaggaggagctgaagatcaagagaagcctgttcacctaccacgacagcagaatccacgtgtgcctgtacttcatcagccccaccggccacagcctgaagaccctggacctgctgaccatgaagaacctggacagcaaggtgaacatcatccccgtgatcgccaaggccgacaccgtgagcaagaccgagctgcagaagttcaagatcaagctgatgagcgagctggtgagcaacggcgtgcagatctaccagttccccaccgacgacgacaccatcgccaaggtgaacgccgccatgaacggccagctgcccttcgccgtggtgggcagcatggacgaggtgaaggtgggcaacaagatggtgaaggccagacagtacccctggggcgtggtgcaggtggagaacgagaaccactgcgacttcgtgaagctgagagagatgctgatctgcaccaacatggaggacctgagagagcagacccacaccagacactacgagctgtacagaagatgcaagctggaggagatgggcttcaccgacgtgggccccgagaacaagcccgtgagcgtgcaggagacctacgaggccaagagacacgagttccacggcgagagacagagaaaggaggaggagatgaagcagatgttcgtgcagagagtgaaggagaaggaggccatcctgaaggaggccgagagagagctgcaggccaagttcgagcacctgaagagactgcaccaggaggagagaatgaagctggaggagaagagaagactgctggaggaggagatcatcgccttcagcaagaagaaggccaccagcgagatcttccacagccagagcttcctggccaccggcagcaacctgagaaaggacaaggacagaaagaacagcaacttcctgtag

SEQ ID NO: 98344 - DNA, 954 bp, synthetic construct
  misc_feature 1..954: note = Description of Artificial Sequence: Synthetic coding sequence
  source 1..954: mol_type = other DNA
atgagcggccacgtgggcttcgagagcctgcccgaccagctggtgaacagaagcatccagcagggcttctgcttcaacatcctgtgcgtgggcgagaccggcatcggcaagagcaccctgatcgacaccctgttcaacaccaacttcgaggactacgagagcagccacttctgccccaacgtgaagctgaaggcccagacctacgagctgcaggagagcaacgtgcagctgaagctgaccatcgtgaacaccgtgggcttcggcgaccagatcaacaaggaggagagctaccagcccatcgtggactacatcgacgcccagttcgaggcctacctgcaggaggagctgaagatcaagagaagcctgttcacctaccacgacagcagaatccacgtgtgcctgtacttcatcagccccaccggccacagcctgaagaccctggacctgctgaccatgaagaacctggacagcaaggtgaacatcatccccgtgatcgccaaggccgacaccgtgagcaagaccgagctgcagaagttcaagatcaagctgatgagcgagctggtgagcaacggcgtgcagatctaccagttccccaccgacgacgacaccatcgccaaggtgaacgccgccatgaacggccagctgcccttcgccgtggtgggcagcatggacgaggtgaaggtgggcaacaagatggtgaaggccagacagtacccctggggcgtggtgcaggtggagaacgagaaccactgcgacttcgtgaagctgagagagatgctgatctgcaccaacatggaggacctgagagagcagacccacaccagacactacgagctgtacagaagatgcaagctggaggagatgggcttcaccgacgtgggccccgagaacaagcccgtgagctacagacccaacctgagcaccctgagagacttcaccaagaagagagagtag

SEQ ID NO: 98345 - DNA, 1635 bp, synthetic construct
  misc_feature 1..1635: note = Description of Artificial Sequence: Synthetic coding sequence
  source 1..1635: mol_type = other DNA
atggccagcagcgaggtggccagacacctgctgttccagagccacatggccaccaagaccacctgcatgagcagccagggcagcgacgacgagcagatcaagagagagaacatcagaagcctgaccatgagcggccacgtgggcttcgagagcctgcccgaccagctggtgaacagaagcatccagcagggcttctgcttcaacatcctgtgcgtgggcgagaccggcatcggcaagagcaccctgatcgacaccctgttcaacaccaacttcgaggactacgagagcagccacttctgccccaacgtgaagctgaaggcccagacctacgagctgcaggagagcaacgtgcagctgaagctgaccatcgtgaacaccgtgggcttcggcgaccagatcaacaaggaggagagctaccagcccatcgtggactacatcgacgcccagttcgaggcctacctgcaggaggagctgaagatcaagagaagcctgttcacctaccacgacagcagaatccacgtgtgcctgtacttcatcagccccaccggccacagcctgaagaccctggacctgctgaccatgaagaacctggacagcaaggtgaacatcatccccgtgatcgccaaggccgacaccgtgagcaagaccgagctgcagaagttcaagatcaagctgatgagcgagctggtgagcaacggcgtgcagatctaccagttccccaccgacgacgacaccatcgccaaggtgaacgccgccatgaacggccagctgcccttcgccgtggtgggcagcatggacgaggtgaaggtgggcaacaagatggtgaaggccagacagtacccctggggcgtggtgcaggtggagaacgagaaccactgcgacttcgtgaagctgagagagatgctgatctgcaccaacatggaggacctgagagagcagacccacaccagacactacgagctgtacagaagatgcaagctggaggagatgggcttcaccgacgtgggccccgagaacaagcccgtgagcgtgcaggagacctacgaggccaagagacacgagttccacggcgagagacagagaaaggaggaggagatgaagcagatgttcgtgcagagagtgaaggagaaggaggccatcctgaaggaggccgagagagagctgcaggccaagttcgagcacctgaagagactgcaccaggaggagagaatgaagctggaggagaagagaagactgctggaggaggagatcatcgccttcagcaagaagaaggccaccagcgagatcttccacagccagagcttcctggccaccggcagcaacctgagaaaggacaaggacagaaagaaggagcccggctgcagattcgagctgctgtgcatcgacgtgagagcctgcgagaccaacggcggcagaaaggacgccgagaaggcccccatcttctgcaagaccgaggtgcccgagcacagaagaagcagcagccaggccaacttcatcaagaagaagctggaggtgtgcttcgacttcgccgtgatctgcttcatcaccagcatcttcggcgagcagccccagctgctgatcttcatggagaagtacttccaggtgcagggccagtacatcagccagagcgagtag

SEQ ID NO: 98346 - DNA, 1365 bp, synthetic construct
  misc_feature 1..1365: note = Description of Artificial Sequence: Synthetic coding sequence
  source 1..1365: mol_type = other DNA
atggccagcagcgaggtggccagacacctgctgttccagagccacatggccaccaagaccacctgcatgagcagccagggcagcgacgacgagcagatcaagagagagaacatcagaagcctgaccatgagcggccacgtgggcttcgagagcctgcccgaccagctggtgaacagaagcatccagcagggcttctgcttcaacatcctgtgcgtgggcgagaccggcatcggcaagagcaccctgatcgacaccctgttcaacaccaacttcgaggactacgagagcagccacttctgccccaacgtgaagctgaaggcccagacctacgagctgcaggagagcaacgtgcagctgaagctgaccatcgtgaacaccgtgggcttcggcgaccagatcaacaaggaggagagctaccagcccatcgtggactacatcgacgcccagttcgaggcctacctgcaggaggagctgaagatcaagagaagcctgttcacctaccacgacagcagaatccacgtgtgcctgtacttcatcagccccaccggccacagcctgaagaccctggacctgctgaccatgaagaacctggacagcaaggtgaacatcatccccgtgatcgccaaggccgacaccgtgagcaagaccgagctgcagaagttcaagatcaagctgatgagcgagctggtgagcaacggcgtgcagatctaccagttccccaccgacgacgacaccatcgccaaggtgaacgccgccatgaacggccagctgcccttcgccgtggtgggcagcatggacgaggtgaaggtgggcaacaagatggtgaaggccagacagtacccctggggcgtggtgcaggtggagaacgagaaccactgcgacttcgtgaagctgagagagatgctgatctgcaccaacatggaggacctgagagagcagacccacaccagacactacgagctgtacagaagatgcaagctggaggagatgggcttcaccgacgtgggccccgagaacaagcccgtgagcgtgcaggagacctacgaggccaagagacacgagttccacggcgagagacagagaaaggaggaggagatgaagcagatgttcgtgcagagagtgaaggagaaggaggccatcctgaaggaggccgagagagagctgcaggccaagttcgagcacctgaagagactgcaccaggaggagagaatgaagctggaggagaagagaagactgctggaggaggagatcatcgccttcagcaagaagaaggccaccagcgagatcttccacagccagagcttcctggccaccggcagcaacctgagaaaggacaaggacagaaagaacagcaacttcctgtag

SEQ ID NO: 98347 - DNA, 1296 bp, synthetic construct
  misc_feature 1..1296: note = Description of Artificial Sequence: Synthetic coding sequence
  source 1..1296: mol_type = other DNA
atggccagcagcgaggtggccagacacctgaagagagagaacatcagaagcctgaccatgagcggccacgtgggcttcgagagcctgcccgaccagctggtgaacagaagcatccagcagggcttctgcttcaacatcctgtgcgtgggcgagaccggcatcggcaagagcaccctgatcgacaccctgttcaacaccaacttcgaggactacgagagcagccacttctgccccaacgtgaagctgaaggcccagacctacgagctgcaggagagcaacgtgcagctgaagctgaccatcgtgaacaccgtgggcttcggcgaccagatcaacaaggaggagagctaccagcccatcgtggactacatcgacgcccagttcgaggcctacctgcaggaggagctgaagatcaagagaagcctgttcacctaccacgacagcagaatccacgtgtgcctgtacttcatcagccccaccggccacagcctgaagaccctggacctgctgaccatgaagaacctggacagcaaggtgaacatcatccccgtgatcgccaaggccgacaccgtgagcaagaccgagctgcagaagttcaagatcaagctgatgagcgagctggtgagcaacggcgtgcagatctaccagttccccaccgacgacgacaccatcgccaaggtgaacgccgccatgaacggccagctgcccttcgccgtggtgggcagcatggacgaggtgaaggtgggcaacaagatggtgaaggccagacagtacccctggggcgtggtgcaggtggagaacgagaaccactgcgacttcgtgaagctgagagagatgctgatctgcaccaacatggaggacctgagagagcagacccacaccagacactacgagctgtacagaagatgcaagctggaggagatgggcttcaccgacgtgggccccgagaacaagcccgtgagcgtgcaggagacctacgaggccaagagacacgagttccacggcgagagacagagaaaggaggaggagatgaagcagatgttcgtgcagagagtgaaggagaaggaggccatcctgaaggaggccgagagagagctgcaggccaagttcgagcacctgaagagactgcaccaggaggagagaatgaagctggaggagaagagaagactgctggaggaggagatcatcgccttcagcaagaagaaggccaccagcgagatcttccacagccagagcttcctggccaccggcagcaacctgagaaaggacaaggacagaaagaacagcaacttcctgtag

SEQ ID NO: 98348 - DNA, 1353 bp, synthetic construct
  misc_feature 1..1353: note = Description of Artificial Sequence: Synthetic coding sequence
  source 1..1353: mol_type = other DNA
atggccagcagcgaggtggccagacacctgctgttccagagccacatggccaccaagaccacctgcatgagcagccagggcagcgacgacgagcagatcaagagagagaacatcagaagcctgaccatgagcggccacgtgggcttcgagagcctgcccgaccagctggtgaacagaagcatccagcagggcttctgcttcaacatcctgtgcgtgggcgagaccggcatcggcaagagcaccctgatcgacaccctgttcaacaccaacttcgaggactacgagagcagccacttctgccccaacgtgaagctgaaggcccagacctacgagctgcaggagagcaacgtgcagctgaagctgaccatcgtgaacaccgtgggcttcggcgaccagatcaacaaggaggagagctaccagcccatcgtggactacatcgacgcccagttcgaggcctacctgcaggaggagctgaagatcaagagaagcctgttcacctaccacgacagcagaatccacgtgtgcctgtacttcatcagccccaccggccacagcctgaagaccctggacctgctgaccatgaagaacctggacagcaaggtgaacatcatccccgtgatcgccaaggccgacaccgtgagcaagaccgagctgcagaagttcaagatcaagctgatgagcgagctggtgagcaacggcgtgcagatctaccagttccccaccgacgacgacaccatcgccaaggtgaacgccgccatgaacggccagctgcccttcgccgtggtgggcagcatggacgaggtgaaggtgggcaacaagatggtgaaggccagacagtacccctggggcgtggtgcaggtggagaacgagaaccactgcgacttcgtgaagctgagagagatgctgatctgcaccaacatggaggacctgagagagcagacccacaccagacactacgagctgtacagaagatgcaagctggaggagatgggcttcaccgacgtgggccccgagaacaagcccgtgagcgtgcaggagacctacgaggccaagagacacgagttccacggcgagagacagagaaaggaggaggagatgaagcagatgttcgtgcagagagtgaaggagaaggaggccatcctgaaggaggccgagagagagctgcaggccaagttcgagcacctgaagagactgcaccaggaggagagaatgaagctggaggagaagagaagactgctggaggaggagatcatcgccttcagcaagaagaaggccaccagcgagatcttccacagccagagcttcctggccaccggcagcaacctgagaaaggacaaggacagaaagaagtag

SEQ ID NO: 98349 - DNA, 1422 bp, synthetic construct
  misc_feature 1..1422: note = Description of Artificial Sequence: Synthetic coding sequence
  source 1..1422: mol_type = other DNA
atggccaccaagaccacctgcatgagcagccagggcagcgacgacgagcagatcaagagagagaacatcagaagcctgaccatgagcggccacgtgggcttcgagagcctgcccgaccagctggtgaacagaagcatccagcagggcttctgcttcaacatcctgtgcgtgggcgagaccggcatcggcaagagcaccctgatcgacaccctgttcaacaccaacttcgaggactacgagagcagccacttctgccccaacgtgaagctgaaggcccagacctacgagctgcaggagagcaacgtgcagctgaagctgaccatcgtgaacaccgtgggcttcggcgaccagatcaacaaggaggagagctaccagcccatcgtggactacatcgacgcccagttcgaggcctacctgcaggaggagctgaagatcaagagaagcctgttcacctaccacgacagcagaatccacgtgtgcctgtacttcatcagccccaccggccacagcctgaagaccctggacctgctgaccatgaagaacctggacagcaaggtgaacatcatccccgtgatcgccaaggccgacaccgtgagcaagaccgagctgcagaagttcaagatcaagctgatgagcgagctggtgagcaacggcgtgcagatctaccagttccccaccgacgacgacaccatcgccaaggtgaacgccgccatgaacggccagctgcccttcgccgtggtgggcagcatggacgaggtgaaggtgggcaacaagatggtgaaggccagacagtacccctggggcgtggtgcaggtggagaacgagaaccactgcgacttcgtgaagctgagagagatgctgatctgcaccaacatggaggacctgagagagcagacccacaccagacactacgagctgtacagaagatgcaagctggaggagatgggcttcaccgacgtgggccccgagaacaagcccgtgagcgtgcaggagacctacgaggccaagagacacgagttccacggcgagagacagagaaaggaggaggagatgaagcagatgttcgtgcagagagtgaaggagaaggaggccatcctgaaggaggccgagagagagctgcaggccaagttcgagcacctgaagagactgcaccaggaggagagaatgaagctggaggagaagagaagactgctggaggaggagatcatcgccttcagcaagaagaaggccaccagcgagatcttccacagccagagcttcctggccaccggcagcaacctgagaaaggacaaggacagaaagaaggagcccggctgcagattcgagctgctgtgcatcgacgtgagagcctgcgagaccaacggcggcagaaaggacgccgagaagggcagagagggccacagcgccagaggccagccctag

SEQ ID NO: 98350 - DNA, 852 bp, synthetic construct
  misc_feature 1..852: note = Description of Artificial Sequence: Synthetic coding sequence
  source 1..852: mol_type = other DNA
atggccagcagcgaggtggccagacacctgctgttccagagccacatggccaccaagaccacctgcatgagcagccagggcagcgacgacgagcagatcgtgaacatcatccccgtgatcgccaaggccgacaccgtgagcaagaccgagctgcagaagttcaagatcaagctgatgagcgagctggtgagcaacggcgtgcagatctaccagttccccaccgacgacgacaccatcgccaaggtgaacgccgccatgaacggccagctgcccttcgccgtggtgggcagcatggacgaggtgaaggtgggcaacaagatggtgaaggccagacagtacccctggggcgtggtgcaggtggagaacgagaaccactgcgacttcgtgaagctgagagagatgctgatctgcaccaacatggaggacctgagagagcagacccacaccagacactacgagctgtacagaagatgcaagctggaggagatgggcttcaccgacgtgggccccgagaacaagcccgtgagcgtgcaggagacctacgaggccaagagacacgagttccacggcgagagacagagaaaggaggaggagatgaagcagatgttcgtgcagagagtgaaggagaaggaggccatcctgaaggaggccgagagagagctgcaggccaagttcgagcacctgaagagactgcaccaggaggagagaatgaagctggaggagaagagaagactgctggaggaggagatcatcgccttcagcaagaagaaggccaccagcgagatcttccacagccagagcttcctggccaccggcagcaacctgagaaaggacaaggacagaaagaagtag

SEQ ID NO: 98351 - DNA, 1290 bp, synthetic construct
  misc_feature 1..1290: note = Description of Artificial Sequence: Synthetic coding sequence
  source 1..1290: mol_type = other DNA
atggccgtggccgtgggcagacccagcaacgaggagctgagaaacctgagcctgagcggccacgtgggcttcgacagcctgcccgaccagctggtgaacaagagcaccagccagggcttctgcttcaacatcctgtgcgtgggcgagaccggcatcggcaagagcaccctgatggacaccctgttcaacaccaagttcgagagcgaccccgccacccacaacgagcccggcgtgagactgaaggccagaagctacgagctgcaggagagcaacgtgagactgaagctgaccatcgtggacaccgtgggcttcggcgaccagatcaacaaggacgacagctacaagcccatcgtggagtacatcgacgcccagttcgaggcctacctgcaggaggagctgaagatcaagagaagcctgttcaactaccacgacaccagaatccacgcctgcctgtacttcatcgcccccaccggccacagcctgaagagcctggacctggtgaccatgaagaagctggacagcaaggtgaacatcatccccatcatcgccaaggccgacaccatcgccaagaacgagctgcacaagttcaagagcaagatcatgagcgagctggtgagcaacggcgtgcagatctaccagttccccaccgacgaggagaccgtggccgagatcaacgccaccatgagcgtgcacctgcccttcgccgtggtgggcagcaccgaggaggtgaagatcggcaacaagatggccaaggccagacagtacccctggggcgtggtgcaggtggagaacgagaaccactgcgacttcgtgaagctgagagagatgctgatcagagtgaacatggaggacctgagagagcagacccacaccagacactacgagctgtacagaagatgcaagctggaggagatgggcttcaaggacaccgaccccgacagcaagcccttcagcctgcaggagacctacgaggccaagagaaacgagttcctgggcgagctgcagaagaaggaggaggagatgagacagatgttcgtgatgagagtgaaggagaaggaggccgagctgaaggaggccgagaaggagctgcacgagaagttcgacctgctgaagagaacccaccaggaggagaagaagaaggtggaggacaagaagaaggagctggaggaggaggtgaacaacttccagaagaagaaggccgccgcccagctgctgcagagccaggcccagcagagcggcgcccagcagaccaagaaggacaaggacaagaagaacgccagcttcacctag

SEQ ID NO: 98352 - DNA, 1278 bp, synthetic construct
  misc_feature 1..1278: note = Description of Artificial Sequence: Synthetic coding sequence
  source 1..1278: mol_type = other DNA
atggccgtggccgtgggcagacccagcaacgaggagctgagaaacctgagcctgagcggccacgtgggcttcgacagcctgcccgaccagctggtgaacaagagcaccagccagggcttctgcttcaacatcctgtgcgtgggcgagaccggcatcggcaagagcaccctgatggacaccctgttcaacaccaagttcgagagcgaccccgccacccacaacgagcccggcgtgagactgaaggccagaagctacgagctgcaggagagcaacgtgagactgaagctgaccatcgtggacaccgtgggcttcggcgaccagatcaacaaggacgacagctacaagcccatcgtggagtacatcgacgcccagttcgaggcctacctgcaggaggagctgaagatcaagagaagcctgttcaactaccacgacaccagaatccacgcctgcctgtacttcatcgcccccaccggccacagcctgaagagcctggacctggtgaccatgaagaagctggacagcaaggtgaacatcatccccatcatcgccaaggccgacaccatcgccaagaacgagctgcacaagttcaagagcaagatcatgagcgagctggtgagcaacggcgtgcagatctaccagttccccaccgacgaggagaccgtggccgagatcaacgccaccatgagcgtgcacctgcccttcgccgtggtgggcagcaccgaggaggtgaagatcggcaacaagatggccaaggccagacagtacccctggggcgtggtgcaggtggagaacgagaaccactgcgacttcgtgaagctgagagagatgctgatcagagtgaacatggaggacctgagagagcagacccacaccagacactacgagctgtacagaagatgcaagctggaggagatgggcttcaaggacaccgaccccgacagcaagcccttcagcctgcaggagacctacgaggccaagagaaacgagttcctgggcgagctgcagaagaaggaggaggagatgagacagatgttcgtgatgagagtgaaggagaaggaggccgagctgaaggaggccgagaaggagctgcacgagaagttcgacctgctgaagagaacccaccaggaggagaagaagaaggtggaggacaagaagaaggagctggaggaggaggtgaacaacttccagaagaagaaggccgccgcccagctgctgcagagccaggcccagcagagcggcgcccagcagaccaagaaggacaaggacaagaagaagtag

SEQ ID NO: 98353 - DNA, 1320 bp, synthetic construct
  misc_feature 1..1320: note = Description of Artificial Sequence: Synthetic coding sequence
  source 1..1320: mol_type = other DNA
atggaggagagaaagcccgcccacgtgctgagaagcttcaagtacgccgccttcatgaacgaggagctgagaaacctgagcctgagcggccacgtgggcttcgacagcctgcccgaccagctggtgaacaagagcaccagccagggcttctgcttcaacatcctgtgcgtgggcgagaccggcatcggcaagagcaccctgatggacaccctgttcaacaccaagttcgagagcgaccccgccacccacaacgagcccggcgtgagactgaaggccagaagctacgagctgcaggagagcaacgtgagactgaagctgaccatcgtggacaccgtgggcttcggcgaccagatcaacaaggacgacagctacaagcccatcgtggagtacatcgacgcccagttcgaggcctacctgcaggaggagctgaagatcaagagaagcctgttcaactaccacgacaccagaatccacgcctgcctgtacttcatcgcccccaccggccacagcctgaagagcctggacctggtgaccatgaagaagctggacagcaaggtgaacatcatccccatcatcgccaaggccgacaccatcgccaagaacgagctgcacaagttcaagagcaagatcatgagcgagctggtgagcaacggcgtgcagatctaccagttccccaccgacgaggagaccgtggccgagatcaacgccaccatgagcgtgcacctgcccttcgccgtggtgggcagcaccgaggaggtgaagatcggcaacaagatggccaaggccagacagtacccctggggcgtggtgcaggtggagaacgagaaccactgcgacttcgtgaagctgagagagatgctgatcagagtgaacatggaggacctgagagagcagacccacaccagacactacgagctgtacagaagatgcaagctggaggagatgggcttcaaggacaccgaccccgacagcaagcccttcagcctgcaggagacctacgaggccaagagaaacgagttcctgggcgagctgcagaagaaggaggaggagatgagacagatgttcgtgatgagagtgaaggagaaggaggccgagctgaaggaggccgagaaggagctgcacgagaagttcgacctgctgaagagaacccaccaggaggagaagaagaaggtggaggacaagaagaaggagctggaggaggaggtgaacaacttccagaagaagaaggccgccgcccagctgctgcagagccaggcccagcagagcggcgcccagcagaccaagaaggacaaggacaagaagaacgccagcttcacctag

SEQ ID NO: 98354 - DNA, 1077 bp, synthetic construct
  misc_feature 1..1077: note = Description of Artificial Sequence: Synthetic coding sequence
  source 1..1077: mol_type = other DNA
atggaccccctgagaagaagccccagcccctgcctgagcagccagcccagcagccccagcacccccccctgcgagatgctgggccccgtgggcatcgaggccgtgctggaccagctgaagatcaaggccatgaagatgggcttcgagttcaacatcatggtggtgggccagagcggcctgggcaagagcaccatggtgaacaccctgttcaagagcaaggtgtggaagagcaacccccccggcctgggcgtgcccaccccccagaccctgcagctgcacagcctgacccacgtgatcgaggagaagggcgtgaagctgaagctgaccgtgaccgacacccccggcttcggcgaccagatcaacaacgacaactgctgggaccccatcctgggctacatcaacgagcagtacgagcagtacctgcaggaggagatcctgatcaccagacagagacacatccccgacaccagagtgcactgctgcgtgtacttcgtgccccccaccggccactgcctgagacccctggacatcgagttcctgcagagactgtgcagaaccgtgaacgtggtgcccgtgatcgccagagccgacagcctgaccatggaggagagagaggccttcagaagaagaatccagcagaacctgagaacccactgcatcgacgtgtacccccagatgtgcttcgacgaggacatcaacgacaagatcctgaacagcaagctgagagacagaatccccttcgccgtggtgggcgccgaccaggagcacctggtgaacggcagatgcgtgctgggcagaaagaccaagtggggcatcatcgaggtggagaacatggcccactgcgagttccccctgctgagagacctgctgatcagaagccacctgcaggacctgaaggacatcacccacaacatccactacgagaactacagagtgatcagactgaacgagagccacctgctgcccagaggccccggctgggtgaacctggcccccgccagccccggccagctgaccacccccagaaccttcaaggtgtgcagaggcgcccacgacgacagcgacgacgagttctag

SEQ ID NO: 98355 - DNA, 939 bp, synthetic construct
  misc_feature 1..939: note = Description of Artificial Sequence: Synthetic coding sequence
  source 1..939: mol_type = other DNA
atggaccccctgagaagaagccccagcccctgcctgagcagccagcccagcagccccagcacccccccctgcgagatgctgggccccgtgggcatcgaggccgtgctggaccagctgaagatcaaggccatgaagatgggcttcgagttcaacatcatggtggtgggccagagcggcctgggcaagagcaccatggtgaacaccctgttcaagagcaaggtgtggaagagcaacccccccggcctgggcgtgcccaccccccagaccctgcagctgcacagcctgacccacgtgatcgaggagaagggcgtgaagctgaagctgaccgtgaccgacacccccggcttcggcgaccagatcaacaacgacaactgcctgagacccctggacatcgagttcctgcagagactgtgcagaaccgtgaacgtggtgcccgtgatcgccagagccgacagcctgaccatggaggagagagaggccttcagaagaagaatccagcagaacctgagaacccactgcatcgacgtgtacccccagatgtgcttcgacgaggacatcaacgacaagatcctgaacagcaagctgagagacagaatccccttcgccgtggtgggcgccgaccaggagcacctggtgaacggcagatgcgtgctgggcagaaagaccaagtggggcatcatcgaggtggagaacatggcccactgcgagttccccctgctgagagacctgctgatcagaagccacctgcaggacctgaaggacatcacccacaacatccactacgagaactacagagtgatcagactgaacgagagccacctgctgcccagaggccccggctgggtgaacctggcccccgccagccccggccagctgaccacccccagaaccttcaaggtgtgcagaggcgcccacgacgacagcgacgacgagttctag

SEQ ID NO: 98356 - DNA, 1299 bp, synthetic construct
  misc_feature 1..1299: note = Description of Artificial Sequence: Synthetic coding sequence
  source 1..1299: mol_type = other DNA
atggccgagagaaccatggccatgcccacccagatccccgccgacggcgacacccagaaggagaacaacatcagatgcctgaccaccatcggccacttcggcttcgagtgcctgcccaaccagctggtgagcagaagcatcagacagggcttcaccttcaacatcctgtgcgtgggcgagaccggcatcggcaagagcaccctgatcgacaccctgttcaacaccaacctgaaggacaacaagagcagccacttctacagcaacgtgggcctgcagatccagacctacgagctgcaggagagcaacgtgcagctgaagctgaccgtggtggagaccgtgggctacggcgaccagatcgacaaggaggccagctaccagcccatcgtggactacatcgacgcccagttcgaggcctacctgcaggaggagctgaagatcaagagaagcctgttcgagtaccacgacagcagagtgcacgtgtgcctgtacttcatcagccccaccggccacagcctgaagagcctggacctgctgaccatgaagaacctggacagcaaggtgaacatcatccccctgatcgccaaggccgacaccatcagcaagaacgacctgcagaccttcaagaacaagatcatgagcgagctgatcagcaacggcatccagatctaccagctgcccaccgacgaggagaccgccgcccaggccaacagcagcgtgagcggcctgctgcccttcgccgtggtgggcagcaccgacgaggtgaaggtgggcaagagaatggtgagaggcagacactacccctggggcgtgctgcaggtggagaacgagaaccactgcgacttcgtgaagctgagagacatgctgctgtgcaccaacatggagaacctgaaggagaagacccacacccagcactacgagtgctacagataccagaagctgcagaagatgggcttcaccgacgtgggccccaacaaccagcccgtgagcttccaggagatcttcgaggccaagagacaggagttctacgaccagtgccagagagaggaggaggagctgaagcagagattcatgcagagagtgaaggagaaggaggccaccttcaaggaggccgagaaggagctgcaggacaagttcgagcacctgaagatgatccagcaggaggagatcagaaagctggaggaggagaagaagcagctggagggcgagatcatcgacttctacaagatgaaggccgccagcgaggccctgcagacccagctgagcaccgacaccaagaaggacaagcacagaaagaagtag

SEQ ID NO: 98357 - DNA, 1086 bp, synthetic construct
  misc_feature 1..1086: note = Description of Artificial Sequence: Synthetic coding sequence
  source 1..1086: mol_type = other DNA
atgagcaagcagcagcccacccagttcatcaaccccgagacccccggctacgtgggcttcgccaacctgcccaaccaggtgcacagaaagagcgtgaagaagggcttcgagttcaccctgatggtggtgggcgagagcggcctgggcaagagcaccctgatcaacagcctgttcctgaccgacctgtaccccgagagagtgatccccggcgccgccgagaagatcgagagaaccgtgcagatcgaggccagcaccgtggagatcgaggagagaggcgtgaagctgagactgaccgtggtggacacccccggctacggcgacgccatcaactgcagagactgcttcaagaccatcatcagctacatcgacgagcagttcgagagatacctgcacgacgagagcggcctgaacagaagacacatcatcgacaacagagtgcactgctgcttctacttcatcagccccttcggccacggcctgaagcccctggacgtggccttcatgaaggccatccacaacaaggtgaacatcgtgcccgtgatcgccaaggccgacaccctgaccctgaaggagagagagagactgaagaagagaatcctggacgagatcgaggagcacaacatcaagatctaccacctgcccgacgccgagagcgacgaggacgaggacttcaaggagcagaccagactgctgaaggccagcatccccttcagcgtggtgggcagcaaccagctgatcgaggccaagggcaagaaggtgagaggcagactgtacccctggggcgtggtggaggtggagaaccccgagcacaacgacttcctgaagctgagaaccatgctgatcacccacatgcaggacctgcaggaggtgacccaggacctgcactacgagaacttcagaagcgagagactgaagagaggcggcagaaaggtggagaacgaggacatgaacaaggaccagatcctgctggagaaggaggccgagctgagaagaatgcaggagatgatcgccagaatgcaggcccagatgcagatgcagatgcagggcggcgacggcgacggcggcgccctgggccaccacgtgtag

SEQ ID NO: 98358 - DNA, 1086 bp, synthetic construct; identical to SEQ ID NO: 98357
  misc_feature 1..1086: note = Description of Artificial Sequence: Synthetic coding sequence
  source 1..1086: mol_type = other DNA

SEQ ID NO: 98359 - DNA, 1191 bp, synthetic construct
  misc_feature 1..1191: note = Description of Artificial Sequence: Synthetic coding sequence
  source 1..1191: mol_type = other DNA
atgccctggatcagcgagggcagagccaccagaccctgcctgagagtgcccagcgccagaagaggcgacgagggcctgcaccagagagacgaggccagccagaagatgagcaagcagcagcccacccagttcatcaaccccgagacccccggctacgtgggcttcgccaacctgcccaaccaggtgcacagaaagagcgtgaagaagggcttcgagttcaccctgatggtggtgggcgagagcggcctgggcaagagcaccctgatcaacagcctgttcctgaccgacctgtaccccgagagagtgatccccggcgccgccgagaagatcgagagaaccgtgcagatcgaggccagcaccgtggagatcgaggagagaggcgtgaagctgagactgaccgtggtggacacccccggctacggcgacgccatcaactgcagagactgcttcaagaccatcatcagctacatcgacgagcagttcgagagatacctgcacgacgagagcggcctgaacagaagacacatcatcgacaacagagtgcactgctgcttctacttcatcagccccttcggccacggcctgaagcccctggacgtggccttcatgaaggccatccacaacaaggtgaacatcgtgcccgtgatcgccaaggccgacaccctgaccctgaaggagagagagagactgaagaagagaatcctggacgagatcgaggagcacaacatcaagatctaccacctgcccgacgccgagagcgacgaggacgaggacttcaaggagcagaccagactgctgaaggccagcatccccttcagcgtggtgggcagcaaccagctgatcgaggccaagggcaagaaggtgagaggcagactgtacccctggggcgtggtggaggtggagaaccccgagcacaacgacttcctgaagctgagaaccatgctgatcacccacatgcaggacctgcaggaggtgacccaggacctgcactacgagaacttcagaagcgagagactgaagagaggcggcagaaaggtggagaacgaggacatgaacaaggaccagatcctgctggagaaggaggccgagctgagaagaatgcaggagatgatcgccagaatgcaggcccagatgcagatgcagatgcagggcggcgacggcgacggcggcgccctgggccaccacgtgtag

SEQ ID NO: 98360 - DNA, 1086 bp, synthetic construct; identical to SEQ ID NO: 98357
  misc_feature 1..1086: note = Description of Artificial Sequence: Synthetic coding sequence
  source 1..1086: mol_type = other DNA

SEQ ID NO: 98361 - DNA, 1086 bp, synthetic construct; identical to SEQ ID NO: 98357
  misc_feature 1..1086: note = Description of Artificial Sequence: Synthetic coding sequence
  source 1..1086: mol_type = other DNA

SEQ ID NO: 98362 - DNA, 159 bp, synthetic construct
  misc_feature 1..159: note = Description of Artificial Sequence: Synthetic coding sequence
  source 1..159: mol_type = other DNA
atgagcaagcagcagcccacccagttcatcaaccccgagacccccggctacgtgggcttcgccaacctgcccaaccaggtgcacagaaagagcgtgaagaagggcttcgagttcaccctgatggtggtgggcgagagcggcctgggcaagagcacctag

SEQ ID NO: 98363 - DNA, 153 bp, synthetic construct
  misc_feature 1..153: note = Description of Artificial Sequence: Synthetic coding sequence
  source 1..153: mol_type = other DNA
atgagcaagcagcagcccacccagttcatcaaccccgagacccccggctacgtgggcttcgccaacctgcccaaccaggtgcacagaaagagcgtgaagaagggcttcgagttcaccctgatggtggtgggcgagagcggcctgggcaagtag

SEQ ID NO: 98364 - DNA, 72 bp, synthetic construct
  misc_feature 1..72: note = Description of Artificial Sequence: Synthetic coding sequence
  source 1..72: mol_type = other DNA
atgagcaagcagcagcccacccagttcatcaaccccgagacccccggctacgtgggcttcgccaacctgtag

SEQ ID NO: 98365 - DNA, 447 bp, synthetic construct
  misc_feature 1..447: note = Description of Artificial Sequence: Synthetic coding sequence
  source 1..447: mol_type = other DNA
atgagcaagcagcagcccacccagttcatcaaccccgagacccccggctacgtgggcttcgccaacctgcccaaccaggtgcacagaaagagcgtgaagaagggcttcgagttcaccctgatggtggtgggcgagagcggcctgggcaagagcaccctgatcaacagcctgttcctgaccgacctgtaccccgagagagtgatccccggcgccgccgagaagatcgagagaaccgtgcagatcgaggccagcaccgtggagatcgaggagagaggcgtgaagctgagactgaccgtggtggacacccccggctacggcgacgccatcaactgcagagactgcttcaagaccatcatcagctacatcgacgagcagttcgagagatacctgcacgacgagagcggcctgaacagaagacacatcatcgacaacagagtgcactgctag

SEQ ID NO: 98366 - DNA, 396 bp, synthetic construct
  misc_feature 1..396: note = Description of Artificial Sequence: Synthetic coding sequence
  source 1..396: mol_type = other DNA
atgagcaagcagcagcccacccagttcatcaaccccgagacccccggctacgtgggcttcgccaacctgcccaaccaggtgcacagaaagagcgtgaagaagggcttcgagttcaccctgatggtggtgggcgagagcggcctgggcaagagcaccctgatcaacagcctgttcctgaccgacctgtaccccgagagagtgatccccggcgccgccgagaagatcgagagaaccgtgcagatcgaggccagcaccgtggagatcgaggagagaggcgtgaagctgagactgaccgtggtggacacccccggctacggcgacgccatcaactgcagagactgcttcaagaccatcatcagctacatcgacgagcagttcgagagatacctgcactag

SEQ ID NO: 98367 - DNA, 219 bp, synthetic construct
  misc_feature 1..219: note = Description of Artificial Sequence: Synthetic coding sequence
  source 1..219: mol_type = other DNA
atgagcaagcagcagcccacccagttcatcaaccccgagacccccggctacgtgggcttcgccaacctgcccaaccaggtgcacagaaagagcgtgaagaagggcttcgagttcaccctgatggtggtgggcgagagcggcctgggcaagagcaccctgatcaacagcctgttcctgaccgacctgtaccccgagagagtgatccccggcgccgcctag

SEQ ID NO: 98368 - DNA, 219 bp, synthetic construct; identical to SEQ ID NO: 98367
  misc_feature 1..219: note = Description of Artificial Sequence: Synthetic coding sequence
  source 1..219: mol_type = other DNA

SEQ ID NO: 98369 - DNA, 522 bp, synthetic construct
  misc_feature 1..522: note = Description of Artificial Sequence: Synthetic coding sequence
  source 1..522: mol_type = other DNA
atgagcaagcagcagcccacccagttcatcaaccccgagacccccggctacgtgggcttcgccaacctgcccaaccaggtgcacagaaagagcgtgaagaagggcttcgagttcaccctgatggtggtgggcgagagcggcctgggcaagagcaccctgatcaacagcctgttcctgaccgacctgtaccccgagagagtgatccccggcgccgccgagaagatcgagagaaccgtgcagatcgaggccagcaccgtggagatcgaggagagaggcgtgaagctgagactgaccgtggtggacacccccggctacggcgacgccatcaactgcagagactgcttcaagaccatcatcagctacatcgacgagcagttcgagagatacctgcacgacgagagcggcctgaacagaagacacatcatcgacaacagagtgcactgctgcttctacttcatcagccccttcggccacggcctgaagcccctggacgtggccttcatgaaggccatccacaactag

SEQ ID NO: 98370 - DNA, 90 bp, synthetic construct
  misc_feature 1..90: note = Description of Artificial Sequence: Synthetic coding sequence
  source 1..90: mol_type = other DNA
tgagagatgatcgccagaatgcaggcccagatgcagatgcagatgcagggcggcgacggcgacggcggcgccctgggccaccacgtgtag

SEQ ID NO: 98371 - DNA, 861 bp, synthetic construct
  misc_feature 1..861: note = Description of Artificial Sequence: Synthetic coding sequence
  source 1..861: mol_type = other DNA
atgagcaagggccagagcggcctgggcaagagcaccctggtgaacaccctgttcaagagccaggtgagcagaaaggccagcagctggaacagagaggagaagatccccaagaccgtggagatcaaggccatcggccacgtgatcgaggagggcggcgtgaagatgaagctgaccgtgatcgacacccccggcttcggcgaccagatcaacaacgagaactgctgggagcccatcgagaagtacatcaacgagcagtacgagaagttcctgaaggaggaggtgaacatcgccagaaagaagagaatccccgacaccagagtgcactgctgcctgtacttcatcagccccaccggccacagcctgagacccctggacctggagttcatgaagcacctgagcaaggtggtgaacatcatccccgtgatcgccaaggccgacaccatgaccctggaggagaagagcgagttcaagcagagagtgagaaaggagctggaggtgaacggcatcgagttctacccccagaaggagttcgacgaggacctggaggacaagaccgagaacgacaagatcagacaggagagcatgcccttcgccgtggtgggcagcgacaaggagtaccaggtgaacggcaagagagtgctgggcagaaagaccccctggggcatcatcgaggtggagaacctgaaccactgcgagttcgccctgctgagagacttcgtgatcagaacccacctgcaggacctgaaggaggtgacccacaacatccactacgagacctacagagccaagagactgaacgacaacggcggcctgccccccgtgagcgtggacaccgaggagagccacgacagcaacccctag

SEQ ID NO: 98372 - DNA, 252 bp, synthetic construct
  misc_feature 1..252: note = Description of Artificial Sequence: Synthetic coding sequence
  source 1..252: mol_type = other DNA
atgagcaagggcctgcccgagaccagaaccgacgccgccatgagcgagctggtgcccgagcccagacccaagcccgccgtgcccatgaagcccatgagcatcaacagcaacctgctgggctacatcggcatcgacaccatcatcgagcagatgagaaagaagaccatgaagaccggcttcgacttcaacatcatggtggtggccggcagccccctgagaagcaccagcatgagcagcaccagaagcagctag

SEQ ID NO: 98373 - DNA, 1053 bp, synthetic construct
  misc_feature 1..1053: note = Description of Artificial Sequence: Synthetic coding sequence
  source 1..1053: mol_type = other DNA
atgagcaagggcctgcccgagaccagaaccgacgccgccatgagcgagctggtgcccgagcccagacccaagcccgccgtgcccatgaagcccatgagcatcaacagcaacctgctgggctacatcggcatcgacaccatcatcgagcagatgagaaagaagaccatgaagaccggcttcgacttcaacatcatggtggtgggccagagcggcctgggcaagagcaccctggtgaacaccctgttcaagagccaggtgagcagaaaggccagcagctggaacagagaggagaagatccccaagaccgtggagatcaaggccatcggccacgtgatcgaggagggcggcgtgaagatgaagctgaccgtgatcgacacccccggcttcggcgaccagatcaacaacgagaactgctgggagcccatcgagaagtacatcaacgagcagtacgagaagttcctgaaggaggaggtgaacatcgccagaaagaagagaatccccgacaccagagtgcactgctgcctgtacttcatcagccccaccggccacagcctgagacccctggacctggagttcatgaagcacctgagcaaggtggtgaacatcatccccgtgatcgccaaggccgacaccatgaccctggaggagaagagcgagttcaagcagagagtgagaaaggagctggaggtgaacggcatcgagttctacccccagaaggagttcgacgaggacctggaggacaagaccgagaacgacaagatcagacaggagagcatgcccttcgccgtggtgggcagcgacaaggagtaccaggtgaacggcaagagagtgctgggcagaaagaccccctggggcatcatcgaggtggagaacctgaaccactgcgagttcgccctgctgagagacttcgtgatcagaacccacctgcaggacctgaaggaggtgacccacaacatccactacgagacctacagagccaagagactgaacgacaacggcggcctgccccccgtgagcgtggacaccgaggagagccacgacagcaacccctag

SEQ ID NO: 98374 - DNA, 1077 bp, synthetic construct
  misc_feature 1..1077: note = Description of Artificial Sequence: Synthetic coding sequence
  source 1..1077: mol_type = other DNA
atgagcaagggcctgcccgagaccagaaccgacgccgccatgagcgagctggtgcccgagcccagacccaagcccgccgtgcccatgaagcccatgagcatcaacagcaacctgctgggctacatcggcatcgacaccatcatcgagcagatgagaaagaagaccatgaagaccggcttcgacttcaacatcatggtggtgggccagagcggcctgggcaagagcaccctggtgaacaccctgttcaagagccaggtgagcagaaaggccagcagctggaacagagaggagaagatccccaagaccgtggagatcaaggccatcggccacgtgatcgaggagggcggcgtgaagatgaagctgaccgtgatcgacacccccggcttcggcgaccagatcaacaacgagaactgctgggagcccatcgagaagtacatcaacgagcagtacgagaagttcctgaaggaggaggtgaacatcgccagaaagaagagaatccccgacaccagagtgcactgctgcctgtacttcatcagccccaccggccacagcctgagacccctggacctggagttcatgaagcacctgagcaaggtggtgaacatcatccccgtgatcgccaaggccgacaccatgaccctggaggagaagagcgagttcaagcagagagtgagaaaggagctggaggtgaacggcatcgagttctacccccagaaggagttcgacgaggacctggaggacaagaccgagaacgacaagatcagacaggagagcatgcccttcgccgtggtgggcagcgacaaggagtaccaggtgaacggcaagagagtgctgggcagaaagaccccctggggcatcatcgaggtggagaacctgaaccactgcgagttcgccctgctgagagacttcgtgatcagaacccacctgcaggacctgaaggaggtgacccacaacatccactacgagacctacagagccaagagactgaacgacaacggcggcctgccccccggcgagggcctgctgggcaccgtgctgccccccgtgcccgccaccccctgccccaccgccgagtag

SEQ ID NO: 98375 - DNA, 885 bp, synthetic construct
  misc_feature 1..885: note = Description of Artificial Sequence: Synthetic coding sequence
  source 1..885: mol_type = other DNA
atgagcaagggccagagcggcctgggcaagagcaccctggtgaacaccctgttcaagagccaggtgagcagaaaggccagcagctggaacagagaggagaagatccccaagaccgtggagatcaaggccatcggccacgtgatcgaggagggcggcgtgaagatgaagctgaccgtgatcgacacccccggcttcggcgaccagatcaacaacgagaactgctgggagcccatcgagaagtacatcaacgagcagtacgagaagttcctgaaggaggaggtgaacatcgccagaaagaagagaatccccgacaccagagtgcactgctgcctgtacttcatcagccccaccggccacagcctgagacccctggacctggagttcatgaagcacctgagcaaggtggtgaacatcatccccgtgatcgccaaggccgacaccatgaccctggaggagaagagcgagttcaagcagagagtgagaaaggagctggaggtgaacggcatcgagttctacccccagaaggagttcgacgaggacctggaggacaagaccgagaacgacaagatcagacaggagagcatgcccttcgccgtggtgggcagcgacaaggagtaccaggtgaacggcaagagagtgctgggcagaaagaccccctggggcatcatcgaggtggagaacctgaaccactgcgagttcgccctgctgagagacttcgtgatcagaacccacctgcaggacctgaaggaggtgacccacaacatccactacgagacctacagagccaagagactgaacgacaacggcggcctgccccccggcgagggcctgctgggcaccgtgctgccccccgtgcccgccaccccctgccccaccgccgagtag

SEQ ID NO: 98376 - DNA, 537 bp, synthetic construct
  misc_feature 1..537: note = Description of Artificial Sequence: Synthetic coding sequence
  source 1..537: mol_type = other DNA
atgagcgagctggtgcccgagcccagacccaagcccgccgtgcccatgaagcccatgagcatcaacagcaacctgctgggctacatcggcatcgacaccatcatcgagcagatgagaaagaagaccatgaagaccggcttcgacttcaacatcatggtggtgggccagagcggcctgggcaagagcaccctggtgaacaccctgttcaagagccaggtgagcagaaaggccagcagctggaacagagaggagaagatccccaagaccgtggagatcaaggccatcggccacgtgatcgaggagggcggcgtgaagatgaagctgaccgtgatcgacacccccggcttcggcgaccagatcaacaacgagaactgctgggagcccatcgagaagtacatcaacgagcagtacgagaagttcctgaaggaggaggtgaacatcgccagaaagaagagaatccccgacaccagagtgcactgctgcctgtacttcatcagccccaccggccacagcctgagacccctggacctggagtag

SEQ ID NO: 98377 - DNA, 1137 bp, synthetic construct
  misc_feature 1..1137: note = Description of Artificial Sequence: Synthetic coding sequence
  source 1..1137: mol_type = other DNA
atggacagcctggccgccccccaggacagactggtggagcagctgctgagccccagaacccaggcccagagaagactgaaggacatcgacaagcagtacgtgggcttcgccaccctgcccaaccaggtgcacagaaagagcgtgaagaagggcttcgacttcaccctgatggtggccggcgagagcggcctgggcaagagcaccctggtgcacagcctgttcctgaccgacctgtacaaggacagaaagctgctgagcgccgaggagagaatcagccagaccgtggagatcctgaagcacaccgtggacatcgaggagaagggcgtgaagctgaagctgaccatcgtggacacccccggcttcggcgacgccgtgaacaacaccgagtgctggaagcccatcaccgactacgtggaccagcagttcgagcagtacttcagagacgagagcggcctgaacagaaagaacatccaggacaacagagtgcactgctgcctgtacttcatcagccccttcggccacggcctgagacccgtggacgtgggcttcatgaaggccctgcacgagaaggtgaacatcgtgcccctgatcgccaaggccgactgcctggtgcccagcgagatcagaaagctgaaggagagaatcagagaggagatcgacaagttcggcatccacgtgtaccagttccccgagtgcgacagcgacgaggacgaggacttcaagcagcaggacagagagctgaaggagagcgcccccttcgccgtgatcggcagcaacaccgtggtggaggccaagggccagagagtgagaggcagactgtacccctggggcatcgtggaggtggagaaccaggcccactgcgacttcgtgaagctgagaaacatgctgatcagaacccacatgcacgacctgaaggacgtgacctgcgacgtgcactacgagaactacagagcccactgcatccagcagatgaccagcaagctgacccaggacagcagaatggagagccccatccccatcctgcccctgcccacccccgacgccgagaccgagaagctgatcagaatgaaggacgaggagctgagaagaatgcaggagatgctgcagagaatgaagcagcagatgcaggaccagtag

SEQ ID NO: 98378 - DNA, 969 bp, synthetic construct
  misc_feature 1..969: note = Description of Artificial Sequence: Synthetic coding sequence
  source 1..969: mol_type = other DNA
atggtggccggcgagagcggcctgggcaagagcaccctggtgcacagcctgttcctgaccgacctgtacaaggacagaaagctgctgagcgccgaggagagaatcagccagaccgtggagatcctgaagcacaccgtggacatcgaggagaagggcgtgaagctgaagctgaccatcgtggacacccccggcttcggcgacgccgtgaacaacaccgagtgctggaagcccatcaccgactacgtggaccagcagttcgagcagtacttcagagacgagagcggcctgaacagaaagaacatccaggacaacagagtgcactgctgcctgtacttcatcagccccttcggccacggcctgagacccgtggacgtgggcttcatgaaggccctgcacgagaaggtgaacatcgtgcccctgatcgccaaggccgactgcctggtgcccagcgagatcagaaagctgaaggagagaatcagagaggagatcgacaagttcggcatccacgtgtaccagttccccgagtgcgacagcgacgaggacgaggacttcaagcagcaggacagagagctgaaggagagcgcccccttcgccgtgatcggcagcaacaccgtggtggaggccaagggccagagagtgagaggcagactgtacccctggggcatcgtggaggtggagaaccaggcccactgcgacttcgtgaagctgagaaacatgctgatcagaacccacatgcacgacctgaaggacgtgacctgcgacgtgcactacgagaactacagagcccactgcatccagcagatgaccagcaagctgacccaggacagcagaatggagagccccatccccatcctgcccctgcccacccccgacgccgagaccgagaagctgatcagaatgaaggacgaggagctgagaagaatgcaggagatgctgcagagaatgaagcagcagatgcaggaccagtag

SEQ ID NO: 98379 - DNA, 1041 bp, synthetic construct
  misc_feature 1..1041: note = Description of Artificial Sequence: Synthetic coding sequence
  source 1..1041: mol_type = other DNA
atggacagcctggccgccccccaggacagactggtggagcagctgctgagccccagaacccaggcccagagaagactgaaggacatcgacaagcagtacgtgggcttcgccaccctgcccaaccaggtgcacagaaagagcgtgaagaagggcttcgacttcaccctgatggtggccggcgagagcggcctgggcaagagcaccctggtgcacagcctgttcctgaccgacctgtacaaggacagaaagctgctgagcgccgaggagagaatcagccagaccgtggagatcctgaagcacaccgtggacatcgaggagaagggcgtgaagctgaagctgaccatcgtggacacccccggcttcggcgacgccgtgaacaacaccgagtgctggaagcccatcaccgactacgtggaccagcagttcgagcagtacttcagagacgagagcggcctgaacagaaagaacatccaggacaacagagtgcactgctgcctgtacttcatcagccccttcggccacggcctgagacccgtggacgtgggcttcatgaaggccctgcacgagaaggtgaacatcgtgcccctgatcgccaaggccgactgcctggtgcccagcgagatcagaaagctgaaggagagaatcagagaggagatcgacaagttcggcatccacgtgtaccagttccccgagtgcgacagcgacgaggacgaggacttcaagcagcaggacagagagctgaaggagagcgcccccttcgccgtgatcggcagcaacaccgtggtggaggccaagggccagagagtgagaggcagactgtacccctggggcatcgtggagggcgccctgagactgagagaggccgcccagcacgcccacccccacgcctacgccagaccccagggcagagacgtgagaagagccctgagagagctgcccagagccctgcaccccgccgacgaccagcagaccgaccccggccagccccacggcgagccccaccccgaccccgccgccgcccaccccggcagaagagactag

SEQ ID NO: 98380 - DNA, 450 bp, synthetic construct
  misc_feature 1..450: note = Description of Artificial Sequence: Synthetic coding sequence
  source 1..450: mol_type = other DNA
ctgcccaaccaggtgcacagaaagagcgtgaagaagggcttcgacttcaccctgatggtggccggcgagagcggcctgggcaagagcaccctggtgcacagcctgttcctgaccgacctgtacaaggacagaaagctgctgagcgccgaggagagaatcagccagaccgtggagatcctgaagcacaccgtggacatcgaggagaagggcgtgaagctgaagctgaccatcgtggacacccccggcttcggcgacgccgtgaacaacaccgagtgctggaagcccatcaccgactacgtggaccagcagttcgagcagtacttcagagacgagagcggcctgaacagaaagaacatccaggacaacagagtgcactgctgcctgtacttcatcagccccttcggccacggcctgagacccgtggacggcttccacgagggcatcgcctag

SEQ ID NO: 98381 - DNA, 1110 bp, synthetic construct
  misc_feature 1..1110: note = Description of Artificial Sequence: Synthetic coding sequence
  source 1..1110: mol_type = other DNA
atgagcaccggcctgagatacaagagcaagctggccacccccgaggacaagcaggacatcgacaagcagtacgtgggcttcgccaccctgcccaaccaggtgcacagaaagagcgtgaagaagggcttcgacttcaccctgatggtggccggcgagagcggcctgggcaagagcaccctggtgcacagcctgttcctgaccgacctgtacaaggacagaaagctgctgagcgccgaggagagaatcagccagaccgtggagatcctgaagcacaccgtggacatcgaggagaagggcgtgaagctgaagctgaccatcgtggacacccccggcttcggcgacgccgtgaacaacaccgagtgctggaagcccatcaccgactacgtggaccagcagttcgagcagtacttcagagacgagagcggcctgaacagaaagaacatccaggacaacagagtgcactgctgcctgtacttcatcagccccttcggccacggcctgagacccgtggacgtgggcttcatgaaggccctgcacgagaaggtgaacatcgtgcccctgatcgccaaggccgactgcctggtgcccagcgagatcagaaagctgaaggagagaatcagagaggagatcgacaagttcggcatccacgtgtaccagttccccgagtgcgacagcgacgaggacgaggacttcaagcagcaggacagagagctgaaggagagcgcccccttcgccgtgatcggcagcaacaccgtggtggaggccaagggccagagagtgagaggcagactgtacccctggggcatcgtggaggtggagaaccaggcccactgcgacttcgtgaagctgagaaacatgctgatcagaacccacatgcacgacctgaaggacgtgacctgcgacgtgcactacgagaactacagagcccactgcatccagcagatgaccagcaagctgacccaggacagcagaatggagagccccatccccatcctgcccctgcccacccccgacgccgagaccgagaagctgatcagaatgaaggacgaggagctgagaagaatgcaggagatgctgcagagaatgaagcagcagatgcaggaccagtag

SEQ ID NO: 98382 - DNA, 1137 bp, synthetic construct; identical to SEQ ID NO: 98377
  misc_feature 1..1137: note = Description of Artificial Sequence: Synthetic coding sequence
  source 1..1137: mol_type = other DNA

SEQ ID NO: 98383 - DNA, 1305 bp, synthetic construct
  misc_feature 1..1305: note = Description of Artificial Sequence: Synthetic coding sequence
  source 1..1305: mol_type = other DNA
atggccgccaccgacatcgccagacaggtgggcgagggctgcagaaccgtgcccctggccggccacgtgggcttcgacagcctgcccgaccagctggtgaacaagagcgtgagccagggcttctgcttcaacatcctgtgcgtgggcgagaccggcctgggcaagagcaccctgatggacaccctgttcaacaccaagttcgagggcgagcccgccacccacacccagcccggcgtgcagctgcagagcaacacctacgacctgcaggagagcaacgtgagactgaagctgaccatcgtgagcaccgtgggcttcggcgaccagatcaacaaggaggacagctacaagcccatcgtggagttcatcgacgcccagttcgaggcctacctgcaggaggagctgaagatcagaagagtgctgcacacctaccacgacagcagaatccacgtgtgcctgtacttcatcgcccccaccggccacagcctgaagagcctggacctggtgaccatgaagaagctggacagcaaggtgaacatcatccccatcatcgccaaggccgacgccatcagcaagagcgagctgaccaagttcaagatcaagatcaccagcgagctggtgagcaacggcgtgcagatctaccagttccccaccgacgacgagagcgtggccgagatcaacggcaccatgaacgcccacctgcccttcgccgtgatcggcagcaccgaggagctgaagatcggcaacaagatgatgagagccagacagtacccctggggcaccgtgcaggtggagaacgaggcccactgcgacttcgtgaagctgagagagatgctgatcagagtgaacatggaggacctgagagagcagacccacaccagacactacgagctgtacagaagatgcaagctggaggagatgggcttcaaggacaccgaccccgacagcaagcccttcagcctgcaggagacctacgaggccaagagaaacgagttcctgggcgagctgcagaagaaggaggaggagatgagacagatgttcgtgcagagagtgaaggagaaggaggccgagctgaaggaggccgagaaggagctgcacgagaagttcgacagactgaagaagctgcaccaggacgagaagaagaagctggaggacaagaagaagagcctggacgacgaggtgaacgccttcaagcagagaaagaccgccgccgagctgctgcagagccagggcagccaggccggcggcagccagaccctgaagagagacaaggagaagaagaacaacccctggctgtgcaccgagtag

SEQ ID NO: 98384 - DNA, 1290 bp, synthetic construct
  misc_feature 1..1290: note = Description of Artificial Sequence: Synthetic coding sequence
  source 1..1290: mol_type = other DNA
atggccgccaccgacatcgccagacaggtgggcgagggctgcagaaccgtgcccctggccggccacgtgggcttcgacagcctgcccgaccagctggtgaacaagagcgtgagccagggcttctgcttcaacatcctgtgcgtgggcgagaccggcctgggcaagagcaccctgatggacaccctgttcaacaccaagttcgagggcgagcccgccacccacacccagcccggcgtgcagctgcagagcaacacctacgacctgcaggagagcaacgtgagactgaagctgaccatcgtgagcaccgtgggcttcggcgaccagatcaacaaggaggacagctacaagcccatcgtggagttcatcgacgcccagttcgaggcctacctgcaggaggagctgaagatcagaagagtgctgcacacctaccacgacagcagaatccacgtgtgcctgtacttcatcgcccccaccggccacagcctgaagagcctggacctggtgaccatgaagaagctggacagcaaggtgaacatcatccccatcatcgccaaggccgacgccatcagcaagagcgagctgaccaagttcaagatcaagatcaccagcgagctggtgagcaacggcgtgcagatctaccagttccccaccgacgacgagagcgtggccgagatcaacggcaccatgaacgcccacctgcccttcgccgtgatcggcagcaccgaggagctgaagatcggcaacaagatgatgagagccagacagtacccctggggcaccgtgcaggtggagaacgaggcccactgcgacttcgtgaagctgagagagatgctgatcagagtgaacatggaggacctgagagagcagacccacaccagacactacgagctgtacagaagatgcaagctggaggagatgggcttcaaggacaccgaccccgacagcaagcccttcagcctgcaggagacctacgaggccaagagaaacgagttcctgggcgagctgcagaagaaggaggaggagatgagacagatgttcgtgcagagagtgaaggagaaggaggccgagctgaaggaggccgagaaggagctgcacgagaagttcgacagactgaagaagctgcaccaggacgagaagaagaagctggaggacaagaagaagagcctggacgacgaggtgaacgccttcaagcagagaaagaccgccgccgagctgctgcagagccagggcagccaggccggcggcagccagaccctgaagagagacaaggagaagaagaacttcttctag

SEQ ID NO: 98385 - DNA, 1296 bp, synthetic construct
  misc_feature 1..1296: note = Description of Artificial Sequence: Synthetic coding sequence
  source 1..1296: mol_type = other DNA
atggccgccaccgacatcgccagacaggtgggcgagggctgcagaaccgtgcccctggccggccacgtgggcttcgacagcctgcccgaccagctggtgaacaagagcgtgagccagggcttctgcttcaacatcctgtgcgtgggcgagaccggcctgggcaagagcaccctgatggacaccctgttcaacaccaagttcgagggcgagcccgccacccacacccagcccggcgtgcagctgcagagcaacacctacgacctgcaggagagcaacgtgagactgaagctgaccatcgtgagcaccgtgggcttcggcgaccagatcaacaaggaggacagctacaagcccatcgtggagttcatcgacgcccagttcgaggcctacctgcaggaggagctgaagatcagaagagtgctgcacacctaccacgacagcagaatccacgtgtgcctgtacttcatcgcccccaccggccacagcctgaagagcctggacctggtgaccatgaagaagctggacagcaaggtgaacatcatccccatcatcgccaaggccgacgccatcagcaagagcgagctgaccaagttcaagatcaagatcaccagcgagctggtgagcaacggcgtgcagatctaccagttccccaccgacgacgagagcgtggccgagatcaacggcaccatgaacgcccacctgcccttcgccgtgatcggcagcaccgaggagctgaagatcggcaacaagatgatgagagccagacagtacccctggggcaccgtgcaggtggagaacgaggcccactgcgacttcgtgaagctgagagagatgctgatcagagtgaacatggaggacctgagagagcagacccacaccagacactacgagctgtacagaagatgcaagctggaggagatgggcttcaaggacaccgaccccgacagcaagcccttcagcctgcaggagacctacgaggccaagagaaacgagttcctgggcgagctgcagaagaaggaggaggagatgagacagatgttcgtgcagagagtgaaggagaaggaggccgagctgaaggaggccgagaaggagctgcacgagaagttcgacagactgaagaagctgcaccaggacgagaagaagaagctggaggacaagaagaagagcctggacgacgaggtgaacgccttcaagcagagaaagaccgccgccgagctgctgcagagccagggcagccaggccggcggcagccagaccctgaagagagacaaggagaagaagaacctgggcttcctgtag

SEQ ID NO: 98386 - DNA, 1284 bp, synthetic construct
  misc_feature 1..1284: note = Description of Artificial Sequence: Synthetic coding sequence
  source 1..1284: mol_type = other DNA
atggccgccaccgacatcgccagacaggtgggcgagggctgcagaaccgtgcccctggccggccacgtgggcttcgacagcctgcccgaccagctggtgaacaagagcgtgagccagggcttctgcttcaacatcctgtgcgtgggcgagaccggcctgggcaagagcaccctgatggacaccctgttcaacaccaagttcgagggcgagcccgccacccacacccagcccggcgtgcagctgcagagcaacacctacgacctgcaggagagcaacgtgagactgaagctgaccatcgtgagcaccgtgggcttcggcgaccagatcaacaaggaggacagctacaagcccatcgtggagttcatcgacgcccagttcgaggcctacctgcaggaggagctgaagatcagaagagtgctgcacacctaccacgacagcagaatccacgtgtgcctgtacttcatcgcccccaccggccacagcctgaagagcctggacctggtgaccatgaagaagctggacagcaaggtgaacatcatccccatcatcgccaaggccgacgccatcagcaagagcgagctgaccaagttcaagatcaagatcaccagcgagctggtgagcaacggcgtgcagatctaccagttccccaccgacgacgagagcgtggccgagatcaacggcaccatgaacgcccacctgcccttcgccgtgatcggcagcaccgaggagctgaagatcggcaacaagatgatgagagccagacagtacccctggggcaccgtgcaggtggagaacgaggcccactgcgacttcgtgaagctgagagagatgctgatcagagtgaacatggaggacctgagagagcagacccacaccagacactacgagctgtacagaagatgcaagctggaggagatgggcttcaaggacaccgaccccgacagcaagcccttcagcctgcaggagacctacgaggccaagagaaacgagttcctgggcgagctgcagaagaaggaggaggagatgagacagatgttcgtgcagagagtgaaggagaaggaggccgagctgaaggaggccgagaaggagctgcacgagaagttcgacagactgaagaagctgcaccaggacgagaagaagaagctggaggacaagaagaagagcctggacgacgaggtgaacgccttcaagcagagaaagaccgccgccgagctgctgcagagccagggcagccaggccggcggcagccagaccctgaagagagacaaggagaagaagaactag

SEQ ID NO: 98387 - DNA, 1284 bp, synthetic construct; identical to SEQ ID NO: 98386
  misc_feature 1..1284: note = Description of Artificial Sequence: Synthetic coding sequence
  source 1..1284: mol_type = other DNA

SEQ ID NO: 98388 - DNA, 1110 bp, synthetic construct
  misc_feature 1..1110: note = Description of Artificial Sequence: Synthetic coding sequence
  source 1..1110: mol_type = other DNA
atggacaccctgttcaacaccaagttcgagggcgagcccgccacccacacccagcccggcgtgcagctgcagagcaacacctacgacctgcaggagagcaacgtgagactgaagctgaccatcgtgagcaccgtgggcttcggcgaccagatcaacaaggaggacagctacaagcccatcgtggagttcatcgacgcccagttcgaggcctacctgcaggaggagctgaagatcagaagagtgctgcacacctaccacgacagcagaatccacgtgtgcctgtacttcatcgcccccaccggccacagcctgaagagcctggacctggtgaccatgaagaagctggacagcaaggtgaacatcatccccatcatcgccaaggccgacgccatcagcaagagcgagctgaccaagttcaagatcaagatcaccagcgagctggtgagcaacggcgtgcagatctaccagttccccaccgacgacgagagcgtggccgagatcaacggcaccatgaacgcccacctgcccttcgccgtgatcggcagcaccgaggagctgaagatcggcaacaagatgatgagagccagacagtacccctggggcaccgtgcaggtggagaacgaggcccactgcgacttcgtgaagctgagagagatgctgatcagagtgaacatggaggacctgagagagcagacccacaccagacactacgagctgtacagaagatgcaagctggaggagatgggcttcaaggacaccgaccccgacagcaagcccttcagcctgcaggagacctacgaggccaagagaaacgagttcctgggcgagctgcagaagaaggaggaggagatgagacagatgttcgtgcagagagtgaaggagaaggaggccgagctgaaggaggccgagaaggagctgcacgagaagttcgacagactgaagaagctgcaccaggacgagaagaagaagctggaggacaagaagaagagcctggacgacgaggtgaacgccttcaagcagagaaagaccgccgccgagctgctgcagagccagggcagccaggccggcggcagccagaccctgaagagagacaaggagaagaagaagtag

SEQ ID NO: 98389 - DNA, 1374 bp, synthetic construct
  misc_feature 1..1374: note = Description of Artificial Sequence: Synthetic coding sequence
  source 1..1374: mol_type = other DNA
atggccgccaccgacatcgccagacaggtgttcggcagaagaagactgctgctgctgggcttcgagaccgtgggcttcagcgccgcctgcaccgaggagggcggccacatgctgagaagaggcgagggctgcagaaccgtgcccctggccggccacgtgggcttcgacagcctgcccgaccagctggtgaacaagagcgtgagccagggcttctgcttcaacatcctgtgcgtgggcgagaccggcctgggcaagagcaccctgatggacaccctgttcaacaccaagttcgagggcgagcccgccacccacacccagcccggcgtgcagctgcagagcaacacctacgacctgcaggagagcaacgtgagactgaagctgaccatcgtgagcaccgtgggcttcggcgaccagatcaacaaggaggacagctacaagcccatcgtggagttcatcgacgcccagttcgaggcctacctgcaggaggagctgaagatcagaagagtgctgcacacctaccacgacagcagaatccacgtgtgcctgtacttcatcgcccccaccggccacagcctgaagagcctggacctggtgaccatgaagaagctggacagcaaggtgaacatcatccccatcatcgccaaggccgacgccatcagcaagagcgagctgaccaagttcaagatcaagatcaccagcgagctggtgagcaacggcgtgcagatctaccagttccccaccgacgacgagagcgtggccgagatcaacggcaccatgaacgcccacctgcccttcgccgtgatcggcagcaccgaggagctgaagatcggcaacaagatgatgagagccagacagtacccctggggcaccgtgcaggtggagaacgaggcccactgcgacttcgtgaagctgagagagatgctgatcagagtgaacatggaggacctgagagagcagacccacaccagacactacgagctgtacagaagatgcaagctggaggagatgggcttcaaggacaccgaccccgacagcaagcccttcagcctgcaggagacctacgaggccaagagaaacgagttcctgggcgagctgcagaagaaggaggaggagatgagacagatgttcgtgcagagagtgaaggagaaggaggccgagctgaaggaggccgagaaggagctgcacgagaagttcgacagactgaagaagctgcaccaggacgagaagaagaagctggaggacaagaagaagagcctggacgacgaggtgaacgccttcaagcagagaaagaccgccgccgagctgctgcagagccagggcagccaggccggcggcagccagaccctgaagagagacaaggagaagaagaagtag

SEQ ID NO: 98390 - DNA, 1284 bp, synthetic construct; identical to SEQ ID NO: 98386
  misc_feature 1..1284: note = Description of Artificial Sequence: Synthetic coding sequence
  source 1..1284: mol_type = other DNA

SEQ ID NO: 98391 - DNA, 804 bp, synthetic construct
  misc_feature 1..804: note = Description of Artificial Sequence: Synthetic coding sequence
  source 1..804: mol_type = other DNA
atggccgccaccgacatcgccagacaggtgggcgagggctgcagaaccgtgcccctggccggccacgtgggcttcgacagcctgcccgaccagctggtgaacaagagcgtgagccagggcttctgcttcaacatcctgtgcgtgggcgagaccggcctgggcaagagcaccctgatggacaccctgttcaacaccaagttcgagggcgagcccgccacccacacccagcccggcgtgcagctgcagagcaacacctacgacctgcaggagagcaacgtgagactgaagctgaccatcgtgagcaccgtgggcttcggcgaccagatcaacaaggaggacagctacaagcccatcgtggagttcatcgacgcccagttcgaggcctacctgcaggaggagctgaagatcagaagagtgctgcacacctaccacgacagcagaatccacgtgtgcctgtacttcatcgcccccaccggccacagcctgaagagcctggacctggtgaccatgaagaagctggacagcaaggtgaacatcatccccatcatcgccaaggccgacgccatcagcaagagcgagctgaccaagttcaagatcaagatcaccagcgagctggtgagcaacggcgtgcagatctaccagttccccaccgacgacgagagcgtggccgagatcaacggcaccatgaacgcccacctgcccttcgccgtgatcggcagcaccgaggagctgaagatcggcaacaagatgatgagagccagacagtacccctggggcaccgtgcagggcagcagccaggtgtag

SEQ ID NO: 98392 - DNA, 1452 bp, synthetic construct
  misc_feature 1..1452: note = Description of Artificial Sequence: Synthetic coding sequence
  source 1..1452: mol_type = other DNA
atggccgccaccgacctggagagattcagcaacgccgagcccgagcccagaagcctgagcctgggcggccacgtgggcttcgacagcctgcccgaccagctggtgagcaagagcgtgacccagggcttcagcttcaacatcctgtgcgtgggcgagaccggcatcggcaagagcaccctgatgaacaccctgttcaacaccaccttcgagaccgaggaggccagccaccacgaggcctgcgtgagactgagaccccagacctacgacctgcaggagagcaacgtgcagctgaagctgaccatcgtggacgccgtgggcttcggcgaccagatcaacaaggacgagagctacagacccatcgtggactacatcgacgcccagttcgagaactacctgcaggaggagctgaagatcagaagaagcctgttcgactaccacgacaccagaatccacgtgtgcctgtacttcatcacccccaccggccacagcctgaagagcctggacctggtgaccatgaagaagctggacagcaaggtgaacatcatccccatcatcgccaaggccgacaccatcagcaagagcgagctgcacaagttcaagatcaagatcatgggcgagctggtgagcaacggcgtgcagatctaccagttccccaccgacgacgaggccgtggccgagatcaacgccgtgatgaacgcccacctgcccttcgccgtggtgggcagcaccgaggaggtgaaggtgggcaacaagctggtgagagccagacagtacccctggggcgtggtgcaggtggagaacgagaaccactgcgacttcgtgaagctgagagagatgctgatcagagtgaacatggaggacctgagagagcagacccacagcagacactacgagctgtacagaagatgcaagctggaggagatgggcttccaggacagcgacggcgacagccagcccttcagcctgcaggagacctacgaggccaagagaaaggagttcctgagcgagctgcagagaaaggaggaggagatgagacagatgttcgtgaacaaggtgaaggagaccgagctggagctgaaggagaaggagagagagctgcacgagaagttcgagcacctgaagagagtgcaccaggaggagaagagaaaggtggaggagaagagaagagagctggaggaggagaccaacgccttcaacagaagaaaggccgccgtggaggccctgcagagccaggccctgcacgccaccagccagcagcccctgagaaaggacaaggacaagaagaacagaagcgacatcggcgcccaccagcccggcatgagcctgagcagcagcaaggtgatgatgaccaaggccagcgtggagcccctgaactgcagcagctggtggcccgccatccagtgctgcagctgcctggtgagagacgccacctggagagagggcttcctgtag

SEQ ID NO: 98393 - DNA, 1110 bp, synthetic construct
  misc_feature 1..1110: note = Description of Artificial Sequence: Synthetic coding sequence
  source 1..1110: mol_type = other DNA
atgaacaccctgttcaacaccaccttcgagaccgaggaggccagccaccacgaggcctgcgtgagactgagaccccagacctacgacctgcaggagagcaacgtgcagctgaagctgaccatcgtggacgccgtgggcttcggcgaccagatcaacaaggacgagagctacagacccatcgtggactacatcgacgcccagttcgagaactacctgcaggaggagctgaagatcagaagaagcctgttcgactaccacgacaccagaatccacgtgtgcctgtacttcatcacccccaccggccacagcctgaagagcctggacctggtgaccatgaagaagctggacagcaaggtgaacatcatccccatcatcgccaaggccgacaccatcagcaagagcgagctgcacaagttcaagatcaagatcatgggcgagctggtgagcaacggcgtgcagatctaccagttccccaccgacgacgaggccgtggccgagatcaacgccgtgatgaacgcccacctgcccttcgccgtggtgggcagcaccgaggaggtgaaggtgggcaacaagctggtgagagccagacagtacccctggggcgtggtgcaggtggagaacgagaaccactgcgacttcgtgaagctgagagagatgctgatcagagtgaacatggaggacctgagagagcagacccacagcagacactacgagctgtacagaagatgcaagctggaggagatgggcttccaggacagcgacggcgacagccagcccttcagcctgcaggagacctacgaggccaagagaaaggagttcctgagcgagctgcagagaaaggaggaggagatgagacagatgttcgtgaacaaggtgaaggagaccgagctggagctgaaggagaaggagagagagctgcacgagaagttcgagcacctgaagagagtgcaccaggaggagaagagaaaggtggaggagaagagaagagagctggaggaggagaccaacgccttcaacagaagaaaggccgccgtggaggccctgcagagccaggccctgcacgccaccagccagcagcccctgagaaaggacaaggacaagaagaactag

SEQ ID NO: 98394 - DNA, 1290 bp, synthetic construct
  misc_feature 1..1290: note = Description of Artificial Sequence: Synthetic coding sequence
  source 1..1290: mol_type = other DNA
atggccgccaccgacctggagagattcagcaacgccgagcccgagcccagaagcctgagcctgggcggccacgtgggcttcgacagcctgcccgaccagctggtgagcaagagcgtgacccagggcttcagcttcaacatcctgtgcgtgggcgagaccggcatcggcaagagcaccctgatgaacaccctgttcaacaccaccttcgagaccgaggaggccagccaccacgaggcctgcgtgagactgagaccccagacctacgacctgcaggagagcaacgtgcagctgaagctgaccatcgtggacgccgtgggcttcggcgaccagatcaacaaggacgagagctacagacccatcgtggactacatcgacgcccagttcgagaactacctgcaggaggagctgaagatcagaagaagcctgttcgactaccacgacaccagaatccacgtgtgcctgtacttcatcacccccaccggccacagcctgaagagcctggacctggtgaccatgaagaagctggacagcaaggtgaacatcatccccatcatcgccaaggccgacaccatcagcaagagcgagctgcacaagttcaagatcaagatcatgggcgagctggtgagcaacggcgtgcagatctaccagttccccaccgacgacgaggccgtggccgagatcaacgccgtgatgaacgcccacctgcccttcgccgtggtgggcagcaccgaggaggtgaaggtgggcaacaagctggtgagagccagacagtacccctggggcgtggtgcaggtggagaacgagaaccactgcgacttcgtgaagctgagagagatgctgatcagagtgaacatggaggacctgagagagcagacccacagcagacactacgagctgtacagaagatgcaagctggaggagatgggcttccaggacagcgacggcgacagccagcccttcagcctgcaggagacctacgaggccaagagaaaggagttcctgagcgagctgcagagaaaggaggaggagatgagacagatgttcgtgaacaaggtgaaggagaccgagctggagctgaaggagaaggagagagagctgcacgagaagttcgagcacctgaagagagtgcaccaggaggagaagagaaaggtggaggagaagagaagagagctggaggaggagaccaacgccttcaacagaagaaaggccgccgtggaggccctgcagagccaggccctgcacgccaccagccagcagcccctgagaaaggacaaggacaagaagaactag

SEQ ID NO: 98395 - DNA, 1329 bp, synthetic construct
  misc_feature 1..1329: note = Description of Artificial Sequence: Synthetic coding sequence
  source 1..1329: mol_type = other DNA
atggccgccaccgacctggagagattcagcaacgccgagcccgagcccagaagcctgagcctgggcggccacgtgggcttcgacagcctgcccgaccagctggtgagcaagagcgtgacccagggcttcagcttcaacatcctgtgcgtgggcgagaccggcatcggcaagagcaccctgatgaacaccctgttcaacaccaccttcgagaccgaggaggccagccaccacgaggcctgcgtgagactgagaccccagacctacgacctgcaggagagcaacgtgcagctgaagctgaccatcgtggacgccgtgggcttcggcgaccagatcaacaaggacgagagctacagacccatcgtggactacatcgacgcccagttcgagaactacctgcaggaggagctgaagatcagaagaagcctgttcgactaccacgacaccagaatccacgtgtgcctgtacttcatcacccccaccggccacagcctgaagagcctggacctggtgaccatgaagaagctggacagcaaggtgaacatcatccccatcatcgccaaggccgacaccatcagcaagagcgagctgcacaagttcaagatcaagatcatgggcgagctggtgagcaacggcgtgcagatctaccagttccccaccgacgacgaggccgtggccgagatcaacgccgtgatgaacgcccacctgcccttcgccgtggtgggcagcaccgaggaggtgaaggtgggcaacaagctggtgagagccagacagtacccctggggcgtggtgcaggtggagaacgagaaccactgcgacttcgtgaagctgagagagatgctgatcagagtgaacatggaggacctgagagagcagacccacagcagacactacgagctgtacagaagatgcaagctggaggagatgggcttccaggacagcgacggcgacagccagcccttcagcctgcaggagacctacgaggccaagagaaaggagttcctgagcgagctgcagagaaaggaggaggagatgagacagatgttcgtgaacaaggtgaaggagaccgagctggagctgaaggagaaggagagagagctgcacgagaagttcgagcacctgaagagagtgcaccaggaggagaagagaaaggtggaggagaagagaagagagctggaggaggagaccaacgccttcaacagaagaaaggccgccgtggaggccctgcagagccaggccctgcacgccaccagccagcagcccctgagaaaggacaaggacaagaagaaggccagcggctggagcagcatctacagcgtgaccatcccctag

SEQ ID NO: 98396 - DNA, 1707 bp, synthetic construct
  misc_feature 1..1707: note = Description of Artificial Sequence: Synthetic coding sequence
  source 1..1707: mol_type = other DNA
atggagagagacagaatcagcgccctgaagagaagcttcgaggtggaggaggtggagacccccaacagcaccccccccagaagagtgcagacccccctgctgagagccaccgtggccagcagcacccagaagttccaggacctgggcgtgaagaacagcgagcccagcgccagacacgtggacagcctgagccagagaagccccaaggccagcctgagaagagtggagctgagcggccccaaggccgccgagcccgtgagcagaagaaccgagctgagcatcgacatcagcagcaagcaggtggagaacgccggcgccatcggccccagcagattcggcctgaagagagccgaggtgctgggccacaagacccccgagcccgcccccagaagaaccgagatcaccatcgtgaagccccaggagagcgcccacagaagaatggagccccccgccagcaaggtgcccgaggtgcccaccgcccccgccaccgacgccgcccccaagagagtggagatccagatgcccaagcccgccgaggcccccaccgcccccagccccgcccagaccctggagaacagcgagcccgcccccgtgagccagctgcagagcagactggagcccaagccccagccccccgtggccgaggccacccccagaagccaggaggccaccgaggccgcccccagctgcgtgggcgacatggccgacacccccagagacgccggcctgaagcaggcccccgccagcagaaacgagaaggcccccgtggacttcggctacgtgggcatcgacagcatcctggagcagatgagaagaaaggccatgaagcagggcttcgagttcaacatcatggtggtgggccagagcggcctgggcaagagcaccctgatcaacaccctgttcaagagcaagatcagcagaaagagcgtgcagcccaccagcgaggagagaatccccaagaccatcgagatcaagagcatcacccacgacatcgaggagaagggcgtgagaatgaagctgaccgtgatcgacacccccggcttcggcgaccacatcaacaacgagaactgctggcagcccatcatgaagttcatcaacgaccagtacgagaagtacctgcaggaggaggtgaacatcaacagaaagaagagaatccccgacaccagagtgcactgctgcctgtacttcatccccgccaccggccacagcctgagacccctggacatcgagttcatgaagagactgagcaaggtggtgaacatcgtgcccgtgatcgccaaggccgacaccctgaccctggaggagagagtgcacttcaagcagagaatcaccgccgacctgctgagcaacggcatcgacgtgtacccccagaaggagttcgacgaggacagcgaggacagactggtgaacgagaagttcagagagatgatccccttcgccgtggtgggcagcgaccacgagtaccaggtgaacggcaagagaatcctgggcagaaagaccaagtggggcaccatcgaggtggagaacaccacccactgcgagttcgcctacctgagagacctgctgatcagaacccacatgcagaacatcaaggacatcaccagcagcatccacttcgaggcctacagagtgaagagactgaacgagggcagcagcgccatggccaacggcatggaggagaaggagcccgaggcccccgagatgtag

SEQ ID NO: 98397 - DNA, 591 bp, synthetic construct
  misc_feature 1..591: note = Description of Artificial Sequence: Synthetic coding sequence
  source 1..591: mol_type = other DNA
atggccgacacccccagagacgccggcctgaagcaggcccccgccagcagaaacgagaaggcccccgtggacttcggctacgtgggcatcgacagcatcctggagcagatgagaagaaaggccatgaagcagggcttcgagttcaacatcatggtggtgggccagagcggcctgggcaagagcaccctgatcaacaccctgttcaagagcaagatcagcagaaagagcgtgcagcccaccagcgaggagagaatccccaagaccatcgagatcaagagcatcacccacgacatcgaggagaagggcgtgagaatgaagctgaccgtgatcgacacccccggcttcggcgaccacatcaacaacgagaactgctggcagcccatcatgaagttcatcaacgaccagtacgagaagtacctgcaggaggaggtgaacatcaacagaaagaagagaatccccgacaccagagtgcactgctgcctgtacttcatccccgccaccggccacagcctgcccctgctggagcagaaggtgcccctgagccagcccagcgccgactgcctggccagatgcggcgacagactggagtag

SEQ ID NO: 98398 - DNA, 1740 bp, synthetic construct
  misc_feature 1..1740: note = Description of Artificial Sequence: Synthetic coding sequence
  source 1..1740: mol_type = other DNA
atgagcgaccccgccgtgaacgcccagctggacggcatcatcagcgacttcgaggccctgaagagaagcttcgaggtggaggaggtggagacccccaacagcaccccccccagaagagtgcagacccccctgctgagagccaccgtggccagcagcacccagaagttccaggacctgggcgtgaagaacagcgagcccagcgccagacacgtggacagcctgagccagagaagccccaaggccagcctgagaagagtggagctgagcggccccaaggccgccgagcccgtgagcagaagaaccgagctgagcatcgacatcagcagcaagcaggtggagaacgccggcgccatcggccccagcagattcggcctgaagagagccgaggtgctgggccacaagacccccgagcccgcccccagaagaaccgagatcaccatcgtgaagccccaggagagcgcccacagaagaatggagccccccgccagcaaggtgcccgaggtgcccaccgcccccgccaccgacgccgcccccaagagagtggagatccagatgcccaagcccgccgaggcccccaccgcccccagccccgcccagaccctggagaacagcgagcccgcccccgtgagccagctgcagagcagactggagcccaagccccagccccccgtggccgaggccacccccagaagccaggaggccaccgaggccgcccccagctgcgtgggcgacatggccgacacccccagagacgccggcctgaagcaggcccccgccagcagaaacgagaaggcccccgtggacttcggctacgtgggcatcgacagcatcctggagcagatgagaagaaaggccatgaagcagggcttcgagttcaacatcatggtggtgggccagagcggcctgggcaagagcaccctgatcaacaccctgttcaagagcaagatcagcagaaagagcgtgcagcccaccagcgaggagagaatccccaagaccatcgagatcaagagcatcacccacgacatcgaggagaagggcgtgagaatgaagctgaccgtgatcgacacccccggcttcggcgaccacatcaacaacgagaactgctggcagcccatcatgaagttcatcaacgaccagtacgagaagtacctgcaggaggaggtgaacatcaacagaaagaagagaatccccgacaccagagtgcactgctgcctgtacttcatccccgccaccggccacagcctgagacccctggacatcgagttcatgaagagactgagcaaggtggtgaacatcgtgcccgtgatcgccaaggccgacaccctgaccctggaggagagagtgcacttcaagcagagaatcaccgccgacctgctgagcaacggcatcgacgtgtacccccagaaggagttcgacgaggacagcgaggacagactggtgaacgagaagttcagagagatgatccccttcgccgtggtgggcagcgaccacgagtaccaggtgaacggcaagagaatcctgggcagaaagaccaagtggggcaccatcgaggtggagaacaccacccactgcgagttcgcctacctgagagacctgctgatcagaacccacatgcagaacatcaaggacatcaccagcagcatccacttcgaggcctacagagtgaagagactgaacgagggcagcagcgccatggccaacggcatggaggagaaggagcccgaggcccccgagatgtag

SEQ ID NO: 98399 - DNA, 1761 bp, synthetic construct
  misc_feature 1..1761: note = Description of Artificial Sequence: Synthetic coding sequence
  source 1..1761: mol_type = other DNA
atgaagaagagctacagcggcggcaccagaaccagcagcggcagactgagaagactgggcgacagcagcggccccgccctgaagagaagcttcgaggtggaggaggtggagacccccaacagcaccccccccagaagagtgcagacccccctgctgagagccaccgtggccagcagcacccagaagttccaggacctgggcgtgaagaacagcgagcccagcgccagacacgtggacagcctgagccagagaagccccaaggccagcctgagaagagtggagctgagcggccccaaggccgccgagcccgtgagcagaagaaccgagctgagcatcgacatcagcagcaagcaggtggagaacgccggcgccatcggccccagcagattcggcctgaagagagccgaggtgctgggccacaagacccccgagcccgcccccagaagaaccgagatcaccatcgtgaagccccaggagagcgcccacagaagaatggagccccccgccagcaaggtgcccgaggtgcccaccgcccccgccaccgacgccgcccccaagagagtggagatccagatgcccaagcccgccgaggcccccaccgcccccagccccgcccagaccctggagaacagcgagcccgcccccgtgagccagctgcagagcagactggagcccaagccccagccccccgtggccgaggccacccccagaagccaggaggccaccgaggccgcccccagctgcgtgggcgacatggccgacacccccagagacgccggcctgaagcaggcccccgccagcagaaacgagaaggcccccgtggacttcggctacgtgggcatcgacagcatcctggagcagatgagaagaaaggccatgaagcagggcttcgagttcaacatcatggtggtgggccagagcggcctgggcaagagcaccctgatcaacaccctgttcaagagcaagatcagcagaaagagcgtgcagcccaccagcgaggagagaatccccaagaccatcgagatcaagagcatcacccacgacatcgaggagaagggcgtgagaatgaagctgaccgtgatcgacacccccggcttcggcgaccacatcaacaacgagaactgctggcagcccatcatgaagttcatcaacgaccagtacgagaagtacctgcaggaggaggtgaacatcaacagaaagaagagaatccccgacaccagagtgcactgctgcctgtacttcatccccgccaccggccacagcctgagacccctggacatcgagttcatgaagagactgagcaaggtggtgaacatcgtgcccgtgatcgccaaggccgacaccctgaccctggaggagagagtgcacttcaagcagagaatcaccgccgacctgctgagcaacggcatcgacgtgtacccccagaaggagttcgacgaggacagcgaggacagactggtgaacgagaagttcagagagatgatccccttcgccgtggtgggcagcgaccacgagtaccaggtgaacggcaagagaatcctgggcagaaagaccaagtggggcaccatcgaggtggagaacaccacccactgcgagttcgcctacctgagagacctgctgatcagaacccacatgcagaacatcaaggacatcaccagcagcatccacttcgaggcctacagagtgaagagactgaacgagggcagcagcgccatggccaacggcatggaggagaaggagcccgaggcccccgagatgtag

SEQ ID NO: 98400 - DNA, 1425 bp, synthetic construct
  misc_feature 1..1425: note = Description of Artificial Sequence: Synthetic coding sequence
  source 1..1425: mol_type = other DNA
atgggcagcagcttctgggagggcctgcaggtggccgtgggcctgccccagggctgctggccccagggcctggacagcggcgagcccgccgagggcggccagctggaggccgcccccgtgtgcatcgtgaccagacagagcaaggagaccgccggccccaccctgggcagaggcggctggagacagggcagcctgagaagaggcaagggcaccagctgcagatgcagacagctgagccccggccacggccccggcagactgaccggctgcggcgagtgccacagactgccctgcagaggcctggtgagcggcttcaccggcctgagaggccaggaggaggacgacctggccttctgcctggccaccatcggcagcgacagacaggccaccgaggccgcccccagctgcgtgggcgacatggccgacacccccagagacgccggcctgaagcaggcccccgccagcagaaacgagaaggcccccgtggacttcggctacgtgggcatcgacagcatcctggagcagatgagaagaaaggccatgaagcagggcttcgagttcaacatcatggtggtgggccagagcggcctgggcaagagcaccctgatcaacaccctgttcaagagcaagatcagcagaaagagcgtgcagcccaccagcgaggagagaatccccaagaccatcgagatcaagagcatcacccacgacatcgaggagaagggcgtgagaatgaagctgaccgtgatcgacacccccggcttcggcgaccacatcaacaacgagaactgctggcagcccatcatgaagttcatcaacgaccagtacgagaagtacctgcaggaggaggtgaacatcaacagaaagaagagaatccccgacaccagagtgcactgctgcctgtacttcatccccgccaccggccacagcctgagacccctggacatcgagttcatgaagagactgagcaaggtggtgaacatcgtgcccgtgatcgccaaggccgacaccctgaccctggaggagagagtgcacttcaagcagagaatcaccgccgacctgctgagcaacggcatcgacgtgtacccccagaaggagttcgacgaggacagcgaggacagactggtgaacgagaagttcagagagatgatccccttcgccgtggtgggcagcgaccacgagtaccaggtgaacggcaagagaatcctgggcagaaagaccaagtggggcaccatcgaggtggagaacaccacccactgcgagttcgcctacctgagagacctgctgatcagaacccacatgcagaacatcaaggacatcaccagcagcatccacttcgaggcctacagagtgaagagactgaacgagggcagcagcgccatggccaacggcatggaggagaaggagcccgaggcccccgagatgtag

SEQ ID NO: 98401 - DNA, 1269 bp, synthetic construct
  misc_feature 1..1269: note = Description of Artificial Sequence: Synthetic coding sequence
  source 1..1269: mol_type = other DNA
atggagccccccgccagcaaggtgcccgaggtgcccaccgcccccgccaccgacgccgcccccaagagagtggagatccagatgcccaagcccgccgaggcccccaccgcccccagccccgcccagaccctggagaacagcgagcccgcccccgtgagccagctgcagagcagactggagcccaagccccagccccccgtggccgaggccacccccagaagccaggaggccaccgaggccgcccccagctgcgtgggcgacatggccgacacccccagagacgccggcctgaagcaggcccccgccagcagaaacgagaaggcccccgtggacttcggctacgtgggcatcgacagcatcctggagcagatgagaagaaaggccatgaagcagggcttcgagttcaacatcatggtggtgggccagagcggcctgggcaagagcaccctgatcaacaccctgttcaagagcaagatcagcagaaagagcgtgcagcccaccagcgaggagagaatccccaagaccatcgagatcaagagcatcacccacgacatcgaggagaagggcgtgagaatgaagctgaccgtgatcgacacccccggcttcggcgaccacatcaacaacgagaactgctggcagcccatcatgaagttcatcaacgaccagtacgagaagtacctgcaggaggaggtgaacatcaacagaaagaagagaatccccgacaccagagtgcactgctgcctgtacttcatccccgccaccggccacagcctgagacccctggacatcgagttcatgaagagactgagcaaggtggtgaacatcgtgcccgtgatcgccaaggccgacaccctgaccctggaggagagagtgcacttcaagcagagaatcaccgccgacctgctgagcaacggcatcgacgtgtacccccagaaggagttcgacgaggacagcgaggacagactggtgaacgagaagttcagagagatgatccccttcgccgtggtgggcagcgaccacgagtaccaggtgaacggcaagagaatcctgggcagaaagaccaagtggggcaccatcgaggtggagaacaccacccactgcgagttcgcctacctgagagacctgctgatcagaacccacatgcagaacatcaaggacatcaccagcagcatccacttcgaggcctacagagtgaagagactgaacgagggcagcagcgccatggccaacggcatggaggagaaggagcccgaggcccccgagatgtag

SEQ ID NO: 98402 - DNA, 1008 bp, synthetic construct
  misc_feature 1..1008: note = Description of Artificial Sequence: Synthetic coding sequence
  source 1..1008: mol_type = other DNA
atggccgacacccccagagacgccggcctgaagcaggcccccgccagcagaaacgagaaggcccccgtggacttcggctacgtgggcatcgacagcatcctggagcagatgagaagaaaggccatgaagcagggcttcgagttcaacatcatggtggtgggccagagcggcctgggcaagagcaccctgatcaacaccctgttcaagagcaagatcagcagaaagagcgtgcagcccaccagcgaggagagaatccccaagaccatcgagatcaagagcatcacccacgacatcgaggagaagggcgtgagaatgaagctgaccgtgatcgacacccccggcttcggcgaccacatcaacaacgagaactgctggcagcccatcatgaagttcatcaacgaccagtacgagaagtacctgcaggaggaggtgaacatcaacagaaagaagagaatccccgacaccagagtgcactgctgcctgtacttcatccccgccaccggccacagcctgagacccctggacatcgagttcatgaagagactgagcaaggtggtgaacatcgtgcccgtgatcgccaaggccgacaccctgaccctggaggagagagtgcacttcaagcagagaatcaccgccgacctgctgagcaacggcatcgacgtgtacccccagaaggagttcgacgaggacagcgaggacagactggtgaacgagaagttcagagagatgatccccttcgccgtggtgggcagcgaccacgagtaccaggtgaacggcaagagaatcctgggcagaaagaccaagtggggcaccatcgaggtggagaacaccacccactgcgagttcgcctacctgagagacctgctgatcagaacccacatgcagaacatcaaggacatcaccagcagcatccacttcgaggcctacagagtgaagagactgaacgagggcagcagcgccatggccaacggcatggaggagaaggagcccgaggcccccgagatgtag

SEQ ID NO: 98403 - DNA, 1269 bp, synthetic construct; identical to SEQ ID NO: 98401
  misc_feature 1..1269: note = Description of Artificial Sequence: Synthetic coding sequence
  source 1..1269: mol_type = other DNA

SEQ ID NO: 98404 - DNA, 1089 bp, synthetic construct
  misc_feature 1..1089: note = Description of Artificial Sequence: Synthetic coding sequence
  source 1..1089: mol_type = other DNA
atggccggcgccggctgcaccggcacctggagctggctgtggggcaccgccaccgaggccgcccccagctgcgtgggcgacatggccgacacccccagagacgccggcctgaagcaggcccccgccagcagaaacgagaaggcccccgtggacttcggctacgtgggcatcgacagcatcctggagcagatgagaagaaaggccatgaagcagggcttcgagttcaacatcatggtggtgggccagagcggcctgggcaagagcaccctgatcaacaccctgttcaagagcaagatcagcagaaagagcgtgcagcccaccagcgaggagagaatccccaagaccatcgagatcaagagcatcacccacgacatcgaggagaagggcgtgagaatgaagctgaccgtgatcgacacccccggcttcggcgaccacatcaacaacgagaactgctggcagcccatcatgaagttcatcaacgaccagtacgagaagtacctgcaggaggaggtgaacatcaacagaaagaagagaatccccgacaccagagtgcactgctgcctgtacttcatccccgccaccggccacagcctgagacccctggacatcgagttcatgaagagactgagcaaggtggtgaacatcgtgcccgtgatcgccaaggccgacaccctgaccctggaggagagagtgcacttcaagcagagaatcaccgccgacctgctgagcaacggcatcgacgtgtacccccagaaggagttcgacgaggacagcgaggacagactggtgaacgagaagttcagagagatgatccccttcgccgtggtgggcagcgaccacgagtaccaggtgaacggcaagagaatcctgggcagaaagaccaagtggggcaccatcgaggtggagaacaccacccactgcgagttcgcctacctgagagacctgctgatcagaacccacatgcagaacatcaaggacatcaccagcagcatccacttcgaggcctacagagtgaagagactgaacgagggcagcagcgccatggccaacggcatggaggagaaggagcccgaggcccccgagatgtag

SEQ ID NO: 98405 - DNA, 582 bp, synthetic construct
  misc_feature 1..582: note = Description of Artificial Sequence: Synthetic coding sequence
  source 1..582: mol_type = other DNA
atgaccctgtgcccccaggcctggctgcccgagggcagcgaggagcagctgagatgcgccgaccaccccagctgcggcgtgctgagcgccggcccctggggcggcggccaggccagccacctgcagagaagccccgtgggctgcaccctgcccagcatccccatcggccccgtgccctggagcgtgagcgagcccagaggcgagtgcagcccccccggcgcccccggcccccccgccagacacatggtgtggcccagcctgagcccctacccctgccccgcccccaagggcagaaagctgcagggccccctgccccccaccgcccagcccctgcaggccccctggcagctgcccctgctggagcagaaggtgcccctgagccagcccagcgccgactgctggcccgacgccggcaccggctggaacgagggcggcgtgttcatcagcctgcccagccccagccacgccacccccgcccccaccggcctgcaggtgctgctgatgagatgggacctgatcgaggacaagaaggagggcgagatgacccccacccccagcagccccagcttcgagaaggtgtag

SEQ ID NO: 98406 - DNA, 1071 bp, synthetic construct
  misc_feature 1..1071: note = Description of Artificial Sequence: Synthetic coding sequence
  source 1..1071: mol_type = other DNA
atggccatgagctacgtgaaggacgacatcttcagaatctacatcaaggagaagaaggagtgcagaagagaccacagacccccctgcgcccaggaggcccccagaaacatggtgcaccccaacgtgatctgcgacggctgcaacggccccgtggtgggcaccagatacaagtgcagcgtgtgccccgactacgacctgtgcagcgtgtgcgagggcaagggcctgcacagaggccacaccaagctggccttccccagccccttcggccacctgagcgagggcttcagccacagcagatggctgagaaaggtgaagcacggccacttcggctggcccggctgggagatgggcccccccggcaactggagccccagaccccccagagccggcgaggccagacccggccccaccgccgagagcgccagcggccccagcgaggaccccagcgtgaacttcctgaagaacgtgggcgagagcgtggccgccgccctgagccccctgggcatcgaggtggacatcgacgtggagcacggcggcaagagaagcagactgacccccgtgagccccgagagcagcagcaccgaggagaagagcagcagccagcccagcagctgctgcagcgaccccagcaagcccggcggcaacgtggagggcgccacccagagcctggccgagcagatgagaaagatcgccctggagagcgagggcagacccgaggagcagatggagagcgacaactgcagcggcggcgacgacgactggacccacctgagcagcaaggaggtggaccccagcaccggcgagctgcagagcctgcagatgcccgagagcgagggccccagcagcctggaccccagccaggagggccccaccggcctgaaggaggccgccctgtacccccacctgccccccgaggccgaccccagactgatcgagagcctgagccagatgctgagcatgggcttcagcgacgagggcggctggctgaccagactgctgcagaccaagaactacgacatcggcgccgccctggacaccatccagtacagcaagcaccccccccccctgtag

SEQ ID NO: 98407 - DNA, 1071 bp, synthetic construct; identical to SEQ ID NO: 98406
  misc_feature 1..1071: note = Description of Artificial Sequence: Synthetic coding sequence
  source 1..1071: mol_type = other DNA

SEQ ID NO: 98408 - DNA, 1323 bp, synthetic construct
  misc_feature 1..1323: note = Description of Artificial Sequence: Synthetic coding sequence
  source 1..1323: mol_type = other DNA
atggccagcctgaccgtgaaggcctacctgctgggcaaggaggacgccgccagagagatcagaagattcagcttctgctgcagccccgagcccgaggccgaggccgaggccgccgccggccccggcccctgcgagagactgctgagcagagtggccgccctgttccccgccctgagacccggcggcttccaggcccactacagagacgaggacggcgacctggtggccttcagcagcgacgaggagctgaccatggccatgagctacgtgaaggacgacatcttcagaatctacatcaaggagaagaaggagtgcagaagagaccacagacccccctgcgcccaggaggcccccagaaacatggtgcaccccaacgtgatctgcgacggctgcaacggccccgtggtgggcaccagatacaagtgcagcgtgtgccccgactacgacctgtgcagcgtgtgcgagggcaagggcctgcacagaggccacaccaagctggccttccccagccccttcggccacctgagcgagggcttcagccacagcagatggctgagaaaggtgaagcacggccacttcggctggcccggctgggagatgggcccccccggcaactggagccccagaccccccagagccggcgaggccagacccggccccaccgccgagagcgccagcggccccagcgaggaccccagcgtgaacttcctgaagaacgtgggcgagagcgtggccgccgccctgagccccctgggcatcgaggtggacatcgacgtggagcacggcggcaagagaagcagactgacccccgtgagccccgagagcagcagcaccgaggagaagagcagcagccagcccagcagctgctgcagcgaccccagcaagcccggcggcaacgtggagggcgccacccagagcctggccgagcagatgagaaagatcgccctggagagcgagggcagacccgaggagcagatggagagcgacaactgcagcggcggcgacgacgactggacccacctgagcagcaaggaggtggaccccagcaccggcgagctgcagagcctgcagatgcccgagagcgagggccccagcagcctggaccccagccaggagggccccaccggcctgaaggaggccgccctgtacccccacctgccccccgaggccgaccccagactgatcgagagcctgagccagatgctgagcatgggcttcagcgacgagggcggctggctgaccagactgctgcagaccaagaactacgacatcggcgccgccctggacaccatccagtacagcaagcaccccccccccctgtag

SEQ ID NO: 98409 - DNA, 1071 bp, synthetic construct; identical to SEQ ID NO: 98406
  misc_feature 1..1071: note = Description of Artificial Sequence: Synthetic coding sequence
  source 1..1071: mol_type = other DNA

SEQ ID NO: 98410 - DNA, 423 bp, synthetic construct
  misc_feature 1..423: note = Description of Artificial Sequence: Synthetic coding sequence
  source 1..423: mol_type = other DNA
atggccatgagctacgtgaaggacgacatcttcagaatctacatcaaggagaagaaggagtgcagaagagaccacagacccccctgcgcccaggaggcccccagaaacatggtgcaccccaacgtgatctgcgacggctgcaacggccccgtggtgggcaccagatacaagtgcagcgtgtgccccgactacgacctgtgcagcgtgtgcgagggcaagggcctgcacagaggccacaccaagctggccttccccagccccttcggccacctgagcgagggcttcagccacagcagatggctgagaaaggtgaagcacggccacttcggctggcccggctgggagatgggcccccccggcaactggagccccagaccccccagagccggcgaggccagacccggccccaccgccgagagctag

SEQ ID NO: 98411 - DNA, 891 bp, synthetic construct
  misc_feature 1..891: note = Description of Artificial Sequence: Synthetic coding sequence
  source 1..891: mol_type = other DNA
atgaccagcagcgagagcaccctgaagagaaagaagagcgccggcggcaccaccgcccacagagtgctgagaagaagacccttcggccacctgagcgagggcttcagccacagcagatggctgagaaaggtgaagcacggccacttcggctggcccggctgggagatgggcccccccggcaactggagccccagaccccccagagccggcgaggccagacccggccccaccgccgagagcgccagcggccccagcgaggaccccagcgtgaacttcctgaagaacgtgggcgagagcgtggccgccgccctgagccccctgggcatcgaggtggacatcgacgtggagcacggcggcaagagaagcagactgacccccgtgagccccgagagcagcagcaccgaggagaagagcagcagccagcccagcagctgctgcagcgaccccagcaagcccggcggcaacgtggagggcgccacccagagcctggccgagcagatgagaaagatcgccctggagagcgagggcagacccgaggagcagatggagagcgacaactgcagcggcggcgacgacgactggacccacctgagcagcaaggaggtggaccccagcaccggcgagctgcagagcctgcagatgcccgagagcgagggccccagcagcctggaccccagccaggagggccccaccggcctgaaggaggccgccctgtacccccacctgccccccgaggccgaccccagactgatcgagagcctgagccagatgctgagcatgggcttcagcgacgagggcggctggctgaccagactgctgcagaccaagaactacgacatcggcgccgccctggacaccatccagtacagcaagcaccccccccccctgtag

SEQ ID NO: 98412 - DNA, 504 bp, synthetic construct
  misc_feature 1..504: note = Description of Artificial Sequence: Synthetic coding sequence
  source 1..504: mol_type = other DNA
atggccatgagctacgtgaaggacgacatcttcagaatctacatcaaggagaagaaggagtgcagaagagaccacagacccccctgcgcccaggaggcccccagaaacatggtgcaccccaacgtgatctgcgacggctgcaacggccccgtggtgggcaccagatacaagtgcagcgtgtgccccgactacgacctgtgcagcgtgtgcgagggcaagggcctgcacagaggccacaccaagctggccttccccagccccttcggccacctgagcgagggcttcagccacagcagatggctgagaaaggtgaagcacggccacttcggctggcccggctgggagatgggcccccccggcaactggagccccagaccccccagagccggcgaggccagacccggccccaccgccgagagcgccagcggccccagcgaggaccccagcgtgaacttcctgaagaacgtgggcgagagcgtggccgccgccctgagccccctgtag

SEQ ID NO: 98413 - DNA, 477 bp, synthetic construct
  misc_feature 1..477: note = Description of Artificial Sequence: Synthetic coding sequence
  source 1..477: mol_type = other DNA
atgatgcagaagctgctgaagtgcagcagactggtgctggccctggccctgatcctggtgctggagagcagcgtgcagggctaccccaccagaagagccagataccagtgggtgagatgcaaccccgacagcaacagcgccaactgcctggaggagaagggccccatgttcgagctgctgcccggcgagagcaacaagatccccagactgagaaccgacctgttccccaagaccagaatccaggacctgaacagaatcttccccctgagcgaggactacagcggcagcggcttcggcagcggcagcggcagcggcagcggcagcggcagcggcttcctgaccgagatggagcaggactaccagctggtggacgagagcgacgccttccacgacaacctgagaagcctggacagaaacctgcccagcgacagccaggacctgggccagcacggcctggaggaggacttcatgctgtag

SEQ ID NO: 98414 - DNA, 987 bp, synthetic construct
  misc_feature 1..987: note = Description of Artificial Sequence: Synthetic coding sequence
  source 1..987: mol_type = other DNA
atgatgagcggcgagcccctgcacgtgaagacccccatcagagacagcatggccctgagcaagatggccggcaccagcgtgtacctgaagatggacagcgcccagcccagcggcagcttcaagatcagaggcatcggccacttctgcaagagatgggccaagcagggctgcgcccacttcgtgtgcagcagcgccggcaacgccggcatggccgccgcctacgccgccagacagctgggcgtgcccgccaccatcgtggtgcccagcaccacccccgccctgaccatcgagagactgaagaacgagggcgccaccgtgaaggtggtgggcgagctgctggacgaggccttcgagctggccaaggccctggccaagaacaaccccggctgggtgtacatcccccccttcgacgaccccctgatctgggagggccacgccagcatcgtgaaggagctgaaggagaccctgtgggagaagcccggcgccatcgccctgagcgtgggcggcggcggcctgctgtgcggcgtggtgcagggcctgcaggaggtgggctggggcgacgtgcccgtgatcgccatggagaccttcggcgcccacagcttccacgccgccaccaccgccggcaagctggtgagcctgcccaagatcaccagcgtggccaaggccctgggcgtgaagaccgtgggcgcccaggccctgaagctgttccaggagcaccccatcttcagcgaggtgatcagcgaccaggaggccgtggccgccatcgagaagttcgtggacgacgagaagatcctggtggagcccgcctgcggcgccgccctggccgccgtgtacagccacgtgatccagaagctgcagctggagggcaacctgagaacccccctgcccagcctggtggtgatcgtgtgcggcggcagcaacatcagcctggcccagctgagagccctgaaggagcagctgggcatgaccaacagactgcccaagtag

SEQ ID NO: 98415 - DNA, 657 bp, synthetic construct
  misc_feature 1..657: note = Description of Artificial Sequence: Synthetic coding sequence
  source 1..657: mol_type = other DNA
atgatgagcggcgagcccctgcacgtgaagacccccatcagagacagcatggccctgagcaagatggccggcaccagcgtgtacctgaagatggacagcgcccagcccagcggcagcttcaagatcagaggcatcggccacttctgcaagagatgggccaagcagggctgcgcccacttcgtgtgcagcagcgccggcaacgccggcatggccgccgcctacgccgccagacagctgggcgtgcccgccaccatcgtggtgcccagcaccacccccgccctgaccatcgagagactgaagaacgagggcgccaccgtgaaggtggtgggcgagctgctggacgaggccttcgagctggccaaggccctggccaagaacaaccccggctgggtgtacatcccccccttcgacgaccccctgatctgggagggccacgccagcatcgtgaaggagctgaaggagaccctgtgggagaagcccggcgccatcgccctgagcgtgggcggcggcggcctgctgtgcggcgtggtgcagggcctgcaggaggtgggctggggcgacgtgcccgtgatcgccatggagaccttcggcgcccacagcttccacgccgccaccaccgccggcaagctggtgagcctgcccaagatcaccagatag

SEQ ID NO: 98416 - DNA, 1452 bp, synthetic construct
  misc_feature 1..1452: note = Description of Artificial Sequence: Synthetic coding sequence
  source 1..1452: mol_type = other DNA
atgaccatgcccgtgaacggcgcccacaaggacgccgacctgtggagcagccacgacaagatgctggcccagcccctgaaggacagcgacgtggaggtgtacaacatcatcaagaaggagagcaacagacagagagtgggcctggagctgatcgccagcgagaacttcgccagcagagccgtgctggaggccctgggcagctgcctgaacaacaagtacagcgagggctaccccggccagagatactacggcggcaccgagttcatcgacgagctggagaccctgtgccagaagagagccctgcaggcctacaagctggacccccagtgctggggcgtgaacgtgcagccctacagcggcagccccgccaacttcgccgtgtacaccgccctggtggagccccacggcagaatcatgggcctggacctgcccgacggcggccacctgacccacggcttcatgaccgacaagaagaagatcagcgccaccagcatcttcttcgagagcatgccctacaaggtgaaccccgacaccggctacatcaactacgaccagctggaggagaacgccagactgttccaccccaagctgatcatcgccggcaccagctgctacagcagaaacctggagtacgccagactgagaaagatcgccgacgagaacggcgcctacctgatggccgacatggcccacatcagcggcctggtggccgccggcgtggtgcccagccccttcgagcactgccacgtggtgaccaccaccacccacaagaccctgagaggctgcagagccggcatgatcttctacagaaagggcgtgaagagcgtggaccccaagaccggcaaggagatcctgtacaacctggagagcctgatcaacagcgccgtgttccccggcctgcagggcggcccccacaaccacgccatcgccggcgtggccgtggccctgaagcaggccatgaccctggagttcaaggtgtaccagcaccaggtggtggccaactgcagagccctgagcgaggccctgaccgagctgggctacaagatcgtgaccggcggcagcgacaaccacctgatcctggtggacctgagaagcaagggcaccgacggcggcagagccgagaaggtgctggaggcctgcagcatcgcctgcaacaagaacacctgccccggcgacagaagcgccctgagacccagcggcctgagactgggcacccccgccctgaccagcagaggcctgctggagaaggacttccagaaggtggcccacttcatccacagaggcatcgagctgaccctgcagatccagagcgacaccggcgtgagagccaccctgaaggagttcaaggagagactggccggcgacaagtaccaggccgccgtgcaggccctgagagaggaggtggagagcttcgccagcctgttccccctgcccggcctgcccgacttctag

SEQ ID NO: 98417 - DNA, 378 bp, synthetic construct
  misc_feature 1..378: note = Description of Artificial Sequence: Synthetic coding sequence
  source 1..378: mol_type = other DNA
atgagatacctgctgcaggtggcccagctggtgtggctgaccgtggacagcagaggcatcggcggcaccctggaccacgccggcttcagcatctgcatcttcaccgtgccccccctgagcttcttcggcctgtgcgaggcccagaccttcggcctgagcggcagcaagagccccgccctgcacagatactacggcggcaccgagttcatcgacgagctggagaccctgtgccagaagagagccctgcaggcctacaagctggacccccagtgctggggcgtgaacgtgcccacccaggtgctggtgagcagcatctggcccggcgccgccagcagctgcgccagccccagagccgacatgcaccaggaggagagctag

SEQ ID NO: 98418 - DNA, 1212 bp, synthetic construct
  misc_feature 1..1212: note = Description of Artificial Sequence: Synthetic coding sequence
  source 1..1212: mol_type = other DNA
atgaccatgcccgtgaacggcgcccacaaggacgccgacctgtggagcagccacgacaagatgctggcccagcccctgaaggacagcgacgtggaggtgtacaacatcatcaagaaggagagcaacagacagagagtgggcctggagctgatcgccagcgagaacttcgccagcagagccgtgctggaggccctgggcagctgcctgaacaacaagtacagcgagggctaccccggccagagatactacggcggcaccgagttcatcgacgagctggagaccctgtgccagaagagagccctgcaggcctacaagctggacccccagtgctggggcgtgaacgtgcagccctacagcggcagccccgccaacttcgccgtgtacaccgccctggtggagccccacggcagaatcatgggcctggacctgcccgacggcggccacctgacccacggcttcatgaccgacaagaagaagatcagcgccaccagcatcttcttcgagagcatgccctacaaggtgaaccccgacaccggctacatcaactacgaccagctggaggagaacgccagactgttccaccccaagctgatcatcgccggcaccagctgctacagcagaaacctggagtacgccagactgagaaagatcgccgacgagaacggcgcctacctgatggccgacatggcccacatcagcggcctggtggccgccggcgtggtgcccagccccttcgagcactgccacgtggtgaccaccaccacccacaagaccctgagaggctgcagagccggcatgatcttctacagaaagggcggcagcgacaaccacctgatcctggtggacctgagaagcaagggcaccgacggcggcagagccgagaaggtgctggaggcctgcagcatcgcctgcaacaagaacacctgccccggcgacagaagcgccctgagacccagcggcctgagactgggcacccccgccctgaccagcagaggcctgctggagaaggacttccagaaggtggcccacttcatccacagaggcatcgagctgaccctgcagatccagagcgacaccggcgtgagagccaccctgaaggagttcaaggagagactggccggcgacaagtaccaggccgccgtgcaggccctgagagaggaggtggagagcttcgccagcctgttccccctgcccggcctgcccgacttctag

SEQ ID NO: 98419 - DNA, 1335 bp, synthetic construct
  misc_feature 1..1335: note = Description of Artificial Sequence: Synthetic coding sequence
  source 1..1335: mol_type = other DNA
atgaccatgcccgtgaacggcgcccacaaggacgccgacctgtggagcagccacgacaagatgctggcccagcccctgaaggacagcgacgtggaggtgtacaacatcatcaagaaggagagcaacagacagagagtgggcctggagctgatcgccagcgagaacttcgccagcagagccgtgctggaggccctgggcagctgcctgaacaacaagtacagcgagggctaccccggccagagatactacggcggcaccgagttcatcgacgagctggagaccctgtgccagaagagagccctgcaggcctacaagctggacccccagtgctggggcgtgaacgtgcagccctacagcggcagccccgccaacttcgccgtgtacaccgccctggtggagccccacggcagaatcatgggcctggacctgcccgacggcggccacctgacccacggcttcatgaccgacaagaagaagatcagcgccaccagcatcttcttcgagagcatgccctacaaggtgaaccccgacaccggctacatcaactacgaccagctggaggagaacgccagactgttccaccccaagctgatcatcgccggcaccagctgctacagcagaaacctggagtacgccagactgagaaagatcgccgacgagaacggcgcctacctgatggccgacatggcccacatcagcggcctggtggccgccggcgtggtgcccagccccttcgagcactgccacgtggtgaccaccaccacccacaagaccctgagaggctgcagagccggcatgatcttctacagaaagggcgtggccgtggccctgaagcaggccatgaccctggagttcaaggtgtaccagcaccaggtggtggccaactgcagagccctgagcgaggccctgaccgagctgggctacaagatcgtgaccggcggcagcgacaaccacctgatcctggtggacctgagaagcaagggcaccgacggcggcagagccgagaaggtgctggaggcctgcagcatcgcctgcaacaagaacacctgccccggcgacagaagcgccctgagacccagcggcctgagactgggcacccccgccctgaccagcagaggcctgctggagaaggacttccagaaggtggcccacttcatccacagaggcatcgagctgaccctgcagatccagagcgacaccggcgtgagagccaccctgaaggagttcaaggagagactggccggcgacaagtaccaggccgccgtgcaggccctgagagaggaggtggagagcttcgccagcctgttccccctgcccggcctgcccgacttctag

SEQ ID NO: 98420 - DNA, 285 bp, synthetic construct
  misc_feature 1..285: note = Description of Artificial Sequence: Synthetic coding sequence
  source 1..285: mol_type = other DNA
atgaccatgcccgtgaacggcgcccacaaggacgccgacctgtggagcagccacgacaagatgctggcccagcccctgaaggacagcgacgtggaggtgtacaacatcatcaagaaggagagcaacagacagagagtgggcctggagctgatcgccagcgagaacttcgccagcagagccgtgctggaggccctgggcagctgcctgaacaacaagtacagcgagggctaccccggccagagatacgtgaacatcttcaagggcctggtgctgacccagagctag

SEQ ID NO: 98421 - DNA, 777 bp, synthetic construct
  misc_feature 1..777: note = Description of Artificial Sequence: Synthetic coding sequence
  source 1..777: mol_type = other DNA
atggccgacatggcccacatcagcggcctggtggccgccggcgtggtgcccagccccttcgagcactgccacgtggtgaccaccaccacccacaagaccctgagaggctgcagagccggcatgatcttctacagaaagggcgtgaagagcgtggaccccaagaccggcaaggagatcctgtacaacctggagagcctgatcaacagcgccgtgttccccggcctgcagggcggcccccacaaccacgccatcgccggcgtggccgtggccctgaagcaggccatgaccctggagttcaaggtgtaccagcaccaggtggtggccaactgcagagccctgagcgaggccctgaccgagctgggctacaagatcgtgaccggcggcagcgacaaccacctgatcctggtggacctgagaagcaagggcaccgacggcggcagagccgagaaggtgctggaggcctgcagcatcgcctgcaacaagaacacctgccccggcgacagaagcgccctgagacccagcggcctgagactgggcacccccgccctgaccagcagaggcctgctggagaaggacttccagaaggtggcccacttcatccacagaggcatcgagctgaccctgcagatccagagcgacaccggcgtgagagccaccctgaaggagttcaaggagagactggccggcgacaagtaccaggccgccgtgcaggccctgagagaggaggtggagagcttcgccagcctgttccccctgcccggcctgcccgacttctag

SEQ ID NO: 98422 - DNA, 1341 bp, synthetic construct
  misc_feature 1..1341: note = Description of Artificial Sequence: Synthetic coding sequence
  source 1..1341: mol_type = other DNA
atgaccatgcccgtgaacggcgcccacaaggacgccgacctgtggagcagccacgacaagatgctggcccagcccctgaaggacagcgacgtggaggtgtacaacatcatcaagaaggagagcaacagacagagagtgggcctggagctgatcgccagcgagaacttcgccagcagagccgtgctggaggccctgggcagctgcctgaacaacaagtacagcgagggctaccccggccagagatactacggcggcaccgagttcatcgacgagctggagaccctgtgccagaagagagccctgcaggcctacaagctggacccccagtgctggggcgtgaacgtgcagccctacagcggcagccccgccaacttcgccgtgtacaccgccctggtggagccccacggcagaatcatgggcctggacctgcccgacggcggccacctgacccacggcttcatgaccgacaagaagaagatcagcgccaccagcatcttcttcgagagcatgccctacaaggtgaaccccgacaccggctacatcaactacgaccagctggaggagaacgccagactgttccaccccaagctgatcatcgccggcaccagctgctacagcagaaacctggagtacgccagactgagaaagatcgccgacgagaacggcgcctacctgatggccgacatggcccacatcagcggcctggtggccgccggcgtggtgcccagccccttcgagcactgccacgtggtgaccaccaccacccacaagaccctgagaggctgcagagccggcatgatcttctacagaaagggcgtgaagagcgtggaccccaagaccggcaaggagatcctgtacaacctggagagcctgatcaacagcgccgtgttccccggcctgcagggcggcccccacaaccacgccatcgccggcgtggccgtggccctgaagcaggccatgaccctggagttcaaggtgtaccagcaccaggtggtggccaactgcagagccctgagcgaggccctgaccgagctgggctacaagatcgtgaccggcggcagcgacaaccacctgatcctggtggacctgagaagcaagggcaccgacggcggcagagccgagaaggtgctggaggcctgcagcatcgcctgcaacaagaacacctgccccggcatcgagctgaccctgcagatccagagcgacaccggcgtgagagccaccctgaaggagttcaaggagagactggccggcgacaagtaccaggccgccgtgcaggccctgagagaggaggtggagagcttcgccagcctgttccccctgcccggcctgcccgacttctag

SEQ ID NO: 98423 - DNA, 1038 bp, synthetic construct
  misc_feature 1..1038: note = Description of Artificial Sequence: Synthetic coding sequence
  source 1..1038: mol_type = other DNA
atgggcctggacctgcccgacggcggccacctgacccacggcttcatgaccgacaagaagaagatcagcgccaccagcatcttcttcgagagcatgccctacaaggtgaaccccgacaccggctacatcaactacgaccagctggaggagaacgccagactgttccaccccaagctgatcatcgccggcaccagctgctacagcagaaacctggagtacgccagactgagaaagatcgccgacgagaacggcgcctacctgatggccgacatggcccacatcagcggcctggtggccgccggcgtggtgcccagccccttcgagcactgccacgtggtgaccaccaccacccacaagaccctgagaggctgcagagccggcatgatcttctacagaaagggcgtgaagagcgtggaccccaagaccggcaaggagatcctgtacaacctggagagcctgatcaacagcgccgtgttccccggcctgcagggcggcccccacaaccacgccatcgccggcgtggccgtggccctgaagcaggccatgaccctggagttcaaggtgtaccagcaccaggtggtggccaactgcagagccctgagcgaggccctgaccgagctgggctacaagatcgtgaccggcggcagcgacaaccacctgatcctggtggacctgagaagcaagggcaccgacggcggcagagccgagaaggtgctggaggcctgcagcatcgcctgcaacaagaacacctgccccggcgacagaagcgccctgagacccagcggcctgagactgggcacccccgccctgaccagcagaggcctgctggagaaggacttccagaaggtggcccacttcatccacagaggcatcgagctgaccctgcagatccagagcgacaccggcgtgagagccaccctgaaggagttcaaggagagactggccggcgacaagtaccaggccgccgtgcaggccctgagagaggaggtggagagcttcgccagcctgttccccctgcccggcctgcccgacttctag

SEQ ID NO: 98424 - DNA, 1515 bp, synthetic construct
  misc_feature 1..1515: note = Description of Artificial Sequence: Synthetic coding sequence
  source 1..1515: mol_type = other DNA
atgctgtacttcagcctgttctgggccgccagacccctgcagagatgcggccagctggtgagaatggccatcagagcccagcacagcaacgccgcccagacccagaccggcgaggccaacagaggctggaccggccaggagagcctgagcgacagcgaccccgagatgtgggagctgctgcagagagagaaggacagacagtgcagaggcctggagctgatcgccagcgagaacttctgcagcagagccgccctggaggccctgggcagctgcctgaacaacaagtacagcgagggctaccccggcaagagatactacggcggcgccgaggtggtggacgagatcgagctgctgtgccagagaagagccctggaggccttcgacctggaccccgcccagtggggcgtgaacgtgcagccctacagcggcagccccgccaacctggccgtgtacaccgccctgctgcagccccacgacagaatcatgggcctggacctgcccgacggcggccacctgacccacggctacatgagcgacgtgaagagaatcagcgccaccagcatcttcttcgagagcatgccctacaagctgaaccccaagaccggcctgatcgactacaaccagctggccctgaccgccagactgttcagacccagactgatcatcgccggcaccagcgcctacgccagactgatcgactacgccagaatgagagaggtgtgcgacgaggtgaaggcccacctgctggccgacatggcccacatcagcggcctggtggccgccaaggtgatccccagccccttcaagcacgccgacatcgtgaccaccaccacccacaagaccctgagaggcgccagaagcggcctgatcttctacagaaagggcgtgaaggccgtggaccccaagaccggcagagagatcccctacaccttcgaggacagaatcaacttcgccgtgttccccagcctgcagggcggcccccacaaccacgccatcgccgccgtggccgtggccctgaagcaggcctgcacccccatgttcagagagtacagcctgcaggtgctgaagaacgccagagccatggccgacgccctgctggagagaggctacagcctggtgagcggcggcaccgacaaccacctggtgctggtggacctgagacccaagggcctggacggcgccagagccgagagagtgctggagctggtgagcatcaccgccaacaagaacacctgccccggcgacagaagcgccatcacccccggcggcctgagactgggcgcccccgccctgaccagcagacagttcagagaggacgacttcagaagagtggtggacttcatcgacgagggcgtgaacatcggcctggaggtgaagagcaagaccgccaagctgcaggacttcaagagcttcctgctgaaggacagcgagaccagccagagactggccaacctgagacagagagtggagcagttcgccagagccttccccatgcccggcttcgacgagcactag

SEQ ID NO: 98425 - DNA, 1227 bp, synthetic construct
  misc_feature 1..1227: note = Description of Artificial Sequence: Synthetic coding sequence
  source 1..1227: mol_type = other DNA
atgggcgagcagagatggtggatgaagctgagctgctgcgccagcgccggcccctggaagcccctgacctggatcctgcacagcggcgagagcatgagcagccccacccccggcccccagcccacctggcccagcacccagcccttctgcaacctgaccaccggcagctggggctggacctgccccatgggcgccatcagccccaccgccacctgcctgaccagcagcggctaccagcccagacccagcagcagcagcctgtgccccatcagcagcaccgccctggccgtgtgcgtgagcgtgcagcccaagaccggcctgatcgactacaaccagctggccctgaccgccagactgttcagacccagactgatcatcgccggcaccagcgcctacgccagactgatcgactacgccagaatgagagaggtgtgcgacgaggtgaaggcccacctgctggccgacatggcccacatcagcggcctggtggccgccaaggtgatccccagccccttcaagcacgccgacatcgtgaccaccaccacccacaagaccctgagaggcgccagaagcggcctgatcttctacagaaagggcgtgaaggccgtggaccccaagaccggcagagagatcccctacaccttcgaggacagaatcaacttcgccgtgttccccagcctgcagggcggcccccacaaccacgccatcgccgccgtggccgtggccctgaagcaggcctgcacccccatgttcagagagtacagcctgcaggtgctgaagaacgccagagccatggccgacgccctgctggagagaggctacagcctggtgagcggcggcaccgacaaccacctggtgctggtggacctgagacccaagggcctggacggcgccagagccgagagagtgctggagctggtgagcatcaccgccaacaagaacacctgccccggcgacagaagcgccatcacccccggcggcctgagactgggcgcccccgccctgaccagcagacagttcagagaggacgacttcagaagagtggtggacttcatcgacgagggcgtgaacatcggcctggaggtgaagagcaagaccgccaagctgcaggacttcaagagcttcctgctgaaggacagcgagaccagccagagactggccaacctgagacagagagtggagcagttcgccagagccttccccatgcccggcttcgacgagcactag

SEQ ID NO: 98426 - DNA, 1452 bp, synthetic construct
  misc_feature 1..1452: note = Description of Artificial Sequence: Synthetic coding sequence
  source 1..1452: mol_type = other DNA
atggccatcagagcccagcacagcaacgccgcccagacccagaccggcgaggccaacagaggctggaccggccaggagagcctgagcgacagcgaccccgagatgtgggagctgctgcagagagagaaggacagacagtgcagaggcctggagctgatcgccagcgagaacttctgcagcagagccgccctggaggccctgggcagctgcctgaacaacaagtacagcgagggctaccccggcaagagatactacggcggcgccgaggtggtggacgagatcgagctgctgtgccagagaagagccctggaggccttcgacctggaccccgcccagtggggcgtgaacgtgcagccctacagcggcagccccgccaacctggccgtgtacaccgccctgctgcagccccacgacagaatcatgggcctggacctgcccgacggcggccacctgacccacggctacatgagcgacgtgaagagaatcagcgccaccagcatcttcttcgagagcatgccctacaagctgaaccccaagaccggcctgatcgactacaaccagctggccctgaccgccagactgttcagacccagactgatcatcgccggcaccagcgcctacgccagactgatcgactacgccagaatgagagaggtgtgcgacgaggtgaaggcccacctgctggccgacatggcccacatcagcggcctggtggccgccaaggtgatccccagccccttcaagcacgccgacatcgtgaccaccaccacccacaagaccctgagaggcgccagaagcggcctgatcttctacagaaagggcgtgaaggccgtggaccccaagaccggcagagagatcccctacaccttcgaggacagaatcaacttcgccgtgttccccagcctgcagggcggcccccacaaccacgccatcgccgccgtggccgtggccctgaagcaggcctgcacccccatgttcagagagtacagcctgcaggtgctgaagaacgccagagccatggccgacgccctgctggagagaggctacagcctggtgagcggcggcaccgacaaccacctggtgctggtggacctgagacccaagggcctggacggcgccagagccgagagagtgctggagctggtgagcatcaccgccaacaagaacacctgccccggcgacagaagcgccatcacccccggcggcctgagactgggcgcccccgccctgaccagcagacagttcagagaggacgacttcagaagagtggtggacttcatcgacgagggcgtgaacatcggcctggaggtgaagagcaagaccgccaagctgcaggacttcaagagcttcctgctgaaggacagcgagaccagccagagactggccaacctgagacagagagtggagcagttcgccagagccttccccatgcccggcttcgacgagcactag

SEQ ID NO: 98427 - DNA, 1452 bp, synthetic construct; identical to SEQ ID NO: 98426
  misc_feature 1..1452: note = Description of Artificial Sequence: Synthetic coding sequence
  source 1..1452: mol_type = other DNA

SEQ ID NO: 98428 - DNA, 1452 bp, synthetic construct; identical to SEQ ID NO: 98426
  misc_feature 1..1452: note = Description of Artificial Sequence: Synthetic coding sequence
  source 1..1452: mol_type = other DNA

SEQ ID NO: 98429 - DNA, 1485 bp, synthetic construct
  misc_feature 1..1485: note = Description of Artificial Sequence: Synthetic coding sequence
  source 1..1485: mol_type = other DNA
atgctgtacttcagcctgttctgggccgccagacccctgcagagatgcggccagctggtgagaatggccatcagagcccagcacagcaacgccgcccagacccagaccggcgaggccaacagaggctggaccggccaggagagcctgagcgacagcgaccccgagatgtgggagctgctgcagagagagaaggacagacagtgcagaggcctggagctgatcgccagcgagaacttctgcagcagagccgccctggaggccctgggcagctgcctgaacaacaagtacagcgagggctaccccggcaagagatactacggcggcgccgaggtggtggacgagatcgagctgctgtgccagagaagagccctggaggccttcgacctggaccccgcccagtggggcgtgaacgtgcagccctacagcggcagccccgccaacctggccgtgtacaccgccctgctgcagccccacgacagaatcatgggcctggacctgcccgacggcggccacctgacccacggctacatgagcgacgtgaagagaatcagcgccaccagcatcttcttcgagagcatgccctacaagctgaacctggccctgaccgccagactgttcagacccagactgatcatcgccggcaccagcgcctacgccagactgatcgactacgccagaatgagagaggtgtgcgacgaggtgaaggcccacctgctggccgacatggcccacatcagcggcctggtggccgccaaggtgatccccagccccttcaagcacgccgacatcgtgaccaccaccacccacaagaccctgagaggcgccagaagcggcctgatcttctacagaaagggcgtgaaggccgtggaccccaagaccggcagagagatcccctacaccttcgaggacagaatcaacttcgccgtgttccccagcctgcagggcggcccccacaaccacgccatcgccgccgtggccgtggccctgaagcaggcctgcacccccatgttcagagagtacagcctgcaggtgctgaagaacgccagagccatggccgacgccctgctggagagaggctacagcctggtgagcggcggcaccgacaaccacctggtgctggtggacctgagacccaagggcctggacggcgccagagccgagagagtgctggagctggtgagcatcaccgccaacaagaacacctgccccggcgacagaagcgccatcacccccggcggcctgagactgggcgcccccgccctgaccagcagacagttcagagaggacgacttcagaagagtggtggacttcatcgacgagggcgtgaacatcggcctggaggtgaagagcaagaccgccaagctgcaggacttcaagagcttcctgctgaaggacagcgagaccagccagagactggccaacctgagacagagagtggagcagttcgccagagccttccccatgcccggcttcgacgagcactag

SEQ ID NO: 98430 - DNA, 1422 bp, synthetic construct
  misc_feature 1..1422: note = Description of Artificial Sequence: Synthetic coding sequence
  source 1..1422: mol_type = other DNA
atgggcgccgtgctgggcgtgttcagcctggccagctgggtgccctgcctgtgcagcggcgccagctgcctgctgtgcagctgctgccccaacagcaagaacagcaccgtgaccagactgatctacgccttcatcctgctgctgagcaccgtggtgagctacatcatgcagagaaaggagatggagacctacctgaagaagatccccggcttctgcgagggcggcttcaagatccacgaggccgacatcaacgccgacaaggactgcgacgtgctggtgggctacaaggccgtgtacagaatcagcttcgccatggccatcttcttcttcgtgttcagcctgctgatgttcaaggtgaagaccagcaaggacctgagagccgccgtgcacaacggcttctggttcttcaagatcgccgccctgatcggcatcatggtgggcagcttctacatccccggcggctacttcagcagcgtgtggttcgtggtgggcatgatcggcgccgccctgttcatcctgatccagctggtgctgctggtggacttcgcccacagctggaacgagagctgggtgaacagaatggaggagggcaaccccagactgtggtacgccgccctgctgagcttcaccagcgccttctacatcctgagcatcatctgcgtgggcctgctgtacacctactacaccaagcccgacggctgcaccgagaacaagttcttcatcagcatcaacctgatcctgtgcgtggtggccagcatcatcagcatccaccccaagatccaggagcaccagcccagaagcggcctgctgcagagcagcctgatcaccctgtacaccatgtacctgacctggagcgccatgagcaacgagcccgacagaagctgcaaccccaacctgatgagcttcatcaccagaatcaccgcccccaccctggcccccggcaacagcaccgccgtggtgcccacccccaccccccccagcaagagcggcagcctgctggacagcgacaacttcatcggcctgttcgtgttcgtgctgtgcctgctgtacagcagcatcagaaccagcaccaacagccaggtggacaagctgaccctgagcggcagcgacagcgtgatcctgggcgacaccaccaccagcggcgccagcgacgaggaggacggccagcccagaagagccgtggacaacgagaaggagggcgtgcagtacagctacagcctgttccacctgatgctgtgcctggccagcctgtacatcatgatgaccctgaccagctggtacagccccgacgccaagttccagagcatgaccagcaagtggcccgccgtgtgggtgaagatcagcagcagctgggtgtgcctgctgctgtacgtgtggaccctggtggcccccctggtgctgaccagcagagacttcagctag

SEQ ID NO: 98431 - DNA, 1422 bp, synthetic construct; identical to SEQ ID NO: 98430
  misc_feature 1..1422: note = Description of Artificial Sequence: Synthetic coding sequence
  source 1..1422: mol_type = other DNA

SEQ ID NO: 98432 - DNA, 639 bp, synthetic construct
  misc_feature 1..639: note = Description of Artificial Sequence: Synthetic coding sequence
  source 1..639: mol_type = other DNA
gagcaccagcccagaagcggcctgctgcagagcagcctgatcaccctgtacaccatgtacctgacctggagcgccatgagcaacgagcccgacagaagctgcaaccccaacctgatgagcttcatcaccagaatcaccgcccccaccctggcccccggcaacagcaccgccgtggtgcccacccccaccccccccagcaagagcggcagcctgctggacagcgacaacttcatcggcctgttcgtgttcgtgctgtgcctgctgtacagcagcatcagaaccagcaccaacagccaggtggacaagctgaccctgagcggcagcgacagcgtgatcctgggcgacaccaccaccagcggcgccagcgacgaggaggacggccagcccagaagagccgtggacaacgagaaggagggcgtgcagtacagctacagcctgttccacctgatgctgtgcctggccagcctgtacatcatgatgaccctgaccagctggtacagccccgacgccaagttccagagcatgaccagcaagtggcccgccgtgtgggtgaagatcagcagcagctgggtgtgcctgctgctgtacgtgtggaccctggtggcccccctggtgctgaccagcagagacttcagctag

SEQ ID NO: 98433 - DNA, 1323 bp, synthetic construct
  misc_feature 1..1323: note = Description of Artificial Sequence: Synthetic coding sequence
  source 1..1323: mol_type = other DNA
atgcccctgcagagatgcctgatctacgccttcatcctgctgctgagcaccgtggtgagctacatcatgcagagaaaggagatggagacctacctgaagaagatccccggcttctgcgagggcggcttcaagatccacgaggccgacatcaacgccgacaaggactgcgacgtgctggtgggctacaaggccgtgtacagaatcagcttcgccatggccatcttcttcttcgtgttcagcctgctgatgttcaaggtgaagaccagcaaggacctgagagccgccgtgcacaacggcttctggttcttcaagatcgccgccctgatcggcatcatggtgggcagcttctacatccccggcggctacttcagcagcgtgtggttcgtggtgggcatgatcggcgccgccctgttcatcctgatccagctggtgctgctggtggacttcgcccacagctggaacgagagctgggtgaacagaatggaggagggcaaccccagactgtggtacgccgccctgctgagcttcaccagcgccttctacatcctgagcatcatctgcgtgggcctgctgtacacctactacaccaagcccgacggctgcaccgagaacaagttcttcatcagcatcaacctgatcctgtgcgtggtggccagcatcatcagcatccaccccaagatccaggagcaccagcccagaagcggcctgctgcagagcagcctgatcaccctgtacaccatgtacctgacctggagcgccatgagcaacgagcccgacagaagctgcaaccccaacctgatgagcttcatcaccagaatcaccgcccccaccctggcccccggcaacagcaccgccgtggtgcccacccccaccccccccagcaagagcggcagcctgctggacagcgacaacttcatcggcctgttcgtgttcgtgctgtgcctgctgtacagcagcatcagaaccagcaccaacagccaggtggacaagctgaccctgagcggcagcgacagcgtgatcctgggcgacaccaccaccagcggcgccagcgacgaggaggacggccagcccagaagagccgtggacaacgagaaggagggcgtgcagtacagctacagcctgttccacctgatgctgtgcctggccagcctgtacatcatgatgaccctgaccagctggtacagccccgacgccaagttccagagcatgaccagcaagtggcccgccgtgtgggtgaagatcagcagcagctgggtgtgcctgctgctgtacgtgtggaccctggtggcccccctggtgctgaccagcagagacttcagctag

SEQ ID NO: 98434 - DNA, 1257 bp, synthetic construct
  misc_feature 1..1257: note = Description of Artificial Sequence: Synthetic coding sequence
  source 1..1257: mol_type = other DNA
atgcagagaaaggagatggagacctacctgaagaagatccccggcttctgcgagggcggcttcaagatccacgaggccgacatcaacgccgacaaggactgcgacgtgctggtgggctacaaggccgtgtacagaatcagcttcgccatggccatcttcttcttcgtgttcagcctgctgatgttcaaggtgaagaccagcaaggacctgagagccgccgtgcacaacggcttctggttcttcaagatcgccgccctgatcggcatcatggtgggcagcttctacatccccggcggctacttcagcagcgtgtggttcgtggtgggcatgatcggcgccgccctgttcatcctgatccagctggtgctgctggtggacttcgcccacagctggaacgagagctgggtgaacagaatggaggagggcaaccccagactgtggtacgccgccctgctgagcttcaccagcgccttctacatcctgagcatcatctgcgtgggcctgctgtacacctactacaccaagcccgacggctgcaccgagaacaagttcttcatcagcatcaacctgatcctgtgcgtggtggccagcatcatcagcatccaccccaagatccaggagcaccagcccagaagcggcctgctgcagagcagcctgatcaccctgtacaccatgtacctgacctggagcgccatgagcaacgagcccgacagaagctgcaaccccaacctgatgagcttcatcaccagaatcaccgcccccaccctggcccccggcaacagcaccgccgtggtgcccacccccaccccccccagcaagagcggcagcctgctggacagcgacaacttcatcggcctgttcgtgttcgtgctgtgcctgctgtacagcagcatcagaaccagcaccaacagccaggtggacaagctgaccctgagcggcagcgacagcgtgatcctgggcgacaccaccaccagcggcgccagcgacgaggaggacggccagcccagaagagccgtggacaacgagaaggagggcgtgcagtacagctacagcctgttccacctgatgctgtgcctggccagcctgtacatcatgatgaccctgaccagctggtacagccccgacgccaagttccagagcatgaccagcaagtggcccgccgtgtgggtgaagatcagcagcagctgggtgtgcctgctgctgtacgtgtggaccctggtggcccccctggtgctgaccagcagagacttcagctag

SEQ ID NO: 98435 - DNA, 1422 bp, synthetic construct
  misc_feature 1..1422: note = Description of Artificial Sequence: Synthetic coding sequence
  source 1..1422: mol_type = other DNA
atggccaccgccaccgagcagtgggtgctggtggagatggtgcaggccctgtacgaggcccccgcctaccacctgatcctggagggcatcctgatcctgtggatcatcagactgctgttcagcaagacctacaagctgcaggagagaagcgacctgaccgtgaaggagaaggaggagctgatcgaggagtggcagcccgagcccctggtgccccccgtgcccaaggaccaccccgccctgaactacaacatcgtgagcggcccccccagccacaagaccgtggtgaacggcaaggagtgcatcaacttcgccagcttcaacttcctgggcctgctggacaaccccagagtgaaggccgccgccctggccagcctgaagaagtacggcgtgggcacctgcggccccagaggcttctacggcaccttcgacgtgcacctggacctggaggacagactggccaagttcatgaagaccgaggaggccatcatctacagctacggcttcgccaccatcgccagcgccatccccgcctacagcaagagaggcgacatcgtgttcgtggacagagccgcctgcttcgccatccagaagggcctgcaggccagcagaagcgacatcaagctgttcaagcacaacgacatggccgacctggagagactgctgaaggagcaggagatcgaggaccagaagaaccccagaaaggccagagtgaccagaagattcatcgtggtggagggcctgtacatgaacaccggcaccatctgccccctgcccgagctggtgaagctgaagtacaagtacaaggccagaatcttcctggaggagagcctgagcttcggcgtgctgggcgagcacggcagaggcgtgaccgagcactacggcatcaacatcgacgacatcgacctgatcagcgccaacatggagaacgccctggccagcatcggcggcttctgctgcggcagaagcttcgtgatcgaccaccagagactgagcggccagggctactgcttcagcgccagcctgccccccctgctggccgccgccgccatcgaggccctgaacatcatggaggagaaccccggcatcttcgccgtgctgaaggagaagtgcggccagatccacaaggccctgcagggcatcagcggcctgaaggtggtgggcgagagcctgagccccgccttccacctgcagctggaggagagcaccggcagcagagagcaggacgtgagactgctgcaggagatcgtggaccagtgcatgaacagaagcatcgccctgacccaggccagatacctggagaaggaggagaagtgcctgcccccccccagcatcagagtggtggtgaccgtggagcagaccgaggaggagctggagagagccgccagcaccatcaaggaggtggcccaggccgtgctgctgtag

SEQ ID NO: 98436 - DNA, 432 bp, synthetic construct
  misc_feature 1..432: note = Description of Artificial Sequence: Synthetic coding sequence
  source 1..432: mol_type = other DNA
atggccaccgccaccgagcagtgggtgctggtggagatggtgcaggccctgtacgaggcccccgcctaccacctgatcctggagggcatcctgatcctgtggatcatcagactgctgttcagcaagacctacaagctgcaggagagaagcgacctgaccgtgaaggagaaggaggagctgatcgaggagtggcagcccgagcccctggtgccccccgtgcccaaggaccaccccgccctgaactacaacatcgtgagcggcccccccagccacaagaccgtggtgaacggcaaggagtgcatcaacttcgccagcttcaacttcctgggcctgctggacaaccccagagtgaaggccgccgccctggccagcctgaagaagtacggcgtgggcacctgcggccccagaggcttctacggcaccttcgagtag

SEQ ID NO: 98437 - DNA, 1017 bp, synthetic construct
  misc_feature 1..1017: note = Description of Artificial Sequence: Synthetic coding sequence
  source 1..1017: mol_type = other DNA
atggccaagtggggcgagggcgaccccagatggatcgtggaggagagagccgacgccaccaacgtgaacaactggcactggaccgagagagacgccagcaactggagcaccgacaagctgaagaccctgttcctggccgtgcaggtgcagaacgaggagggcaagtgcgaggtgaccgaggtgagcaagctggacggcgaggccagcatcaacaacagaaagggcaagctgatcttcttctacgagtggagcgtgaagctgaactggaccggcaccagcaagagcggcgtgcagtacaagggccacgtggagatccccaacctgagcgacgagaacagcgtggacgaggtggagatcagcgtgagcctggccaaggacgagcccgacaccaacctggtggccctgatgaaggaggagggcgtgaagctgctgagagaggccatgggcatctacatcagcaccctgaagaccgagttcacccagggcatgatcctgcccaccatgaacggcgagagcgtggaccccgtgggccagcccgccctgaagaccgaggagagaaaggccaagcccgcccccagcaagacccaggccagacccgtgggcgtgaagatccccacctgcaagatcaccctgaaggagaccttcctgaccagccccgaggagctgtacagagtgttcaccacccaggagctggtgcaggccttcacccacgcccccgccaccctggaggccgacagaggcggcaagttccacatggtggacggcaacgtgagcggcgagttcaccgacctggtgcccgagaagcacatcgtgatgaagtggagattcaagagctggcccgagggccacttcgccaccatcaccctgaccttcatcgacaagaacggcgagaccgagctgtgcatggagggcagaggcatccccgcccccgaggaggagagaaccagacagggctggcagagatactacttcgagggcatcaagcagaccttcggctacggcgccagactgttctag

SEQ ID NO: 98438 - DNA, 990 bp, synthetic construct
  misc_feature 1..990: note = Description of Artificial Sequence: Synthetic coding sequence
  source 1..990: mol_type = other DNA
atggccaaccccggcggcggcgccgtgtgcaacggcaagctgcacaaccacaagaagcagagcaacggcagccagagcagaaactgcaccaagaacggcatcgtgaaggaggcccagcagaacggcaagccccacttctacgacaagctgatcgtggagagcttcgaggaggcccccctgcacgtgatggtgttcacctacatgggctacggcatcggcaccctgttcggctacctgagagacttcctgagaaactggggcatcgagaagtgcaacgccgccgtggagagaaaggagcagaaggacttcgtgcccctgtaccaggacttcgagaacttctacaccagaaacctgtacatgagaatcagagacaactggaacagacccatctgcagcgcccccggccccctgttcgacctgatggagagagtgagcgacgactacaactggaccttcagattcaccggcagagtgatcaaggacgtgatcaacatgggcagctacaacttcctgggcctggccgccaagtacgacgagagcatgagaaccatcaaggacgtgctggaggtgtacggcaccggcgtggccagcaccagacacgagatgggcaccctggacaagcacaaggagctggaggacctggtggccaagttcctgaacgtggaggccgccatggtgttcggcatgggcttcgccaccaacagcatgaacatccccgccctggtgggcaagggctgcctgatcctgagcgacgagctgaaccacaccagcctggtgctgggcgccagactgagcggcgccaccatcagaatcttcaagcacaacaacacccagagcctggagaagctgctgagagacgccgtgatctacggccagcccagaaccagaagagcctggaagaagatcctgatcctggtggagggcgtgtacagaaccagctggatcatctacggcttcaccagaatcgtgctgttcatgctgcacccctag

SEQ ID NO: 98439 - DNA, 1659 bp, synthetic construct
  misc_feature 1..1659: note = Description of Artificial Sequence: Synthetic coding sequence
  source 1..1659: mol_type = other DNA
atggccaaccccggcggcggcgccgtgtgcaacggcaagctgcacaaccacaagaagcagagcaacggcagccagagcagaaactgcaccaagaacggcatcgtgaaggaggcccagcagaacggcaagccccacttctacgacaagctgatcgtggagagcttcgaggaggcccccctgcacgtgatggtgttcacctacatgggctacggcatcggcaccctgttcggctacctgagagacttcctgagaaactggggcatcgagaagtgcaacgccgccgtggagagaaaggagcagaaggacttcgtgcccctgtaccaggacttcgagaacttctacaccagaaacctgtacatgagaatcagagacaactggaacagacccatctgcagcgcccccggccccctgttcgacctgatggagagagtgagcgacgactacaactggaccttcagattcaccggcagagtgatcaaggacgtgatcaacatgggcagctacaacttcctgggcctggccgccaagtacgacgagagcatgagaaccatcaaggacgtgctggaggtgtacggcaccggcgtggccagcaccagacacgagatgggcaccctggacaagcacaaggagctggaggacctggtggccaagttcctgaacgtggaggccgccatggtgttcggcatgggcttcgccaccaacagcatgaacatccccgccctggtgggcaagggctgcctgatcctgagcgacgagctgaaccacaccagcctggtgctgggcgccagactgagcggcgccaccatcagaatcttcaagcacaacaacacccagagcctggagaagctgctgagagacgccgtgatctacggccagcccagaaccagaagagcctggaagaagatcctgatcctggtggagggcgtgtacagcatggagggcagcatcgtgcacctgccccagatcatcgccctgaagaagaagtacaaggcctacctgtacatcgacgaggcccacagcatcggcgccgtgggccccaccggcagaggcgtgaccgagttcttcggcctggacccccacgaggtggacgtgctgatgggcaccttcaccaagagcttcggcgccagcggcggctacatcgccggcagaaaggacctggtggactacctgagagtgcacagccacagcgccgtgtacgccagcagcatgagcccccccatcgccgagcagatcatcagaagcctgaagctgatcatgggcctggacggcaccacccagggcctgcagagagtgcagcagctggccaagaacaccagatacttcagacagagactgcaggagatgggcttcatcatctacggcaacgagaacgccagcgtggtgcccctgctgctgtacatgcccggcaaggtggccgccttcgccagacacatgctggagaagaagatcggcgtggtggtggtgggcttccccgccacccccctggccgaggccagagccagattctgcgtgagcgccgcccacaccagagagatgctggacaccgtgctggaggccctggacgagatgggcgacctgctgcagctgaagtacagcagacacaagaagagcgccagacccgagctgtacgacgagaccagcttcgagctggaggactag

SEQ ID NO: 98440 - DNA, 366 bp, synthetic construct
  misc_feature 1..366: note = Description of Artificial Sequence: Synthetic coding sequence
  source 1..366: mol_type = other DNA
tgaagcccccccatcgccgagcagatcatcagaagcctgaagctgatcatgggcctggacggcaccacccagggcctgcagagagtgcagcagctggccaagaacaccagatacttcagacagagactgcaggagatgggcttcatcatctacggcaacgagaacgccagcgtggtgcccctgctgctgtacatgcccggcaaggtggccgccttcgccagacacatgctggagaagaagatcggcgtggtggtggtgggcttccccgccacccccctggccgaggccagagccagattctgcgtgagcgccgcccacaccagagagatgctggacaccgtgatctgctgcgtgatgaagatctag

SEQ ID NO: 98441 - DNA, 420 bp, synthetic construct
  misc_feature 1..420: note = Description of Artificial Sequence: Synthetic coding sequence
  source 1..420: mol_type = other DNA
atggccaaccccggcggcggcgccgtgtgcaacggcaagctgcacaaccacaagaagcagagcaacggcagccagagcagaaactgcaccaagaacggcatcgtgaaggaggcccagcagaacggcaagccccacttctacgacaagctgatcgtggagagcttcgaggaggcccccctgcacgtgatggtgttcacctacatgggctacggcatcggcaccctgttcggctacctgagagacttcctgagaaactggggcatcgagaagtgcaacgccgccgtggagagaaaggagcagaaggacttcgtgcccctgtaccaggacttcgagaacttctacaccagaaacctgtacatgagaatcagagacaactggaacagacccatctgcagcgcccccggccccctgttcgactag

SEQ ID NO: 98442 - DNA, 648 bp, synthetic construct
  misc_feature 1..648: note = Description of Artificial Sequence: Synthetic coding sequence
  source 1..648: mol_type = other DNA
aactgcaccaagaacggcatcgtgaaggaggcccagcagaacggcaagccccacttctacgacaagctgatcgtggagagcttcgaggaggcccccctgcacgtgatggtgttcacctacatgggctacggcatcggcaccctgttcggctacctgagagacttcctgagaaactggggcatcgagaagtgcaacgccgccgtggagagaaaggagcagaaggacttcgtgcccctgtaccaggacttcgagaacttctacaccagaaacctgtacatgagaatcagagacaactggaacagacccatctgcagcgcccccggccccctgttcgacctgatggagagagtgagcgacgactacaactggaccttcagattcaccggcagagtgatcaaggacgtgatcaacatgggcagctacaacttcctgggcctggccgccaagtacgacgagagcatgagaaccatcaaggacgtgctggaggtgtacggcaccggcgtggccagcaccagacacgagatgggcgagttcaccagcagctggcagaacgccctgtgcgtgggcggcgtgctgcaggccgacagcgtgccccagggccccccctggagctggaagatgggcagacacagcagcctgctggagtag

SEQ ID NO: 98443 - DNA, 360 bp, synthetic construct
  misc_feature 1..360: note = Description of Artificial Sequence: Synthetic coding sequence
  source 1..360: mol_type = other DNA
atggccctgagcgtgctgagactggccctgctgctgctggccgtgaccttcgccggcagcgccagaagcggccccggcgagagaggcccccccgagaagagcggcttcggcagccagaccggcggcggcccctgccccgcccccggcggcctgggcgacgccagcctgatcccccagttcggcctgttcagcaagtacagaacccccaactgcagccagtacagactgcccggctgccccagacacttcaaccccgtgtgcggcagcgacatgagcacctacgccaacgagtgcaccctgtgcatgaagatcagagagggcggccacaacatcaagatcatcagaaacggcccctgctag

SEQ ID NO: 98444 - DNA, 405 bp, synthetic construct
  misc_feature 1..405: note = Description of Artificial Sequence: Synthetic coding sequence
  source 1..405: mol_type = other DNA
atggccctgagcgtgctgagactggccctgctgctgctggccgtgaccttcgccggcagcgccagaagcggccccggcgagagaggcccccccgagaagagcggcttcggcagccagaccggcggcggcccctgccccgcccccggcggcctgggcgacggcaccagagcccccgtgaccggcggcagccccgaggacctgcccgccagcctgatcccccagttcggcctgttcagcaagtacagaacccccaactgcagccagtacagactgcccggctgccccagacacttcaaccccgtgtgcggcagcgacatgagcacctacgccaacgagtgcaccctgtgcatgaagatcagagagggcggccacaacatcaagatcatcagaaacggcccctgctag

SEQ ID NO: 98445 - DNA, 240 bp, synthetic construct
  misc_feature 1..240: note = Description of Artificial Sequence: Synthetic coding sequence
  source 1..240: mol_type = other DNA
atgaaggtgaccggcatcttcctgctgagcgccctggccctgctgagcctgagcggcaacaccggcgccgacagcctgggcagagaggccaagtgctacaacgagctgaacggctgcaccaagatctacgaccccgtgtgcggcaccgacggcaacacctaccccaacgagtgcgtgctgtgcttcgagaacagaaagagacagaccagcatcctgatccagaagagcggcccctgctag

SEQ ID NO: 98446 - DNA, 255 bp, synthetic construct
  misc_feature 1..255: note = Description of Artificial Sequence: Synthetic coding sequence
  source 1..255: mol_type = other DNA
atggccctgagcgtgctgagactggccctgctgctgctggccgtgaccttcgccgccagcctgatcccccagttcggcctgttcagcaagtacagaacccccaactgcagccagtacagactgcccggctgccccagacacttcaaccccgtgtgcggcagcgacatgagcacctacgccaacgagtgcaccctgtgcatgaagatcagagagggcggccacaacatcaagatcatcagaaacggcccctgctag

SEQ ID NO: 98447 - DNA, 261 bp, synthetic construct
  misc_feature 1..261: note = Description of Artificial Sequence: Synthetic coding sequence
  source 1..261: mol_type = other DNA
atggccgtgagacagtgggtgatcgccctggccctggccgccctgctggtggtggacagagaggtgcccgtggccgccggcaagctgcccttcagcagaatgcccatctgcgagcacatggtggagagccccacctgcagccagatgagcaacctggtgtgcggcaccgacggcctgacctacaccaacgagtgccagctgtgcctggccagaatcaagaccaagcaggacatccagatcatgaaggacggcaagtgctag

SEQ ID NO: 98448 - DNA, 330 bp, synthetic construct
  misc_feature 1..330: note = Description of Artificial Sequence: Synthetic coding sequence
  source 1..330: mol_type = other DNA
atgatcctgggcatcggcagcagcccccacctgctgtggaccctggagggcacccacatctggagcctgctgggcgacgccagccacaccgacagactgcccgaggccggcgccggcaagctgctgagcgaggtgcccgtggccgccggcaagctgcccttcagcagaatgcccatctgcgagcacatggtggagagccccacctgcagccagatgagcaacctggtgtgcggcaccgacggcctgacctacaccaacgagtgccagctgtgcctggccagaatcaagaccaagcaggacatccagatcatgaaggacggcaagtgctag

SEQ ID NO: 98449 - DNA, 330 bp, synthetic construct; identical to SEQ ID NO: 98448
  misc_feature 1..330: note = Description of Artificial Sequence: Synthetic coding sequence
  source 1..330: mol_type = other DNA

SEQ ID NO: 98450 - DNA, 3195 bp, synthetic construct
  misc_feature 1..3195: note = Description of Artificial Sequence: Synthetic coding sequence
  source 1..3195: mol_type = other DNA
atgaagatcgccaccgtgagcgtgctgctgcccctggccctgtgcctgatccaggacgccgccagcaagaacgaggaccaggagatgtgccacgagttccaggccttcatgaagaacggcaagctgttctgcccccaggacaagaagttcttccagagcctggacggcatcatgttcatcaacaagtgcgccacctgcaagatgatcctggagaaggaggccaagagccagaagagagccagacacctggccagagcccccaaggccaccgcccccaccgagctgaactgcgacgacttcaagaagggcgagagagacggcgacttcatctgccccgactactacgaggccgtgtgcggcaccgacggcaagacctacgacaacagatgcgccctgtgcgccgagaacgccaagaccggcagccagatcggcgtgaagagcgagggcgagtgcaagagcagcaaccccgagcaggacgtgtgcagcgccttcagacccttcgtgagagacggcagactgggctgcaccagagagaacgaccccgtgctgggccccgacggcaagacccacggcaacaagtgcgccatgtgcgccgagctgttcctgaaggaggccgagaacgccaagagagagggcgagaccagaatcagaagaaacgccgagaaggacttctgcaaggagtacgagaagcaggtgagaaacggcagactgttctgcaccagagagagcgaccccgtgagaggccccgacggcagaatgcacggcaacaagtgcgccctgtgcgccgagatcttcaagcagagattcagcgaggagaacagcaagaccgaccagaacctgggcaaggccgaggagaagaccaaggtgaagagagagatcgtgaagctgtgcagccagtaccagaaccaggccaagaacggcatcctgttctgcaccagagagaacgaccccatcagaggccccgacggcaagatgcacggcaacctgtgcagcatgtgccaggcctacttccaggccgagaacgaggagaagaagaaggccgaggccagagccagaaacaagagagagagcggcaaggccaccagctacgccgagctgtgcagcgagtacagaaagctggtgagaaacggcaagctggcctgcaccagagagaacgaccccatccagggccccgacggcaaggtgcacggcaacacctgcagcatgtgcgaggtgttcttccaggccgaggaggaggagaagaagaagaaggagggcaagagcagaaacaagagacagagcaagagcaccgccagcttcgaggagctgtgcagcgagtacagaaagagcagaaagaacggcagactgttctgcaccagagagaacgaccccatccagggccccgacggcaagatgcacggcaacacctgcagcatgtgcgaggccttcttccagcaggaggagagagccagagccaaggccaagagagaggccgccaaggagatctgcagcgagttcagagaccaggtgagaaacggcaccctgatctgcaccagagagcacaaccccgtgagaggccccgacggcaagatgcacggcaacaagtgcgccatgtgcgccagcgtgttcaagctggaggaggaggagaagaagaacgacaaggaggagaagggcaaggtggaggccgagaaggtgaagagagaggccgtgcaggagctgtgcagcgagtacagacactacgtgagaaacggcagactgccctgcaccagagagaacgaccccatcgagggcctggacggcaagatccacggcaacacctgcagcatgtgcgaggccttcttccagcaggaggccaaggagaaggagagagccgagcccagagccaaggtgaagagagaggccgagaaggagacctgcgacgagttcagaagactgctgcagaacggcaagctgttctgcaccagagagaacgaccccgtgagaggccccgacggcaagacccacggcaacaagtgcgccatgtgcaaggccgtgttccagaaggagaacgaggagagaaagagaaaggaggaggaggaccagagaaacgccgccggccacggcagcagcggcggcggcggcggcaacacccaggacgagtgcgccgagtacagagagcagatgaagaacggcagactgagctgcaccagagagagcgaccccgtgagagacgccgacggcaagagctacaacaaccagtgcaccatgtgcaaggccaagctggagagagaggccgagagaaagaacgagtacagcagaagcagaagcaacggcaccggcagcgagagcggcaaggacacctgcgacgagttcagaagccagatgaagaacggcaagctgatctgcaccagagagagcgaccccgtgagaggccccgacggcaagacccacggcaacaagtgcaccatgtgcaaggagaagctggagagagaggccgccgagaagaagaagaaggaggacgaggacagaagcaacaccggcgagagaagcaacaccggcgagagaagcaacgacaaggaggacctgtgcagagagttcagaagcatgcagagaaacggcaagctgatctgcaccagagagaacaaccccgtgagaggcccctacggcaagatgcacatcaacaagtgcgccatgtgccagagcatcttcgacagagaggccaacgagagaaagaagaaggacgaggagaagagcagcagcaagcccagcaacaacgccaaggacgagtgcagcgagttcagaaactacatcagaaacaacgagctgatctgccccagagagaacgaccccgtgcacggcgccgacggcaagttctacaccaacaagtgctacatgtgcagagccgtgttcctgaccgaggccctggagagagccaagctgcaggagaagcccagccacgtgagagccagccaggaggaggacagccccgacagcttcagcagcctggacagcgagatgtgcaaggactacagagtgctgcccagaatcggctacctgtgccccaaggacctgaagcccgtgtgcggcgacgacggccagacctacaacaacccctgcatgctgtgccacgagaacctgatcagacagaccaacacccacatcagaagcaccggcaagtgcgaggagagcagcacccccggcaccaccgccgccagcatgccccccagcgacgagtag

SEQ ID NO: 98451 - DNA, 3285 bp, synthetic construct
  misc_feature 1..3285: note = Description of Artificial Sequence: Synthetic coding sequence
  source 1..3285: mol_type = other DNA
atgaagatcgccaccgtgagcgtgctgctgcccctggccctgtgcctgatccaggacgccgccagcaagaacgaggaccaggagatgtgccacgagttccaggccttcatgaagaacggcaagctgttctgcccccaggacaagaagttcttccagagcctggacggcatcatgttcatcaacaagtgcgccacctgcaagatgatcctggagaaggaggccaagagccagaagagagccagacacctggccagagcccccaaggccaccgcccccaccgagctgaactgcgacgacttcaagaagggcgagagagacggcgacttcatctgccccgactactacgaggccgtgtgcggcaccgacggcaagacctacgacaacagatgcgccctgtgcgccgagaacgccaagaccggcagccagatcggcgtgaagagcgagggcgagtgcaagagcagcaaccccgagcaggacgtgtgcagcgccttcagacccttcgtgagagacggcagactgggctgcaccagagagaacgaccccgtgctgggccccgacggcaagacccacggcaacaagtgcgccatgtgcgccgagctgttcctgaaggaggccgagaacgccaagagagagggcgagaccagaatcagaagaaacgccgagaaggacttctgcaaggagtacgagaagcaggtgagaaacggcagactgttctgcaccagagagagcgaccccgtgagaggccccgacggcagaatgcacggcaacaagtgcgccctgtgcgccgagatcttcaagcagagattcagcgaggagaacagcaagaccgaccagaacctgggcaaggccgaggagaagaccaaggtgaagagagagatcgtgaagctgtgcagccagtaccagaaccaggccaagaacggcatcctgttctgcaccagagagaacgaccccatcagaggccccgacggcaagatgcacggcaacctgtgcagcatgtgccaggcctacttccaggccgagaacgaggagaagaagaaggccgaggccagagccagaaacaagagagagagcggcaaggccaccagctacgccgagctgtgcagcgagtacagaaagctggtgagaaacggcaagctggcctgcaccagagagaacgaccccatccagggccccgacggcaaggtgcacggcaacacctgcagcatgtgcgaggtgttcttccaggccgaggaggaggagaagaagaagaaggagggcaagagcagaaacaagagacagagcaagagcaccgccagcttcgaggagctgtgcagcgagtacagaaagagcagaaagaacggcagactgttctgcaccagagagaacgaccccatccagggccccgacggcaagatgcacggcaacacctgcagcatgtgcgaggccttcttccagcaggaggagagagccagagccaaggccaagagagaggccgccaaggagatctgcagcgagttcagagaccaggtgagaaacggcaccctgatctgcaccagagagcacaaccccgtgagaggccccgacggcaagatgcacggcaacaagtgcgccatgtgcgccagcgtgttcaagctggaggaggaggagaagaagaacgacaaggaggagaagggcaaggtggaggccgagaaggtgaagagagaggccgtgcaggagctgtgcagcgagtacagacactacgtgagaaacggcagactgccctgcaccagagagaacgaccccatcgagggcctggacggcaagatccacggcaacacctgcagcatgtgcgaggccttcttccagcaggaggccaaggagaaggagagagccgagcccagagccaaggtgaagagagaggccgagaaggagacctgcgacgagttcagaagactgctgcagaacggcaagctgttctgcaccagagagaacgaccccgtgagaggccccgacggcaagacccacggcaacaagtgcgccatgtgcaaggccgtgttccagaaggagaacgaggagagaaagagaaaggaggaggaggaccagagaaacgccgccggccacggcagcagcggcggcggcggcggcaacacccaggacgagtgcgccgagtacagagagcagatgaagaacggcagactgagctgcaccagagagagcgaccccgtgagagacgccgacggcaagagctacaacaaccagtgcaccatgtgcaaggccaagctggagagagaggccgagagaaagaacgagtacagcagaagcagaagcaacggcaccggcagcgagagcggcaaggacacctgcgacgagttcagaagccagatgaagaacggcaagctgatctgcaccagagagagcgaccccgtgagaggccccgacggcaagacccacggcaacaagtgcaccatgtgcaaggagaagctggagagagaggccgccgagaagaagaagaaggaggacgaggacagaagcaacaccggcgagagaagcaacaccggcgagagaagcaacgacaaggaggacctgtgcagagagttcagaagcatgcagagaaacggcaagctgatctgcaccagagagaacaaccccgtgagaggcccctacggcaagatgcacatcaacaagtgcgccatgtgccagagcatcttcgacagagaggccaacgagagaaagaagaaggacgaggagaagagcagcagcaagcccagcaacaacgccaaggaccagtgcagacaggtgcagaacgaggccgaggacgccaagttcagacagcccggcagaagcctggccagcgtggccagaatgagcaccgacgagtgcagcgagttcagaaactacatcagaaacaacgagctgatctgccccagagagaacgaccccgtgcacggcgccgacggcaagttctacaccaacaagtgctacatgtgcagagccgtgttcctgaccgaggccctggagagagccaagctgcaggagaagcccagccacgtgagagccagccaggaggaggacagccccgacagcttcagcagcctggacagcgagatgtgcaaggactacagagtgctgcccagaatcggctacctgtgccccaaggacctgaagcccgtgtgcggcgacgacggccagacctacaacaacccctgcatgctgtgccacgagaacctgatcagacagaccaacacccacatcagaagcaccggcaagtgcgaggagagcagcacccccggcaccaccgccgccagcatgccccccagcgacgagtag

SEQ ID NO: 98452 - DNA, 2751 bp, synthetic construct
  misc_feature 1..2751: note = Description of Artificial Sequence: Synthetic coding sequence
  source 1..2751: mol_type = other DNA
atgaagatcgccaccgtgagcgtgctgctgcccctggccctgtgcctgatccaggacgccgccagcaagaacgaggaccaggagatgtgccacgagttccaggccttcatgaagaacggcaagctgttctgcccccaggacaagaagttcttccagagcctggacggcatcatgttcatcaacaagtgcgccacctgcaagatgatcctggagaaggaggccaagagccagaagagagccagacacctggccagagcccccaaggccaccgcccccaccgagctgaactgcgacgacttcaagaagggcgagagagacggcgacttcatctgccccgactactacgaggccgtgtgcggcaccgacggcaagacctacgacaacagatgcgccctgtgcgccgagaacgccaagaccggcagccagatcggcgtgaagagcgagggcgagtgcaagagcagcaaccccgagcaggacgtgtgcagcgccttcagacccttcgtgagagacggcagactgggctgcaccagagagaacgaccccgtgctgggccccgacggcaagacccacggcaacaagtgcgccatgtgcgccgagctgttcctgaaggaggccgagaacgccaagagagagggcgagaccagaatcagaagaaacgccgagaaggacttctgcaaggagtacgagaagcaggtgagaaacggcagactgttctgcaccagagagagcgaccccgtgagaggccccgacggcagaatgcacggcaacaagtgcgccctgtgcgccgagatcttcaagcagagattcagcgaggagaacagcaagaccgaccagaacctgggcaaggccgaggagaagaccaaggtgaagagagagatcgtgaagctgtgcagccagtaccagaaccaggccaagaacggcatcctgttctgcaccagagagaacgaccccatcagaggccccgacggcaagatgcacggcaacctgtgcagcatgtgccaggcctacttccaggccgagaacgaggagaagaagaaggccgaggccagagccagaaacaagagagagagcggcaaggccaccagctacgccgagctgtgcagcgagtacagaaagctggtgagaaacggcaagctggcctgcaccagagagaacgaccccatccagggccccgacggcaaggtgcacggcaacacctgcagcatgtgcgaggtgttcttccaggccgaggaggaggagaagaagaagaaggagggcaagagcagaaacaagagacagagcaagagcaccgccagcttcgaggagctgtgcagcgagtacagaaagagcagaaagaacggcagactgttctgcaccagagagaacgaccccatccagggccccgacggcaagatgcacggcaacacctgcagcatgtgcgaggccttcttccagcaggaggagagagccagagccaaggccaagagagaggccgccaaggagatctgcagcgagttcagagaccaggtgagaaacggcaccctgatctgcaccagagagcacaaccccgtgagaggccccgacggcaagatgcacggcaacaagtgcgccatgtgcgccagcgtgttcaagctggaggaggaggagaagaagaacgacaaggaggagaagggcaaggtggaggccgagaaggtgaagagagaggccgtgcaggagctgtgcagcgagtacagacactacgtgagaaacggcagactgccctgcaccagagagaacgaccccatcgagggcctggacggcaagatccacggcaacacctgcagcatgtgcgaggccttcttccagcaggaggccaaggagaaggagagagccgagcccagagccaaggtgaagagagaggccgagaaggagacctgcgacgagttcagaagactgctgcagaacggcaagctgttctgcaccagagagaacgaccccgtgagaggccccgacggcaagacccacggcaacaagtgcgccatgtgcaaggccgtgttccagaaggagaacgaggagagaaagagaaaggaggaggaggaccagagaaacgccgccggccacggcagcagcggcggcggcggcggcaacacccaggacgagtgcgccgagtacagagagcagatgaagaacggcagactgagctgcaccagagagagcgaccccgtgagagacgccgacggcaagagctacaacaaccagtgcaccatgtgcaaggccaagctggagagagaggccgagagaaagaacgagtacagcagaagcagaagcaacggcaccggcagcgagagcggcaaggacacctgcgacgagttcagaagccagatgaagaacggcaagctgatctgcaccagagagagcgaccccgtgagaggccccgacggcaagacccacggcaacaagtgcaccatgtgcaaggagaagctggagagagaggccgccgagaagaagaagaaggaggacgaggacagaagcaacaccggcgagagaagcaacaccggcgagagaagcaacgacaaggaggacctgtgcagagagttcagaagcatgcagagaaacggcaagctgatctgcaccagagagaacaaccccgtgagaggcccctacggcaagatgcacatcaacaagtgcgccatgtgccagagcatcttcgacagagaggccaacgagagaaagaagaaggacgaggagaagagcagcagcaagcccagcaacaacgccaaggtgatctactag

SEQ ID NO: 98453 - DNA, 261 bp, synthetic construct
  misc_feature 1..261: note = Description of Artificial Sequence: Synthetic coding sequence
  source 1..261: mol_type = other DNA
atgagagccaccgccatcgtgctgctgctggccctgaccctggccaccatgttcagcatcgagtgcgccaagcagaccaagcagatggtggactgcagccactacaagaagctgccccccggccagcagagattctgccaccacatgtacgaccccatctgcggcagcgacggcaagacctacaagaacgactgcttcttctgcagcaaggtgaagaagaccgacggcaccctgaagttcgtgcacttcggcaagtgctag

SEQ ID NO: 98454 - DNA, 759 bp, synthetic construct
  misc_feature 1..759: note = Description of Artificial Sequence: Synthetic coding sequence
  source 1..759: mol_type = other DNA
atggcccagctgtgcggcctgagaagaagcagagccttcctggccctgctgggcagcctgctgctgagcggcgtgctggccgccgacagagagagaagcatccacgacttctgcctggtgagcaaggtggtgggcagatgcagagccagcatgcccagatggtggtacaacgtgaccgacggcagctgccagctgttcgtgtacggcggctgcgacggcaacagcaacaactacctgaccaaggaggagtgcctgaagaagtgcgccaccgtgaccgagaacgccaccggcgacctggccaccagcagaaacgccgccgacagcagcgtgcccagcgcccccagaagacaggacagcgaggaccacagcagcgacatgttcaactacgaggagtactgcaccgccaacgccgtgaccggcccctgcagagccagcttccccagatggtacttcgacgtggagagaaacagctgcaacaacttcatctacggcggctgcagaggcaacaagaacagctacagaagcgaggaggcctgcatgctgagatgcttcagacagcaggagaacccccccctgcccctgggcagcaaggtggtggtgctggccggcctgttcgtgatggtgctgatcctgttcctgggcgccagcatggtgtacctgatcagagtggccagaagaaaccaggagagagccctgagaaccgtgtggagcagcggcgacgacaaggagcagctggtgaagaacacctacgtgctgtag

SEQ ID NO: 98455 - DNA, 588 bp, synthetic construct
  misc_feature 1..588: note = Description of Artificial Sequence: Synthetic coding sequence
  source 1..588: mol_type = other DNA
atggcccagctgtgcggcctgagaagaagcagagccttcctggccctgctgggcagcctgctgctgagcggcgtgctggccgccgacagagagagaagcatccacgagaacgccaccggcgacctggccaccagcagaaacgccgccgacagcagcgtgcccagcgcccccagaagacaggacagcgaggaccacagcagcgacatgttcaactacgaggagtactgcaccgccaacgccgtgaccggcccctgcagagccagcttccccagatggtacttcgacgtggagagaaacagctgcaacaacttcatctacggcggctgcagaggcaacaagaacagctacagaagcgaggaggcctgcatgctgagatgcttcagacagcaggagaacccccccctgcccctgggcagcaaggtggtggtgctggccggcctgttcgtgatggtgctgatcctgttcctgggcgccagcatggtgtacctgatcagagtggccagaagaaaccaggagagagccctgagaaccgtgtggagcagcggcgacgacaaggagcagctggtgaagaacacctacgtgctgtag

SEQ ID NO: 98456 - DNA, 1299 bp, synthetic construct
  misc_feature 1..1299: note = Description of Artificial Sequence: Synthetic coding sequence
  source 1..1299: mol_type = other DNA
atgagcgacaagctgccctacaaggtggccgacatcggcctggccgcctggggcagaaaggccctggacatcgccgagaacgagatgcccggcctgatgagaatgagagagagatacagcgccagcaagcccctgaagggcgccagaatcgccggctgcctgcacatgaccgtggagaccgccgtgctgatcgagaccctggtgaccctgggcgccgaggtgcagtggagcagctgcaacatcttcagcacccaggaccacgccgccgccgccatcgccaaggccggcatccccgtgtacgcctggaagggcgagaccgacgaggagtacctgtggtgcatcgagcagaccctgtacttcaaggacggccccctgaacatgatcctggacgacggcggcgacctgaccaacctgatccacaccaagtacccccagctgctgcccggcatcagaggcatcagcgaggagaccaccaccggcgtgcacaacctgtacaagatgatggccaacggcatcctgaaggtgcccgccatcaacgtgaacgacagcgtgaccaagagcaagttcgacaacctgtacggctgcagagagagcctgatcgacggcatcaagagagccaccgacgtgatgatcgccggcaaggtggccgtggtggccggctacggcgacgtgggcaagggctgcgcccaggccctgagaggcttcggcgccagagtgatcatcaccgagatcgaccccatcaacgccctgcaggccgccatggagggctacgaggtgaccaccatggacgaggcctgccaggagggcaacatcttcgtgaccaccaccggctgcatcgacatcatcctgggcagacacttcgagcagatgaaggacgacgccatcgtgtgcaacatcggccacttcgacgtggagatcgacgtgaagtggctgaacgagaacgccgtggagaaggtgaacatcaagccccaggtggacagatacagactgaagaacggcagaagaatcatcctgctggccgagggcagactggtgaacctgggctgcgccatgggccaccccagcttcgtgatgagcaacagcttcaccaaccaggtgatggcccagatcgagctgtggacccaccccgacaagtaccccgtgggcgtgcacttcctgcccaagaagctggacgaggccgtggccgaggcccacctgggcaagctgaacgtgaagctgaccaagctgaccgagaagcaggcccagtacctgggcatgagctgcgacggccccttcaagcccgaccactacagatactag

SEQ ID NO: 98457 - DNA, 1023 bp, synthetic construct
  misc_feature 1..1023: note = Description of Artificial Sequence: Synthetic coding sequence
  source 1..1023: mol_type = other DNA
atgtgcgcccagtactgcatcagcttcgccgacgtggagaaggcccacatcaacatcagagacagcatccacctgacccccgtgctgaccagcagcatcctgaaccagctgaccggcagaaacctgttcttcaagtgcgagctgttccagaagaccggcagcttcaagatcagaggcgccctgaacgccgtgagaagcctggtgcccgacgccctggagagaaagcccaaggccgtggtgacccacagcagcggcaaccacggccaggccctgacctacgccgccaagctggagggcatccccgcctacatcgtggtgccccagaccgcccccgactgcaagaagctggccatccaggcctacggcgccagcatcgtgtactgcgagcccagcgacgagagcagagagaacgtggccaagagagtgaccgaggagaccgagggcatcatggtgcaccccaaccaggagcccgccgtgatcgccggccagggcaccatcgccctggaggtgctgaaccaggtgcccctggtggacgccctggtggtgcccgtgggcggcggcggcatgctggccggcatcgccatcaccgtgaaggccctgaagcccagcgtgaaggtgtacgccgccgagcccagcaacgccgacgactgctaccagagcaagctgaagggcaagctgatgcccaacctgtacccccccgagaccatcgccgacggcgtgaagagcagcatcggcctgaacacctggcccatcatcagagacctggtggacgacatcttcaccgtgaccgaggacgagatcaagtgcgccacccagctggtgtgggagagaatgaagctgctgatcgagcccaccgccggcgtgggcgtggccgccgtgctgagccagcacttccagaccgtgagccccgaggtgaagaacatctgcatcgtgctgagcggcggcaacgtggacctgaccagcagcatcacctgggtgaagcaggccgagagacccgccagctaccagagcgtgagcgtgtag

SEQ ID NO: 98458 - DNA, 1638 bp, synthetic construct
  misc_feature 1..1638: note = Description of Artificial Sequence: Synthetic coding sequence
  source 1..1638: mol_type = other DNA
atggccgagcccagcggcagccccgtgcacgtgcagctgccccagcaggccgcccccgtgaccgccgccgccgccgccgcccccgccgccgccaccgccgcccccgcccccgccgcccccgccgcccccgcccccgcccccgcccccgccgcccaggccgtgggctggcccatctgcagagacgcctacgagctgcaggaggtgatcggcagcggcgccaccgccgtggtgcaggccgccctgtgcaagcccagacaggagagagtggccatcaagagaatcaacctggagaagtgccagaccagcatggacgagctgctgaaggagatccaggccatgagccagtgcagccaccccaacgtggtgacctactacaccagcttcgtggtgaaggacgagctgtggctggtgatgaagctgctgagcggcggcagcatgctggacatcatcaagtacatcgtgaacagaggcgagcacaagaacggcgtgctggaggaggccatcatcgccaccatcctgaaggaggtgctggagggcctggactacctgcacagaaacggccagatccacagagacctgaaggccggcaacatcctgctgggcgaggacggcagcgtgcagatcgccgacttcggcgtgagcgccttcctggccaccggcggcgacgtgaccagaaacaaggtgagaaagaccttcgtgggcaccccctgctggatggcccccgaggtgatggagcaggtgagaggctacgacttcaaggccgacatgtggagcttcggcatcaccgccatcgagctggccaccggcgccgccccctaccacaagtacccccccatgaaggtgctgatgctgaccctgcagaacgacccccccaccctggagaccggcgtggaggacaaggagatgatgaagaagtacggcaagagcttcagaaagctgctgagcctgtgcctgcagaaggaccccagcaagagacccaccgccgccgagctgctgaagtgcaagttcttccagaaggccaagaacagagagtacctgatcgagaagctgctgaccagaacccccgacatcgcccagagagccaagaaggtgagaagagtgcccggcagcagcggccacctgcacaagaccgaggacggcgactgggagtggagcgacgacgagatggacgagaagagcgaggagggcaaggccgccttcagccaggagaagagcagaagagtgaaggaggagaaccccgagatcgccgtgagcgccagcaccatccccgagcagatccagagcctgagcgtgcacgacagccagggcccccccaacgccaacgaggactacagagaggccagcagctgcgccgtgaacctggtgctgagactgagaaacagcagaaaggagctgaacgacatcagattcgagttcacccccggcagagacaccgccgacggcgtgagccaggagctgttcagcgccggcctggtggacggccacgacgtggtgatcgtggccgccaacctgcagaagatcgtggacgaccccaaggccctgaagaccctgaccttcaagctggccagcggctgcgacggcagcgagatccccgacgaggtgaagctgatcggcttcgcccagctgagcgtgagctag

SEQ ID NO: 98459 - DNA, 2715 bp, synthetic construct
  misc_feature 1..2715: note = Description of Artificial Sequence: Synthetic coding sequence
  source 1..2715: mol_type = other DNA
atggacgccggcttcttcagaggcaccagcgccgagcaggacaacagattcagcaacaagcagaagaagctgctgaagcagctgaagttcgccgagtgcctggagaagaaggtggacatgagcaaggtgaacctggaggtgatcaagccctggatcaccaagagagtgaccgagatcctgggcttcgaggacgacgtggtgatcgagttcatcttcaaccagctggaggtgaagaaccccgacagcaagatgatgcagatcaacctgaccggcttcctgaacggcaagaacgccagagagttcatgggcgagctgtggcccctgctgctgagcgcccaggagaacatcgccggcatccccagcgccttcctggagctgaagaaggaggagatcaagcagagacagatcgagcaggagaagctggccagcatgaagaagcaggacgaggacaaggacaagagagacaaggaggagaaggagagcagcagagagaagagagagagaagcagaagccccagaagaagaaagagcagaagccccagccccagaagaagaagcagccccgtgagaagagagagaaagagaagccacagcagaagccccagacacagaaccaagagcagaagccccagccccgcccccgagaagaaggagaagacccccgagctgcccgagcccagcgtgaaggtgaaggagcccagcgtgcaggaggccaccagcaccagcgacatcctgaaggtgcccaagcccgagcccatccccgagcccaaggagcccagccccgagaagaacagcaagaaggagaaggagaaggagaagaccagacccagaagcagaagcagaagcaagagcagaagcagaaccagaagcagaagccccagccacaccagacccagaagaagacacagaagcagaagcagaagctacagccccagaagaagacccagccccagaagaagacccagccccagaagaagaaccccccccagaagaatgccccccccccccagacacagaagaagcagaagccccgtgagaagaagaagaagaagcagcgccagcctgagcggcagcagcagcagcagcagcagcagcagaagcagaagcccccccaagaagccccccaagagaaccagcagcccccccagaaagaccagaagactgagccccagcgccagcccccccagaagaagacacagacccagcccccccgccacccccccccccaagaccagacacagccccaccccccagcagagcaacagaaccagaaagagcagagtgagcgtgagccccggcagaaccagcggcaaggtgaccaagcacaagggcaccgagaagagagagagccccagccccgcccccaagcccagaaaggtggagctgagcgagagcgaggaggacaagggcggcaagatggccgccgccgacagcgtgcagcagagaagacagtacagaagacagaaccagcagagcagcagcgacagcggcagcagcagcagcagcgaggacgagagacccaagagaagccacgtgaagaacggcgaggtgggcagaagaagaagacacagccccagcagaagcgccagccccagccccagaaagagacagaaggagaccagccccagaggcagaagaagaagaagccccagccccccccccaccagaagaagaagaagccccagccccgcccccccccccagaagaagaagaacccccacccccccccccagaagaagaacccccagccccccccccagaagaagaagccccagccccagaagatacagcccccccatccagagaagatacagccccagccccccccccaagagaagaaccgccagccccccccccccccccaagagaagagccagccccagccccccccccaagagaagagtgagccacagccccccccccaagcagagaagcagccccgtgaccaagagaagaagccccagcctgagcagcaagcacagaaagggcagcagccccagcagaagcaccagagaggccagaagcccccagcccaacaagagacacagccccagccccagacccagagccccccagaccagcagcagccccccccccgtgagaagaggcgccagcagcagcccccagagaagacagagccccagccccagcaccagacccatcagaagagtgagcagaacccccgagcccaagaagatcaagaaggccgccagccccagcccccagagcgtgagaagagtgagcagcagcagaagcgtgagcggcagccccgagcccgccgccaagaagccccccgccccccccagccccgtgcagagccagagccccagcaccaactggagccccgccgtgcccgtgaagaaggccaagagccccacccccagccccagcccccccagaaacagcgaccaggagggcggcggcaagaagaagaagaagaagaaggacaagaagcacaagaaggacaagaagcacaagaagcacaagaagcacaagaaggagaaggccgtggccgccgccgccgccgccgccgtgacccccgccgccatcgccgccgccaccaccaccctggcccaggaggagcccgtggccgcccccgagcccaagaaggagaccgagagcgaggccgaggacaacctggacgacctggagaagcacctgagagagaaggccctgagaagcatgagaaaggcccaggtgagcccccagagctag

SEQ ID NO: 98460 - DNA, 2742 bp, synthetic construct
  misc_feature 1..2742: note = Description of Artificial Sequence: Synthetic coding sequence
  source 1..2742: mol_type = other DNA
atggacgccggcttcttcagaggcaccagcgccgagcaggacaacagattcagcaacaagcagaagaagctgctgaagcagctgaagttcgccgagtgcctggagaagaaggtggacatgagcaaggtgaacctggaggtgatcaagccctggatcaccaagagagtgaccgagatcctgggcttcgaggacgacgtggtgatcgagttcatcttcaaccagctggaggtgaagaaccccgacagcaagatgatgcagatcaacctgaccggcttcctgaacggcaagaacgccagagagttcatgggcgagctgtggcccctgctgctgagcgcccaggagaacatcgccggcatccccagcgccttcctggagctgaagaaggaggagatcaagcagagacagatcgagcaggagaagctggccagcatgaagaagcaggacgaggacaaggacaagagagacaaggaggagaaggagagcagcagagagaagagagagagaagcagaagccccagaagaagaaagagcagaagccccagccccagaagaagaagcagccccgtgagaagagagagaaagagaagccacagcagaagccccagacacagaaccaagagcagaagccccagccccgcccccgagaagaaggagaagacccccgagctgcccgagcccagcgtgaaggtgaaggagcccagcgtgcaggaggccaccagcaccagcgacatcctgaaggtgcccaagcccgagcccatccccgagcccaaggagcccagccccgagaagaacagcaagaaggagaaggagaaggagaagaccagacccagaagcagaagcagaagcaagagcagaagcagaaccagaagcagaagccccagccacaccagacccagaagaagacacagaagcagaagcagaagaagacccagccccagaagaagacccagccccagaagaagaaccccccccagaagaatgccccccccccccagacacagaagaagcagaagccccgtgagaagaagaagaagaagcagcgccagcctgagcggcagcagcagcagcagcagcagcagcagaagcagaagcccccccaagaagccccccaagagaaccagcagcccccccagaaagaccagaagactgagccccagcgccagcccccccagaagaagacacagacccagcccccccgccacccccccccccaagaccagacacagccccaccccccagcagagcaacagaaccagaaagagcagagtgagcgtgagccccggcagaaccagcggcaaggtgaccaagcacaagggcaccgagaagagagagagccccagccccgcccccaagcccagaaaggtggagctgagcgagagcgaggaggacaagggcggcaagatggccgccgccgacagcgtgcagcagagaagacagtacagaagacagaaccagcagagcagcagcgacagcggcagcagcagcagcagcgaggacgagagacccaagagaagccacgtgaagaacggcgaggtgggcagaagaagaagacacagccccagcagaagcgccagccccagccccagaaagagacagaaggagaccagccccagaatgcagatgggcaagagatggcagagccccgtgaccaagagcggcagaagaagaagaagccccagccccccccccaccagaagaagaagaagccccagccccgcccccccccccagaagaagaagaacccccacccccccccccagaagaagaacccccagccccccccccagaagaagaagccccagccccagaagatacagcccccccatccagagaagatacagccccagccccccccccaagagaagaaccgccagccccccccccccccccaagagaagagccagccccagccccccccccaagagaagagtgagccacagccccccccccaagcagagaagcagccccgtgaccaagagaagaagccccagcctgagcagcaagcacagaaagggcagcagccccagcagaagcaccagagaggccagaagcccccagcccaacaagagacacagccccagccccagacccagagccccccagaccagcagcagccccccccccgtgagaagaggcgccagcagcagcccccagagaagacagagccccagccccagcaccagacccatcagaagagtgagcagaacccccgagcccaagaagatcaagaaggccgccagccccagcccccagagcgtgagaagagtgagcagcagcagaagcgtgagcggcagccccgagcccgccgccaagaagccccccgccccccccagccccgtgcagagccagagccccagcaccaactggagccccgccgtgcccgtgaagaaggccaagagccccacccccagccccagcccccccagaaacagcgaccaggagggcggcggcaagaagaagaagaagaagaaggacaagaagcacaagaaggacaagaagcacaagaagcacaagaagcacaagaaggagaaggccgtggccgccgccgccgccgccgccgtgacccccgccgccatcgccgccgccaccaccaccctggcccaggaggagcccgtggccgcccccgagcccaagaaggagaccgagagcgaggccgaggacaacctggacgacctggagaagcacctgagagagaaggccctgagaagcatgagaaaggcccaggtgagcccccagagctag

SEQ ID NO: 98461 - DNA, 2751 bp, synthetic construct
  misc_feature 1..2751: note = Description of Artificial Sequence: Synthetic coding sequence
  source 1..2751: mol_type = other DNA
atggacgccggcttcttcagaggcaccagcgccgagcaggacaacagattcagcaacaagcagaagaagctgctgaagcagctgaagttcgccgagtgcctggagaagaaggtggacatgagcaaggtgaacctggaggtgatcaagccctggatcaccaagagagtgaccgagatcctgggcttcgaggacgacgtggtgatcgagttcatcttcaaccagctggaggtgaagaaccccgacagcaagatgatgcagatcaacctgaccggcttcctgaacggcaagaacgccagagagttcatgggcgagctgtggcccctgctgctgagcgcccaggagaacatcgccggcatccccagcgccttcctggagctgaagaaggaggagatcaagcagagacagatcgagcaggagaagctggccagcatgaagaagcaggacgaggacaaggacaagagagacaaggaggagaaggagagcagcagagagaagagagagagaagcagaagccccagaagaagaaagagcagaagccccagccccagaagaagaagcagccccgtgagaagagagagaaagagaagccacagcagaagccccagacacagaaccaagagcagaagccccagccccgcccccgagaagaaggagaagacccccgagctgcccgagcccagcgtgaaggtgaaggagcccagcgtgcaggaggccaccagcaccagcgacatcctgaaggtgcccaagcccgagcccatccccgagcccaaggagcccagccccgagaagaacagcaagaaggagaaggagaaggagaagaccagacccagaagcagaagcagaagcaagagcagaagcagaaccagaagcagaagccccagccacaccagacccagaagaagacacagaagcagaagcagaagctacagccccagaagaagacccagccccagaagaagacccagccccagaagaagaaccccccccagaagaatgccccccccccccagacacagaagaagcagaagccccgtgagaagaagaagaagaagcagcgccagcctgagcggcagcagcagcagcagcagcagcagcagaagcagaagcccccccaagaagccccccaagagaaccagcagcccccccagaaagaccagaagactgagccccagcgccagcccccccagaagaagacacagacccagcccccccgccacccccccccccaagaccagacacagccccaccccccagcagagcaacagaaccagaaagagcagagtgagcgtgagccccggcagaaccagcgtgaccaagcacaagggcaccgagaagagagagagccccagccccgcccccaagcccagaaaggtggagctgagcgagagcgaggaggacaagggcggcaagatggccgccgccgacagcgtgcagcagagaagacagtacagaagacagaaccagcagagcagcagcgacagcggcagcagcagcagcagcgaggacgagagacccaagagaagccacgtgaagaacggcgaggtgggcagaagaagaagacacagccccagcagaagcgccagccccagccccagaaagagacagaaggagaccagccccagaatgcagatgggcaagagatggcagagccccgtgaccaagagcggcagaagaagaagaagccccagccccccccccaccagaagaagaagaagccccagccccgcccccccccccagaagaagaagaacccccacccccccccccagaagaagaacccccagccccccccccagaagaagaagccccagccccagaagatacagcccccccatccagagaagatacagccccagccccccccccaagagaagaaccgccagccccccccccccccccaagagaagagccagccccagccccccccccaagagaagagtgagccacagccccccccccaagcagagaagcagccccgtgaccaagagaagaagccccagcctgagcagcaagcacagaaagggcagcagccccagcagaagcaccagagaggccagaagcccccagcccaacaagagacacagccccagccccagacccagagccccccagaccagcagcagccccccccccgtgagaagaggcgccagcagcagcccccagagaagacagagccccagccccagcaccagacccatcagaagagtgagcagaacccccgagcccaagaagatcaagaaggccgccagccccagcccccagagcgtgagaagagtgagcagcagcagaagcgtgagcggcagccccgagcccgccgccaagaagccccccgccccccccagccccgtgcagagccagagccccagcaccaactggagccccgccgtgcccgtgaagaaggccaagagccccacccccagccccagcccccccagaaacagcgaccaggagggcggcggcaagaagaagaagaagaagaaggacaagaagcacaagaaggacaagaagcacaagaagcacaagaagcacaagaaggagaaggccgtggccgccgccgccgccgccgccgtgacccccgccgccatcgccgccgccaccaccaccctggcccaggaggagcccgtggccgcccccgagcccaagaaggagaccgagagcgaggccgaggacaacctggacgacctggagaagcacctgagagagaaggccctgagaagcatgagaaaggcccaggtgagcccccagagctag

SEQ ID NO: 98462 - DNA, 957 bp, synthetic construct
  misc_feature 1..957: note = Description of Artificial Sequence: Synthetic coding sequence
  source 1..957: mol_type = other DNA
atgggcgagctgtggcccctgctgctgagcgcccaggagaacatcgccggcatccccagcgccttcctggagctgaagaaggaggagatcaagcagagacagatcgagcaggagaagctggccagcatgaagaagcaggacgaggacaaggacaagagagacaaggaggagaaggagagcagcagagagaagagagagagaagcagaagccccagaagaaccaagagcagaagccccagccccgcccccgagaagaaggagaagacccccgagctgcccgagcccagcgtgaaggtgaaggagcccagcgtgcaggaggccaccagcaccagcgacatcctgaaggtgcccaagcccgagcccatccccgagcccaaggagcccagccccgagaagaacagcaagaaggagaaggagaaggagaagaccagacccagaagcagaagcagaagcaagagcagaagcagaaccagaagcagaagccccagccacaccagacccagaagaagacacagaagcagaagcagaagctacagccccagaagaagacccagccccagaagaagacccagccccagaagaagaaccccccccagaagaatgccccccccccccagacacagaagaagcagaagccccgtgagaagattcagcggcatcctgccccccaaggtgaacagcgccgaggaggacgtgagacagcacccctgcctgggcgtggcccaccaccccctgcacctggtgcacggccaccaccagagaagcctgcccagaggccaccccgcccccctgggcaagctggtgggctacctgctgcagcaggtgctgcagggcgagggcaccggccaccacctgctgcagctgcaccaccccaagctgggcatccccctgcaccccagcagccagaccgtgcaggagaaggtggtgttcctgtgcctgcagggcgagctgcagtag

SEQ ID NO: 98463 - DNA, 8259 bp, synthetic construct
  misc_feature 1..8259: note = Description of Artificial Sequence: Synthetic coding sequence
  source 1..8259: mol_type = other DNA
atgtacaacggcatcggcctgcccacccccagaggcagcggcaccaacggctacgtgcagagaaacctgagcctggtgagaggcagaagaggcgagagacccgactacaagggcgaggaggagctgagaagactggaggccgccctggtgaagagacccaaccccgacatcctggaccacgagagaaagagaagagtggagctgagatgcctggagctggaggagatgatggaggagcagggctacgaggagcagcagatccaggagaaggtggccaccttcagactgatgctgctggagaaggacgtgaaccccggcggcaaggaggagacccccggccagagacccgccgtgaccgagacccaccagctggccgagctgaacgagaagaagaacgagagactgagagccgccttcggcatcagcgacagctacgtggacggcagcagcttcgacccccagagaagagccagagaggccaagcagcccgcccccgagccccccaagccctacagcctggtgagagagagcagcagcagcagaagccccacccccaagcagaagaagaagaagaagaagaaggacagaggcagaagaagcgagagcagcagccccagaagagagagaaagaagagcagcaagaagaagaagcacagaagcgagagcgagagcaagaagagaaagcacagaagccccacccccaagagcaagagaaagagcaaggacaagaagagaaagagaagcagaagcaccacccccgcccccaagagcagaagagcccacagaagcaccagcgccgacagcgccagcagcagcgacaccagcagaagcagaagcagaagcgccgccgccaagacccacaccaccgccctggccggcagaagccccagccccgccagcggcagaagaggcgagggcgacgcccccttcagcgagcccggcaccaccagcacccagagacccagcagccccgagaccgccaccaagcagcccagcagcccctacgaggacaaggacaaggacaagaaggagaagagcgccaccagacccagccccagccccgagagaagcagcaccggccccgagccccccgcccccacccccctgctggccgagagacacggcggcagcccccagcccctggccaccacccccctgagccaggagcccgtgaacccccccagcgaggccagccccaccagagacagaagcccccccaagagccccgagaagctgccccagagcagcagcagcgagagcagcccccccagcccccagcccaccaaggtgagcagacacgccagcagcagccccgagagccccaagcccgcccccgcccccggcagccacagagagatcagcagcagccccaccagcaagaacagaagccacggcagagccaagagagacaagagccacagccacacccccagcagaagaatgggcagaagcagaagccccgccaccgccaagagaggcagaagcagaagcagaacccccaccaagagaggccacagcagaagcagaagcccccagtggagaagaagcagaagcgcccagagatggggcagaagcagaagcccccagagaagaggcagaagcagaagcccccagagacccggctggagcagaagcagaaacacccagagaagaggcagaagcagaagcgccagaagaggcagaagccacagcagaagccccgccaccagaggcagaagcagaagcagaacccccgccagaagaggcagaagcagaagcagaacccccgccagaagaagaagcagaagcagaacccccaccagaagaagaagcagaagcagaacccccgccagaagaggcagaagcagaagcagaacccccgccagaagaagaagcagaaccagaagccccgtgagaagaagaagcagaagcagaagccccgccagaagaagcggcagaagcagaagcagaacccccgccagaagaggcagaagcagaagcagaacccccgccagaagaggcagaagcagaagcagaacccccgccagaagaagcggcagaagcagaagcagaacccccgccagaagaggcagaagcagaagcagaacccccagaagaggcagaagcagaagcagaagcctggtgagaagaggcagaagccacagcagaaccccccagagaagaggcagaagcggcagcagcagcgagagaaagaacaagagcagaaccagccagagaagaagcagaagcaacagcagccccgagatgaagaagagcagaatcagcagcagaagaagcagaagcctgagcagccccagaagcaaggccaagagcagactgagcctgagaagaagcctgagcggcagcagcccctgccccaagcagaagagccagaccccccccagaagaagcagaagcggcagcagccagcccaaggccaagagcagaaccccccccagaagaagcagaagcagcagcagccccccccccaagcagaagagcaagacccccagcagacagagccacagcagcagcagcccccaccccaaggtgaagagcggcaccccccccagacagggcagcatcaccagcccccaggccaacgagcagagcgtgaccccccagagaagaagctgcttcgagagcagccccgaccccgagctgaagagcagaacccccagcagacacagctgcagcggcagcagcccccccagagtgaagagcagcaccccccccagacagagccccagcagaagcagcagcccccagcccaaggtgaaggccatcatcagccccagacagagaagccacagcggcagcagcagccccagccccagcagagtgaccagcagaaccacccccagaagaagcagaagcgtgagcccctgcagcaacgtggagagcagactgctgcccagatacagccacagcggcagcagcagccccgacaccaaggtgaagcccgagaccccccccagacagagccacagcggcagcatcagcccctaccccaaggtgaaggcccagaccccccccggccccagcctgagcggcagcaagagcccctgcccccaggagaagagcaaggacagcctggtgcagagctgccccggcagcctgagcctgtgcgccggcgtgaagagcagcaccccccccggcgagagctacttcggcgtgagcagcctgcagctgaagggccagagccagaccagccccgaccacagaagcgacaccagcagccccgaggtgagacagagccacagcgagagccccagcctgcagagcaagagccagaccagccccaagggcggcagaagcagaagcagcagccccgtgaccgagctggccagcagaagccccatcagacaggacagaggcgagttcagcgccagccccatgctgaagagcggcatgagccccgagcagagcagattccagagcgacagcagcagctaccccaccgtggacagcaacagcctgctgggccagagcagactggagaccgccgagagcaaggagaagatggccctgcccccccaggaggacgccaccgccagcccccccagacagaaggacaagttcagccccttccccgtgcaggacagacccgagagcagcctggtgttcaaggacaccctgagaaccccccccagagagagaagcggcgccggcagcagccccgagaccaaggagcagaacagcgccctgcccaccagcagccaggacgaggagctgatggaggtggtggagaagagcgaggagcccgccggccagatcctgagccacctgagcagcgagctgaaggagatgagcaccagcaacttcgagagcagccccgaggtggaggagagacccgccgtgagcctgaccctggaccagagccagagccaggccagcctggaggccgtggaggtgcccagcatggccagcagctggggcggcccccacttcagccccgagcacaaggagctgagcaacagccccctgagagagaacagcttcggcagccccctggagttcagaaacagcggccccctgggcaccgagatgaacaccggcttcagcagcgaggtgaaggaggacctgaacggccccttcctgaaccagctggagaccgaccccagcctggacatgaaggagcagagcaccagaagcagcggccacagcagcagcgagctgagccccgacgccgtggagaaggccggcatgagcagcaaccagagcatcagcagccccgtgctggacgccgtgcccagaacccccagcagagagagaagcagcagcgccagcagccccgagatgaaggacggcctgcccagaacccccagcagaagaagcagaagcggcagcagccccggcctgagagacggcagcggcacccccagcagacacagcctgagcggcagcagccccggcatgaaggacatccccagaacccccagcagaggcagaagcgagtgcgacagcagccccgagcccaaggccctgccccagacccccagacccagaagcagaagccccagcagccccgagctgaacaacaagtgcctgaccccccagagagagagaagcggcagcgagagcagcgtggaccagaagaccgtggccagaacccccctgggccagagaagcagaagcggcagcagccaggagctggacgtgaagcccagcgccagcccccaggagagaagcgagagcgacagcagccccgacagcaaggccaagaccagaacccccctgagacagagaagcagaagcggcagcagccccgaggtggacagcaagagcagactgagccccagaagaagcagaagcggcagcagccccgaggtgaaggacaagcccagagccgcccccagagcccagagcggcagcgacagcagccccgagcccaaggcccccgcccccagagccctgcccagaagaagcagaagcggcagcagcagcaagggcagaggccccagccccgagggcagcagcagcaccgagagcagccccgagcacccccccaagagcagaaccgccagaagaggcagcagaagcagccccgagcccaagaccaagagcagaaccccccccagaagaagaagcagcagaagcagccccgagctgaccagaaaggccagactgagcagaagaagcagaagcgccagcagcagccccgagaccagaagcagaaccccccccagacacagaagaagccccagcgtgagcagccccgagcccgccgagaagagcagaagcagcagaagaagaagaagcgccagcagccccagaaccaagaccaccagcagaagaggcagaagccccagccccaagcccagaggcctgcagagaagcagaagcagaagcagaagagagaagaccagaaccaccagaagaagagacagaagcggcagcagccagagcaccagcagaagaagacagagaagcagaagcagaagcagagtgaccagaagaagaagaggcggcagcggctaccacagcagaagccccgccagacaggagagcagcagaaccagcagcagaagaagaagaggcagaagcagaaccccccccaccagcagaaagagaagcagaagcagaaccagccccgccccctggaagagaagcagaagcagagccagccccgccacccacagaagaagcagaagcagaacccccctgatcagcagaagaagaagcagaagcagaaccagccccgtgagcagaagaagaagcagaagcagaaccagcgtgaccagaagaagaagcagaagcagagccagccccgtgagcagaagaagaagcagaagcagaaccccccccgtgaccagaagaagaagcagaagcagaacccccaccaccagaagaagaagcagaagcagaaccccccccgtgaccagaagaagaagcagaagcagaaccccccccgtgaccagaagaagaagcagaagcagaaccagccccatcaccagaagaagaagcagaagcagaaccagccccgtgaccagaagaagaagcagaagcagaaccagccccgtgaccagaagaagaagcagaagcagaaccagccccgtgaccagaagaagaagcagaagcagaaccccccccgccatcagaagaagaagcagaagcagaacccccctgctgcccagaaagagaagcagaagcagaagccccctggccatcagaagaagaagcagaagcagaacccccagaaccgccagaggcaagagaagcctgaccagaagcccccccgccatcagaagaagaagcgccagcggcagcagcagcgacagaagcagaagcgccaccccccccgccaccagaaaccacagcggcagcagaaccccccccgtggccctgaacagcagcagaatgagctgcttcagcagacccagcatgagccccacccccctggacagatgcagaagccccggcatgctggagcccctgggcagcagcagaacccccatgagcgtgctgcagcaggccggcggcagcatgatggacggccccggccccagaatccccgaccaccagagaaccagcgtgcccgagaaccacgcccagagcagaatcgccctggccctgaccgccatcagcctgggcaccgccagacccccccccagcatgagcgccgccggcctggccgccagaatgagccaggtgcccgcccccgtgcccctgatgagcctgagaaccgcccccgccgccaacctggccagcagaatccccgccgccagcgccgccgccatgaacctggccagcgccagaacccccgccatccccaccgccgtgaacctggccgacagcagaacccccgccgccgccgccgccatgaacctggccagccccagaaccgccgtggcccccagcgccgtgaacctggccgaccccagaacccccaccgcccccgccgtgaacctggccggcgccagaacccccgccgccctggccgccctgagcctgaccggcagcggcaccccccccaccgccgccaactaccccagcagcagcagaaccccccaggcccccgccagcgccaacctggtgggccccagaagcgcccacgccaccgcccccgtgaacatcgccggcagcagaaccgccgccgccctggcccccgccagcctgaccagcgccagaatggcccccgccctgagcggcgccaacctgaccagccccagagtgcccctgagcgcctacgagagagtgagcggcagaaccagcccccccctgctggacagagccagaagcagaaccccccccagcgcccccagccagagcagaatgaccagcgagagagcccccagccccagcagcagaatgggccaggcccccagccagagcctgctgccccccgcccaggaccagcccagaagccccgtgcccagcgccttcagcgaccagagcagatgcctgatcgcccagaccacccccgtggccggcagccagagcctgagcagcggcgccgtggccaccaccaccagcagcgccggcgaccacaacggcatgctgagcgtgcccgcccccggcgtgccccacagcgacgtgggcgagccccccgccagcaccggcgcccagcagcccagcgccctggccgccctgcagcccgccaaggagagaagaagcagcagcagcagcagcagcagcagcagcagcagcagcagcagcagcagcagcagcagcagcagcagcagcagcggcagcagcagcagcgacagcgagggcagcagcctgcccgtgcagcccgaggtggccctgaagagagtgcccagccccacccccgcccccaaggaggccgtgagagagggcagaccccccgagcccacccccgccaagagaaagagaagaagcagcagcagcagcagcagcagcagcagcagcagcagcagcagcagcagcagcagcagcagcagcagcagcagcagcagcagcagcagcagcagcagcagcagcagcagcagcagcagcagcagccccagccccgccaagcccggcccccaggccctgcccaagcccgccagccccaagaagcccccccccggcgagagaagaagcagaagccccagaaagcccatcgacagcctgagagacagcagaagcctgagctacagccccgtggagagaagaagacccagcccccagcccagccccagagaccagcagagcagcagcagcgagagaggcagcagaagaggccagagaggcgacagcagaagccccagccacaagagaagaagagagacccccagccccagacccatgagacacagaagcagcagaagcccctag

SEQ ID NO: 98464 - DNA, 702 bp, synthetic construct
  misc_feature 1..702: note = Description of Artificial Sequence: Synthetic coding sequence
  source 1..702: mol_type = other DNA
atgatcagcttccccagcctgcagagaaccgagctggaggagatggacctgatcctgcagcaggagggctggcagctggacctgaagagaaacagcctgggctggaaggacctgcagagaagcagccaccccagcccctgcctgcaggccggcagacccctgccccagcccacctgcacccacagaggcctgcccaagctgagactgagcgaggagggcgactaccccgccagcgccagcacccccgagcccagaggcctgatcccccccagcggcaccttcctgagattcaacctggaccccctgtgctgcggcccccagcccgtggccagcgtgagcagaggctgggtgagcagccaccactgcagccccgagaactgctggctgacctggctgggcgagctgcccgcccccttcagcggcacccccccccccaccgccgtgccccccggccagggcagcagaagcagaagccccagaaagcccatcgacagcctgagagacagcagaagcctgagctacagccccgtggagagaagaagacccagcccccagcccagccccagagaccagcagagcagcagcagcgagagaggcagcagaagaggccagagaggcgacagcagaagccccagccacaagagaagaagagagacccccagccccagacccatgagacacagaagcagcagaagcccctag

SEQ ID NO: 98465 - DNA, 7005 bp, synthetic construct
  misc_feature 1..7005: note = Description of Artificial Sequence: Synthetic coding sequence
  source 1..7005: mol_type = other DNA
atgtacaacggcatcggcctgcccacccccagaggcagcggcaccaacggctacgtgcagagaaacctgagcctggtgagaggcagaagaggcgagagacccgactacaagggcgaggaggagctgagaagactggaggccgccctggtgaagagacccaaccccgacatcctggaccacgagagaaagagaagagtggagctgagatgcctggagctggaggagatgatggaggagcagggctacgaggagcagcagatccaggagaaggtggccaccttcagactgatgctgctggagaaggacgtgaaccccggcggcaaggaggagacccccggccagagacccgccgtgaccgagacccaccagctggccgagctgaacgagaagaagaacgagagactgagagccgccttcggcatcagcgacagctacgtggacggcagcagcttcgacccccagagaagagccagagaggccaagcagcccgcccccgagccccccaagccctacagcctggtgagagagagcagcagcagcagaagccccacccccaagcagaagaagaagaagaagaagaaggacagaggcagaagaagcgagagcagcagccccagaagagagagaaagaagagcagcaagaagaagaagcacagaagcgagagcgagagcaagaagagaaagcacagaagccccacccccaagagcaagagaaagagcaaggacaagaagagaaagagaagcagaagcaccacccccgcccccaagagcagaagagcccacagaagcaccagcgccgacagcgccagcagcagcgacaccagcagaagcagaagcagaagcgccgccgccaagacccacaccaccgccctggccggcagaagccccagccccgccagcggcagaagaggcgagggcgacgcccccttcagcgagcccggcaccaccagcacccagagacccagcagccccgagaccgccaccaagcagcccagcagcccctacgaggacaaggacaaggacaagaaggagaagagcgccaccagacccagccccagccccgagagaagcagcaccggccccgagccccccgcccccacccccctgctggccgagagacacggcggcagcccccagcccctggccaccacccccctgagccaggagcccgtgaacccccccagcgaggccagccccaccagagacagaagcccccccaagagccccgagaagctgccccagagcagcagcagcgagagcagcccccccagcccccagcccaccaaggtgagcagacacgccagcagcagccccgagagccccaagcccgcccccgcccccggcagccacagagagatcagcagcagccccaccagcaagaacagaagccacggcagagccaagagagacaagagccacagccacacccccagcagaagaatgggcagaagcagaagccccgccaccgccaagagaggcagaagcagaagcagaacccccaccaagagaggccacagcagaagcagaagcccccagtggagaagaagcagaagcgcccagagatggggcagaagcagaagcccccagagaagaggcagaagcagaagcccccagagacccggctggagcagaagcagaaacacccagagaagaggcagaagcagaagcgccagaagaggcagaagccacagcagaagccccgccaccagaggcagaagcagaagcagaacccccgccagaagaggcagaagcagaagcagaacccccgccagaagaagaagcagaagcagaacccccaccagaagaagaagcagaagcagaacccccgccagaagaggcagaagcagaagcagaacccccgccagaagaagaagcagaaccagaagccccgtgagaagaagaagcagaagcagaagccccgccagaagaagcggcagaagcagaagcagaacccccgccagaagaggcagaagcagaagcagaacccccgccagaagaggcagaagcagaagcagaacccccgccagaagaagcggcagaagcagaagcagaacccccgccagaagaggcagaagcagaagcagaacccccagaagaggcagaagcagaagcagaagcctggtgagaagaggcagaagccacagcagaaccccccagagaagaggcagaagcggcagcagcagcgagagaaagaacaagagcagaaccagccagagaagaagcagaagcaacagcagccccgagatgaagaagagcagaatcagcagcagaagaagcagaagcctgagcagccccagaagcaaggccaagagcagactgagcctgagaagaagcctgagcggcagcagcccctgccccaagcagaagagccagaccccccccagaagaagcagaagcggcagcagccagcccaaggccaagagcagaaccccccccagaagaagcagaagcagcagcagccccccccccaagcagaagagcaagacccccagcagacagagccacagcagcagcagcccccaccccaaggtgaagagcggcaccccccccagacagggcagcatcaccagcccccaggccaacgagcagagcgtgaccccccagagaagaagctgcttcgagagcagccccgaccccgagctgaagagcagaacccccagcagacacagctgcagcggcagcagcccccccagagtgaagagcagcaccccccccagacagagccccagcagaagcagcagcccccagcccaaggtgaaggccatcatcagccccagacagagaagccacagcggcagcagcagccccagccccagcagagtgaccagcagaaccacccccagaagaagcagaagcgtgagcccctgcagcaacgtggagagcagactgctgcccagatacagccacagcggcagcagcagccccgacaccaaggtgaagcccgagaccccccccagacagagccacagcggcagcatcagcccctaccccaaggtgaaggcccagaccccccccggccccagcctgagcggcagcaagagcccctgcccccaggagaagagcaaggacagcctggtgcagagctgccccggcagcctgagcctgtgcgccggcgtgaagagcagcaccccccccggcgagagctacttcggcgtgagcagcctgcagctgaagggccagagccagaccagccccgaccacagaagcgacaccagcagccccgaggtgagacagagccacagcgagagccccagcctgcagagcaagagccagaccagccccaagggcggcagaagcagaagcagcagccccgtgaccgagctggccagcagaagccccatcagacaggacagaggcgagttcagcgccagccccatgctgaagagcggcatgagccccgagcagagcagattccagagcgacagcagcagctaccccaccgtggacagcaacagcctgctgggccagagcagactggagaccgccgagagcaaggagaagatggccctgcccccccaggaggacgccaccgccagcccccccagacagaaggacaagttcagccccttccccgtgcaggacagacccgagagcagcctggtgttcaaggacaccctgagaaccccccccagagagagaagcggcgccggcagcagccccgagaccaaggagcagaacagcgccctgcccaccagcagccaggacgaggagctgatggaggtggtggagaagagcgaggagcccgccggccagatcctgagccacctgagcagcgagctgaaggagatgagcaccagcaacttcgagagcagccccgaggtggaggagagacccgccgtgagcctgaccctggaccagagccagagccaggccagcctggaggccgtggaggtgcccagcatggccagcagctggggcggcccccacttcagccccgagcacaaggagctgagcaacagccccctgagagagaacagcttcggcagccccctggagttcagaaacagcggccccctgggcaccgagatgaacaccggcttcagcagcgaggtgaaggaggacctgaacggccccttcctgaaccagctggagaccgaccccagcctggacatgaaggagcagagcaccagaagcagcggccacagcagcagcgagctgagccccgacgccgtggagaaggccggcatgagcagcaaccagagcatcagcagccccgtgctggacgccgtgcccagaacccccagcagagagagaagcagcagcgccagcagccccgagatgaaggacggcctgcccagaacccccagcagaagaagcagaagcggcagcagccccggcctgagagacggcagcggcacccccagcagacacagcctgagcggcagcagccccggcatgaaggacatccccagaacccccagcagaggcagaagcgagtgcgacagcagccccgagcccaaggccctgccccagacccccagacccagaagcagaagccccagcagccccgagctgaacaacaagtgcctgaccccccagagagagagaagcggcagcgagagcagcgtggaccagaagaccgtggccagaacccccctgggccagagaagcagaagcggcagcagccaggagctggacgtgaagcccagcgccagcccccaggagagaagcgagagcgacagcagccccgacagcaaggccaagaccagaacccccctgagacagagaagcagaagcggcagcagccccgaggtggacagcaagagcagactgagccccagaagaagcagaagcggcagcagccccgaggtgaaggacaagcccagagccgcccccagagcccagagcggcagcgacagcagccccgagcccaaggcccccgcccccagagccctgcccagaagaagcagaagcggcagcagcagcaagggcagaggccccagccccgagggcagcagcagcaccgagagcagccccgagcacccccccaagagcagaaccgccagaagaggcagcagaagcagccccgagcccaagaccaagagcagaaccccccccagaagaagaagcagcagaagcagccccgagctgaccagaaaggccagactgagcagaagaagcagaagcgccagcagcagccccgagaccagaagcagaaccccccccagacacagaagaagccccagcgtgagcagccccgagcccgccgagaagagcagaagcagcagaagaagaagaagcgccagcagccccagaaccaagaccaccagcagaagaggcagaagccccagccccaagcccagaggcctgcagagaagcagaagcagaagcagaagagagaagaccagaaccaccagaagaagagacagaagcggcagcagccagagcaccagcagaagaagacagagaagcagaagcagaagcagagtgaccagaagaagaagaggcggcagcggctaccacagcagaagccccgccagacaggagagcagcagaaccagcagcagaagaagaagaggcagaagcagaaccccccccaccagcagaaagagaagcagaagcagaaccagccccgccccctggaagagaagcagaagcagagccagccccgccacccacagaagaagcagaagcagaacccccctgatcagcagaagaagaagcagaagcagaaccagccccgtgagcagaagaagaagcagaagcagaaccagcgtgaccagaagaagaagcagaagcagagccagccccgtgagcagaagaagaagcagaagcagaaccccccccgtgaccagaagaagaagcagaagcagaacccccaccaccagaagaagaagcagaagcagaaccccccccgtgaccagaagaagaagcagaagcagaaccccccccgtgaccagaagaagaagcagaagcagaaccagccccatcaccagaagaagaagcagaagcagaaccagccccgtgaccagaagaagaagcagaagcagaaccagccccgtgaccagaagaagaagcagaagcagaaccagccccgtgaccagaagaagaagcagaagcagaaccccccccgcccaggaccagcccagaagccccgtgcccagcgccttcagcgaccagagcagatgcctgatcgcccagaccacccccgtggccggcagccagagcctgagcagcggcgccgtggccaccaccaccagcagcgccggcgaccacaacggcatgctgagcgtgcccgcccccggcgtgccccacagcgacgtgggcgagccccccgccagcaccggcgcccagcagcccagcgccctggccgccctgcagcccgccaaggagagaagaagcagcagcagcagcagcagcagcagcagcagcagcagcagcagcagcagcagcagcagcagcagcagcagcagcggcagcagcagcagcgacagcgagggcagcagcctgcccgtgcagcccgaggtggccctgaagagagtgcccagccccacccccgcccccaaggaggccgtgagagagggcagaccccccgagcccacccccgccaagagaaagagaagaagcagcagcagcagcagcagcagcagcagcagcagcagcagcagcagcagcagcagcagcagcagcagcagcagcagcagcagcagcagcagcagcagcagcagcagcagcagcagcagcagcagccccagccccgccaagcccggcccccaggccctgcccaagcccgccagccccaagaagcccccccccggcgagagaagaagcagaagccccagaaagcccatcgacagcctgagagacagcagaagcctgagctacagccccgtggagagaagaagacccagcccccagcccagccccagagaccagcagagcagcagcagcgagagaggcagcagaagaggccagagaggcgacagcagaagccccagccacaagagaagaagagagacccccagccccagacccatgagacacagaagcagcagaagcccctag

SEQ ID NO: 98466 - DNA, 936 bp, synthetic construct
  misc_feature 1..936: note = Description of Artificial Sequence: Synthetic coding sequence
  source 1..936: mol_type = other DNA
atgctgctggagaaggacgtgaaccccggcggcaaggaggagacccccggccagagacccgccgtgaccgagacccaccagctggccgagctgaacgagaagaagaacgagagactgagagccgccttcggcatcagcgacagctacgtggacggcagcagcttcgacccccagagaagagccagagaggccaagcagcccgcccccgagccccccaagccctacagcctggtgagagagagcagcagcagcagaagccccacccccaagcagaagaagaagaagaagaagaaggacagaggcagaagaagcgagagcagcagccccagaagagagagaaagaagagcagcaagaagaagaagcacagaagcgagagcgagagcaagaagagaaagcacagaagccccacccccaagagcaagagaaagagcaaggacaagaagagaaagagaagcagaagcaccacccccgcccccaagagcagaagagcccacagaagcaccagcgccgacagcgccagcagcagcgacaccagcagaagcagaagcagaagcgccgccgccaagacccacaccaccgccctggccggcagaagccccagccccgccagcggcagaagaggcgagggcgacgcccccttcagcgagcccggcaccaccagcacccagagacccagcagccccgagaccgccaccaagcagcccagcagcccctacgaggacaaggacaaggacaagaaggagaagagcgccaccagacccagccccagccccgagagaagcagcaccggccccgagccccccgcccccacccccctgctggccgagagacacggcggcagcccccagcccctggccaccacccccctgagccaggagcccgtgaaccccagcccccagctgttcatgttcctgaagggcatcctggtgttctag

SEQ ID NO: 98467 - DNA, 2871 bp, synthetic construct
  misc_feature 1..2871: note = Description of Artificial Sequence: Synthetic coding sequence
  source 1..2871: mol_type = other DNA
agaagaagaagactgagaagagccgacagaagaggcgaggccgccgcccccggccccagagacagcggcgccagagccgccgccgccgccagacccctgcccctgggcggcggcggcagaagaagaagagtgagaggctacgaggagcagcagatccaggagaaggtggccaccttcagactgatgctgctggagaaggacgtgaaccccggcggcaaggaggagacccccggccagagacccgccgtgaccgagacccaccagctggccgagctgaacgagaagaagaacgagagactgagagccgccttcggcatcagcgacagctacgtggacggcagcagcttcgacccccagagaagagccagagaggccaagcagcccgcccccgagccccccaagccctacagcctggtgagagagagcagcagcagcagaagccccacccccaagcagaagaagaagaagaagaagaaggacagaggcagaagaagcgagagcagcagccccagaagagagagaaagaagagcagcaagaagaagaagcacagaagcgagagcgagagcaagaagagaaagcacagaagccccacccccaagagcaagagaaagagcaaggacaagaagagaaagagaagcagaagcaccacccccgcccccaagagcagaagagcccacagaagcaccagcgccgacagcgccagcagcagcgacaccagcagaagcagaagcagaagcgccgccgccaagacccacaccaccgccctggccggcagaagccccagccccgccagcggcagaagaggcgagggcgacgcccccttcagcgagcccggcaccaccagcacccagagacccagcagccccgagaccgccaccaagcagcccagcagcccctacgaggacaaggacaaggacaagaaggagaagagcgccaccagacccagccccagccccgagagaagcagcaccggccccgagccccccgcccccacccccctgctggccgagagacacggcggcagcccccagcccctggccaccacccccctgagccaggagcccgtgaacccccccagcgaggccagccccaccagagacagaagcccccccaagagccccgagaagctgccccagagcagcagcagcgagagcagcccccccagcccccagcccaccaaggtgagcagacacgccagcagcagccccgagagccccaagcccgcccccgcccccggcagccacagagagatcagcagcagccccaccagcaagaacagaagccacggcagagccaagagagacaagagccacagccacacccccagcagaagaatgggcagaagcagaagccccgccaccgccaagagaggcagaagcagaagcagaacccccaccaagagaggccacagcagaagcagaagcccccagtggagaagaagcagaagcgcccagagatggggcagaagcagaagcccccagagaagaggcagaagcagaagcccccagagacccggctggagcagaagcagaaacacccagagaagaggcagaagcagaagcgccagaagaggcagaagccacagcagaagccccgccaccagaggcagaagcagaagcagaacccccgccagaagaggcagaagcagaagcagaacccccgccagaagaagaagcagaagcagaacccccaccagaagaagaagcagaagcagaacccccgccagaagaggcagaagcagaagcagaacccccgccagaagaagaagcagaaccagaagccccgtgagaagaagaagcagaagcagaagccccgccagaagaagcggcagaagcagaagcagaacccccgccagaagaggcagaagcagaagcagaacccccgccagaagaggcagaagcagaagcagaacccccgccagaagaagcggcagaagcagaagcagaacccccgccagaagaggcagaagcagaagcagaacccccagaagaggcagaagcagaagcagaagcctggtgagaagaggcagaagccacagcagaaccccccagagaagaggcagaagcggcagcagcagcgagagaaagaacaagagcagaaccagccagagaagaagcagaagcaacagcagccccgagatgaagaagagcagaatcagcagcagaagaagcagaagcctgagcagccccagaagcaaggccaagagcagactgagcctgagaagaagcctgagcggcagcagcccctgccccaagcagaagagccagaccccccccagaagaagcagaagcggcagcagccagcccaaggccaagagcagaaccccccccagaagaagcagaagcagcagcagccccccccccaagcagaagagcaagacccccagcagacagagccacagcagcagcagcccccaccccaaggtgaagagcggcaccccccccagacagggcagcatcaccagcccccaggccaacgagcagagcgtgaccccccagagaagaagctgcttcgagagcagccccgaccccgagctgaagagcagaacccccagcagacacagctgcagcggcagcagcccccccagagtgaagagcagcaccccccccagacagagccccagcagaagcagcagcccccagcccaaggtgaaggccatcatcagccccagacagagaagccacagcggcagcagcagccccagccccagcagagtgaccagcagaaccacccccagaagaagcagaagcgtgagcccctgcagcaacgtggagagcagactgctgcccagatacagccacagcggcagcagcagccccgacaccaaggtgaagcccgagaccccccccagacagagccacagcggctag

SEQ ID NO: 98468 - DNA, 6036 bp, synthetic construct
  misc_feature 1..6036: note = Description of Artificial Sequence: Synthetic coding sequence
  source 1..6036: mol_type = other DNA
atgaagaagagcagaatcagcagcagaagaagcagaagcctgagcagccccagaagcaaggccaagagcagactgagcctgagaagaagcctgagcggcagcagcccctgccccaagcagaagagccagaccccccccagaagaagcagaagcggcagcagccagcccaaggccaagagcagaaccccccccagaagaagcagaagcagcagcagccccccccccaagcagaagagcaagacccccagcagacagagccacagcagcagcagcccccaccccaaggtgaagagcggcaccccccccagacagggcagcatcaccagcccccaggccaacgagcagagcgtgaccccccagagaagaagctgcttcgagagcagccccgaccccgagctgaagagcagaacccccagcagacacagctgcagcggcagcagcccccccagagtgaagagcagcaccccccccagacagagccccagcagaagcagcagcccccagcccaaggtgaaggccatcatcagccccagacagagaagccacagcggcagcagcagccccagccccagcagagtgaccagcagaaccacccccagaagaagcagaagcgtgagcccctgcagcaacgtggagagcagactgctgcccagatacagccacagcggcagcagcagccccgacaccaaggtgaagcccgagaccccccccagacagagccacagcggcagcatcagcccctaccccaaggtgaaggcccagaccccccccggccccagcctgagcggcagcaagagcccctgcccccaggagaagagcaaggacagcctggtgcagagctgccccggcagcctgagcctgtgcgccggcgtgaagagcagcaccccccccggcgagagctacttcggcgtgagcagcctgcagctgaagggccagagccagaccagccccgaccacagaagcgacaccagcagccccgaggtgagacagagccacagcgagagccccagcctgcagagcaagagccagaccagccccaagggcggcagaagcagaagcagcagccccgtgaccgagctggccagcagaagccccatcagacaggacagaggcgagttcagcgccagccccatgctgaagagcggcatgagccccgagcagagcagattccagagcgacagcagcagctaccccaccgtggacagcaacagcctgctgggccagagcagactggagaccgccgagagcaaggagaagatggccctgcccccccaggaggacgccaccgccagcccccccagacagaaggacaagttcagccccttccccgtgcaggacagacccgagagcagcctggtgttcaaggacaccctgagaaccccccccagagagagaagcggcgccggcagcagccccgagaccaaggagcagaacagcgccctgcccaccagcagccaggacgaggagctgatggaggtggtggagaagagcgaggagcccgccggccagatcctgagccacctgagcagcgagctgaaggagatgagcaccagcaacttcgagagcagccccgaggtggaggagagacccgccgtgagcctgaccctggaccagagccagagccaggccagcctggaggccgtggaggtgcccagcatggccagcagctggggcggcccccacttcagccccgagcacaaggagctgagcaacagccccctgagagagaacagcttcggcagccccctggagttcagaaacagcggccccctgggcaccgagatgaacaccggcttcagcagcgaggtgaaggaggacctgaacggccccttcctgaaccagctggagaccgaccccagcctggacatgaaggagcagagcaccagaagcagcggccacagcagcagcgagctgagccccgacgccgtggagaaggccggcatgagcagcaaccagagcatcagcagccccgtgctggacgccgtgcccagaacccccagcagagagagaagcagcagcgccagcagccccgagatgaaggacggcctgcccagaacccccagcagaagaagcagaagcggcagcagccccggcctgagagacggcagcggcacccccagcagacacagcctgagcggcagcagccccggcatgaaggacatccccagaacccccagcagaggcagaagcgagtgcgacagcagccccgagcccaaggccctgccccagacccccagacccagaagcagaagccccagcagccccgagctgaacaacaagtgcctgaccccccagagagagagaagcggcagcgagagcagcgtggaccagaagaccgtggccagaacccccctgggccagagaagcagaagcggcagcagccaggagctggacgtgaagcccagcgccagcccccaggagagaagcgagagcgacagcagccccgacagcaaggccaagaccagaacccccctgagacagagaagcagaagcggcagcagccccgaggtggacagcaagagcagactgagccccagaagaagcagaagcggcagcagccccgaggtgaaggacaagcccagagccgcccccagagcccagagcggcagcgacagcagccccgagcccaaggcccccgcccccagagccctgcccagaagaagcagaagcggcagcagcagcaagggcagaggccccagccccgagggcagcagcagcaccgagagcagccccgagcacccccccaagagcagaaccgccagaagaggcagcagaagcagccccgagcccaagaccaagagcagaaccccccccagaagaagaagcagcagaagcagccccgagctgaccagaaaggccagactgagcagaagaagcagaagcgccagcagcagccccgagaccagaagcagaaccccccccagacacagaagaagccccagcgtgagcagccccgagcccgccgagaagagcagaagcagcagaagaagaagaagcgccagcagccccagaaccaagaccaccagcagaagaggcagaagccccagccccaagcccagaggcctgcagagaagcagaagcagaagcagaagagagaagaccagaaccaccagaagaagagacagaagcggcagcagccagagcaccagcagaagaagacagagaagcagaagcagaagcagagtgaccagaagaagaagaggcggcagcggctaccacagcagaagccccgccagacaggagagcagcagaaccagcagcagaagaagaagaggcagaagcagaaccccccccaccagcagaaagagaagcagaagcagaaccagccccgccccctggaagagaagcagaagcagagccagccccgccacccacagaagaagcagaagcagaacccccctgatcagcagaagaagaagcagaagcagaaccagccccgtgagcagaagaagaagcagaagcagaaccagcgtgaccagaagaagaagcagaagcagagccagccccgtgagcagaagaagaagcagaagcagaaccccccccgtgaccagaagaagaagcagaagcagaacccccaccaccagaagaagaagcagaagcagaaccccccccgtgaccagaagaagaagcagaagcagaaccccccccgtgaccagaagaagaagcagaagcagaaccagccccatcaccagaagaagaagcagaagcagaaccagccccgtgaccagaagaagaagcagaagcagaaccagccccgtgaccagaagaagaagcagaagcagaaccagccccgtgaccagaagaagaagcagaagcagaaccccccccgccatcagaagaagaagcagaagcagaacccccctgctgcccagaaagagaagcagaagcagaagccccctggccatcagaagaagaagcagaagcagaacccccagaaccgccagaggcaagagaagcctgaccagaagcccccccgccatcagaagaagaagcgccagcggcagcagcagcgacagaagcagaagcgccaccccccccgccaccagaaaccacagcggcagcagaaccccccccgtggccctgaacagcagcagaatgagctgcttcagcagacccagcatgagccccacccccctggacagatgcagaagccccggcatgctggagcccctgggcagcagcagaacccccatgagcgtgctgcagcaggccggcggcagcatgatggacggccccggccccagaatccccgaccaccagagaaccagcgtgcccgagaaccacgcccagagcagaatcgccctggccctgaccgccatcagcctgggcaccgccagacccccccccagcatgagcgccgccggcctggccgccagaatgagccaggtgcccgcccccgtgcccctgatgagcctgagaaccgcccccgccgccaacctggccagcagaatccccgccgccagcgccgccgccatgaacctggccagcgccagaacccccgccatccccaccgccgtgaacctggccgacagcagaacccccgccgccgccgccgccatgaacctggccagccccagaaccgccgtggcccccagcgccgtgaacctggccgaccccagaacccccaccgcccccgccgtgaacctggccggcgccagaacccccgccgccctggccgccctgagcctgaccggcagcggcaccccccccaccgccgccaactaccccagcagcagcagaaccccccaggcccccgccagcgccaacctggtgggccccagaagcgcccacgccaccgcccccgtgaacatcgccggcagcagaaccgccgccgccctggcccccgccagcctgaccagcgccagaatggcccccgccctgagcggcgccaacctgaccagccccagagtgcccctgagcgcctacgagagagtgagcggcagaaccagcccccccctgctggacagagccagaagcagaaccccccccagcgcccccagccagagcagaatgaccagcgagagagcccccagccccagcagcagaatgggccaggcccccagccagagcctgctgccccccgcccaggaccagcccagaagccccgtgcccagcgccttcagcgaccagagcagatgcctgatcgcccagaccacccccgtggccggcagccagagcctgagcagcggcgccgtggccaccaccaccagcagcgccggcgaccacaacggcatgctgagcgtgcccgcccccggcgtgccccacagcgacgtgggcgagccccccgccagcaccggcgcccagcagcccagcgccctggccgccctgcagcccgccaaggagagaagaagcagcagcagcagcagcagcagcagcagcagcagcagcagcagcagcagcagcagcagcagcagcagcagcagcggcagcagcagcagcgacagcgagggcagcagcctgcccgtgcagcccgaggtggccctgaagagagtgcccagccccacccccgcccccaaggaggccgtgagagagggcagaccccccgagcccacccccgccaagagaaagagaagaagcagcagcagcagcagcagcagcagcagcagcagcagcagcagcagcagcagcagcagcagcagcagcagcagcagcagcagcagcagcagcagcagcagcagcagcagcagcagcagcagcagccccagccccgccaagcccggcccccaggccctgcccaagcccgccagccccaagaagcccccccccggcgagagaagcctgctgcccgtgagccccagccccagacacagcctgccccacgtggccagaggcaccttcctgaagagaaccagcggctacttcccccccctgcacaagagcttcggcaccccctgcggcctgcaggacaaggccccccccctgagagagtggagagtgagactgttcaccaacggcccctgccccccctgcgtgctgctgctgcccgcccccacccacgccctgtgcagcagccacacccagagactggccgtgtag

SEQ ID NO: 98469 - DNA, 1836 bp, synthetic construct
  misc_feature 1..1836: note = Description of Artificial Sequence: Synthetic coding sequence
  source 1..1836: mol_type = other DNA
atggccagcgtgcagcagggcgagaagcagctgttcgagaagttctggagaggcaccttcaaggccgtggccacccccagacccgagagcatcatcgtggccagcatcaccgccagaaagcccctgcccagaaccgagccccagaacaaccccgtggtgcccgcccaggacggccccagcgagaagctgggccagcacctggccaccgagcccctgggcaccaacagctgggagagagacaagacctgcagagagctgggcgccaccagaggccacagcgccagccacgacaaggacctgacccccccccccagcagcagaggcaagaagaagaagaagaagagcaccagaaagaagagaagaagaagcagcagctacagccccagccccgtgaagaagaagaagaagaagagcagcaagaagcacaagagaagaagaagcttcagcaagaagagaagacacagcagcagcagccccaagagcaagagaagagacgagaagagacacaagaagcagagcagaagcagacccagaaagagccacagacacagacaccacagatgccccagcagaagccagagcagcgagagcagacccagcagctgcgagagcagacacagaggcagaagccccgaggagggccagaagagcagaagaagacacagcagaagatgcagcaagaccctgtgcaaggacagccccgaggcccagagcagcagaccccccagccagcccctgcagatgctgggctacctgagcgccagaggcgtgatcaccggcagcggcagcgccgccgacctgttcaccaagaccgccagccccctgaccaccagcagaggcagaagccaggagtacgacagcggcaacgacaccagcagcccccccagcacccagaccagcagcgccagaagcagaggccaggagaagggcagccccagcggcggcctgagcaagagcagagagctgaacagcggcaacaccagcgacagcggcaacagcttcaccaccagcagcccccagaacaagggcgccatgctggagaacctgagccccaccagcagaggcagagagagcagaggcttccagagcccctgcctggagtgcgccgaggtgaagaagagcagcctggtgcccagcaccgccagaagcagccccatgaagggctgcagcagaagcagcagctacgccagcaccagaagcagcagccacagcagcagaagccccaaccccagagccagccccagatacacccagagcagaagcaccagcagcgagaagagaagctacagcagaagccccagctacagcagcaagagcggcaagagaagcccccccagcagaagcagcagaagcagaagaagccccagctacagcagatacagccccagcagagagagagaccccaagtacagcgagaaggacagccagcagagagagagagagagagccagaagaagaagaagaagctacagccccatgagaaagagaagaagagacagccccagccacctggaggccagaagaatcaccagcgccagaaagagacccatcccctactacagacccagccccagcagcagcggcagcctgagcagcaccagcagctggtacagcagcagcagcagcagaagcgccagcagaagctacagcagaagcagaagcagaagcagaagcagaagaagaagcagaaccagaaccagcagcagcagcagcagcagaagccccagccccggcagcagaagcagaagcagaagcagaagcagaagcagaagcagaagcagaagccagagcagaagctacagcagcgccgacagctacagcagcaccagaagatag

SEQ ID NO: 98470 - DNA, 747 bp, synthetic construct
  misc_feature 1..747: note = Description of Artificial Sequence: Synthetic coding sequence
  source 1..747: mol_type = other DNA
atgagcggcggcggcgtgatcagaggccccgccggcaacaacgactgcagaatctacgtgggcaacctgccccccgacatcagaaccaaggacatcgaggacgtgttctacaagtacggcgccatcagagacatcgacctgaagaacagaagaggcggcccccccttcgccttcgtggagttcgaggaccccagagacgccgaggacgccgtgtacggcagagacggctacgactacgacggctacagactgagagtggagttccccagaagcggcagaggcaccggcagaggcggcggcggcggcggcggcggcggcgcccccagaggcagatacggcccccccagcagaagaagcgagaacagagtggtggtgagcggcctgccccccagcggcagctggcaggacctgaaggaccacatgagagaggccggcgacgtgtgctacgccgacgtgtacagagacggcaccggcgtggtggagttcgtgagaaaggaggacatgacctacgccgtgagaaagctggacaacaccaagttcagaagccacgagggcgagaccgcctacatcagagtgaaggtggacggccccagaagccccagctacggcagaagcagaagcagaagcagaagcagaagcagaagcagaagcagaagcaacagcagaagcagaagctacagccccagaagaagcagaggcagccccagatacagccccagacacagcagaagcagaagcagaacctag

SEQ ID NO: 98471 - DNA, 606 bp, synthetic construct
  misc_feature 1..606: note = Description of Artificial Sequence: Synthetic coding sequence
  source 1..606: mol_type = other DNA
atgagcggcggcggcgtgatcagaggccccgccggcaacaacgactgcagaatctacgtgggcaacctgccccccgacatcagaaccaaggacatcgaggacgtgttctacaagtacggcgccatcagagacatcgacctgaagaacagaagaggcggcccccccttcgccttcgtggagttcgaggaccccagagacgccgaggacgccgtgtacggcagagacggctacgactacgacggctacagactgagagtggagttccccagaagcggcagaggcaccggcagaggcggcggcggcggcggcggcggcggcgcccccagaggcagatacggcccccccagcagaagaagcgagaacagagtggtggtgagcggcctgccccccagcggcagctggcaggacctgaaggaccacatgagagaggccggcgacgtgtgctacgccgacgtgtacagagacggcaccggcgtggtggagttcgtgagaaaggaggacatgacctacgccgtgagaaagctggacaacaccaagttcagaagccacgaggtgggctacaccagaatcctgttcttcgaccagaactggatccagtggagctag

SEQ ID NO: 98472 - DNA, 786 bp, synthetic construct
  misc_feature 1..786: note = Description of Artificial Sequence: Synthetic coding sequence
  source 1..786: mol_type = other DNA
atgagcagatacctgagaccccccaacaccagcctgttcgtgagaaacgtggccgacgacaccagaagcgaggacctgagaagagagttcggcagatacggccccatcgtggacgtgtacgtgcccctggacttctacaccagaagacccagaggcttcgcctacgtgcagttcgaggacgtgagagacgccgaggacgccctgcacaacctggacagaaagtggatctgcggcagacagatcgagatccagttcgcccagggcgacagaaagacccccaaccagatgaaggccaaggagggcagaaacgtgtacagcagcagcagatacgacgactacgacagatacagaagaagcagaagcagaagctacgagagaagaagaagcagaagcagaagcttcgactacaactacagaagaagctacagccccagaaacagacccaccggcagacccagaagaagcagaagccacagcgacaacgacagattcaagcacagaaacagaagcttcagcagaagcaagagcaacagcagaagcagaagcaagagccagcccaagaaggagatgaaggccaagagcagaagcagaagcgccagccacaccaagaccagaggcaccagcaagaccgacagcaagacccactacaagagcggcagcagatacgagaaggagagcagaaagaaggagccccccagaagcaagagccagagcagaagccagagcagaagcagaagcaagagcagaagcagaagctggaccagccccaagagcagcggccactag

SEQ ID NO: 98473 - DNA, 552 bp, synthetic construct
  misc_feature 1..552: note = Description of Artificial Sequence: Synthetic coding sequence
  source 1..552: mol_type = other DNA
atgagcagatacctgagaccccccaacaccagcctgttcgtgagaaacgtggccgacgacaccagaagcgaggacctgagaagagagttcggcagatacggccccatcgtggacgtgtacgtgcccctggacttctacaccagaagacccagaggcttcgcctacgtgcagttcgaggacgtgagagacgccgaggacgccctgcacaacctggacagaaagtggatctgcggcagacagatcgagatccagttcgcccagggcgacagaaagacccccaaccagatgaaggccaaggagggcagaaacgtgtacagcagcagcagatacgacgactacgacagatacagaagaagcagaagcagaagctacgagagaagaagaagcagaagcagaagcttcgactacaactacagaagaagctacagccccagaaacagcagacccaccggcagacccagaagaagcagaagccacagcgacaacgacagacccaactgcagctggaacacccagtacagcagcgcctactacaccagcagaaagatctag

SEQ ID NO: 98474 - DNA, 522 bp, synthetic construct
  misc_feature 1..522: note = Description of Artificial Sequence: Synthetic coding sequence
  source 1..522: mol_type = other DNA
atgagcagatacctgagaccccccaacaccagcctgttcgtgagaaacgtggccgacgacaccagaagcgaggacctgagaagagagttcggcagatacggccccatcgtggacgtgtacgtgcccctggacttctacaccagaagacccagaggcttcgcctacgtgcagttcgaggacgtgagagacgccgaggacgccctgcacaacctggacagaaagtggatctgcggcagacagatcgagatccagttcgcccagggcgacagaaagacccccaaccagatgaaggccaaggagggcagaaacgtgtacagcagcagcagatacgacgactacgacagatacagaagaagcagaagcagaagctacgagagaagaagaagcagaagcagaagcttcgactacaactacagaagaagctacagccccagaaacagcagacccaccggcagacccagaagaagcagaagccacagcgacaacgacagccaggtgagcaagaagaagaacgagagatag

SEQ ID NO: 98475 - DNA, 519 bp, synthetic construct
  misc_feature 1..519: note = Description of Artificial Sequence: Synthetic coding sequence
  source 1..519: mol_type = other DNA
atgagcagatacctgagaccccccaacaccagcctgttcgtgagaaacgtggccgacgacaccagaagcgaggacctgagaagagagttcggcagatacggccccatcgtggacgtgtacgtgcccctggacttctacaccagaagacccagaggcttcgcctacgtgcagttcgaggacgtgagagacgccgaggacgccctgcacaacctggacagaaagtggatctgcggcagacagatcgagatccagttcgcccagggcgacagaaagacccccaaccagatgaaggccaaggagggcagaaacgtgtacagcagcagcagatacgacgactacgacagatacagaagaagcagaagcagaagctacgagagaagaagaagcagaagcagaagcttcgactacaactacagaagaagctacagccccagaaacagacccaccggcagacccagaagaagcagaagccacagcgacaacgacagccaggtgagcaagaagaagaacgagagatag

SEQ ID NO: 98476 - DNA, 498 bp, synthetic construct
  misc_feature 1..498: note = Description of Artificial Sequence: Synthetic coding sequence
  source 1..498: mol_type = other DNA
atgagcagatacctgagaccccccaacaccagcctgttcgtgagaaacgtggccgacgacaccagaagcgaggacctgagaagagagttcggcagatacggccccatcgtggacgtgtacgtgcccctggacttctacaccagaagacccagaggcttcgcctacgtgcagttcgaggacgtgagagacgccgaggacgccctgcacaacctggacagaaagtggatctgcggcagacagatcgagatccagttcgcccagggcgacagaaagacccccaaccagatgaaggccaaggagggcagaaacgtgtacagcagcagcagatacgacgactacgacagatacagaagaagcagaagcagaagctacgagagaagaagaagcagaagcagaagcttcgactacaactacagaagaagctacagccccagaaagcccaactgcagctggaacacccagtacagcagcgcctactacaccagcagaaagatctag

SEQ ID NO: 98477 - DNA, 549 bp, synthetic construct
  misc_feature 1..549: note = Description of Artificial Sequence: Synthetic coding sequence
  source 1..549: mol_type = other DNA
atgagcagatacctgagaccccccaacaccagcctgttcgtgagaaacgtggccgacgacaccagaagcgaggacctgagaagagagttcggcagatacggccccatcgtggacgtgtacgtgcccctggacttctacaccagaagacccagaggcttcgcctacgtgcagttcgaggacgtgagagacgccgaggacgccctgcacaacctggacagaaagtggatctgcggcagacagatcgagatccagttcgcccagggcgacagaaagacccccaaccagatgaaggccaaggagggcagaaacgtgtacagcagcagcagatacgacgactacgacagatacagaagaagcagaagcagaagctacgagagaagaagaagcagaagcagaagcttcgactacaactacagaagaagctacagccccagaaacagacccaccggcagacccagaagaagcagaagccacagcgacaacgacagacccaactgcagctggaacacccagtacagcagcgcctactacaccagcagaaagatctag

SEQ ID NO: 98478 - DNA, 789 bp, synthetic construct
  misc_feature 1..789: note = Description of Artificial Sequence: Synthetic coding sequence
  source 1..789: mol_type = other DNA
atgagcagatacctgagaccccccaacaccagcctgttcgtgagaaacgtggccgacgacaccagaagcgaggacctgagaagagagttcggcagatacggccccatcgtggacgtgtacgtgcccctggacttctacaccagaagacccagaggcttcgcctacgtgcagttcgaggacgtgagagacgccgaggacgccctgcacaacctggacagaaagtggatctgcggcagacagatcgagatccagttcgcccagggcgacagaaagacccccaaccagatgaaggccaaggagggcagaaacgtgtacagcagcagcagatacgacgactacgacagatacagaagaagcagaagcagaagctacgagagaagaagaagcagaagcagaagcttcgactacaactacagaagaagctacagccccagaaacagcagacccaccggcagacccagaagaagcagaagccacagcgacaacgacagattcaagcacagaaacagaagcttcagcagaagcaagagcaacagcagaagcagaagcaagagccagcccaagaaggagatgaaggccaagagcagaagcagaagcgccagccacaccaagaccagaggcaccagcaagaccgacagcaagacccactacaagagcggcagcagatacgagaaggagagcagaaagaaggagccccccagaagcaagagccagagcagaagccagagcagaagcagaagcaagagcagaagcagaagctggaccagccccaagagcagcggccactag

SEQ ID NO: 98479 - DNA, 1275 bp, synthetic construct
  misc_feature 1..1275: note = Description of Artificial Sequence: Synthetic coding sequence
  source 1..1275: mol_type = other DNA
atgatcaacaaccacagaaaccaggccctgtacttcagcgagcacaagtacttccagcagacccaggtggtgtaccagggcgacatcttctgggtgttcctgtgcgtgttctgcctgagaaaggagtgcgtgctgatgcagggctgcttcagcgccggcgtgatccccgacgaggccaaggccctgagcctgctggcccccgccaacgccgtggccggcctgctgcccggcggcggcctgctgcccacccccaaccccctgacccagatcggcgccgtgcccctggccgccctgggcgcccccaccctggaccccgccctggccgccctgggcctgcccggcgccaacctgaacagccagagcctggccgccgaccagctgctgaagctgatgagcaccgtggaccccaagctgaaccacgtggccgccggcctggtgagccccagcctgaagagcgacaccagcagcaaggagatcgaggaggccatgaagagagtgagagaggcccagagcctgatcagcgccgccatcgagcccgacaagaaggaggagaagagaagacacagcagaagcagaagcagaagcagaagaagaagaacccccagcagcagcagacacagaagaagcagaagcagaagcagaagaagaagccacagcaagagcagaagcagaagaagaagcaagagccccagaagaagaagaagccacagcagagagagaggcagaagaagcagaagcaccagcaagaccagagacaagaagaaggaggacaaggagaagaagagaagcaagaccccccccaagagctacagcaccgccagaagaagcagaagcgccagcagagagagaagaagaagaagaagcagaagcggcaccagaagccccaagaagcccagaagccccaagagaaagctgagcagaagccccagccccagaagacacaagaaggagaagaagaaggacaaggacaaggagagaagcagagacgagagagagagaagcaccagcaagaagaagaagagcaaggacaaggagaaggacagagagagaaagagcgagagcgacaaggacgtgaagcaggtgaccagagactacgacgaggaggagcagggctacgacagcgagaaggagaagaaggaggagaagaagcccatcgagaccggcagccccaagaccaaggagtgcagcgtggagaagggcaccggcgacagcctgagagagagcaaggtgaacggcgacgaccaccacgaggaggacatggacatgagcgactag

SEQ ID NO: 98480 - DNA, 1455 bp, synthetic construct
  misc_feature 1..1455: note = Description of Artificial Sequence: Synthetic coding sequence
  source 1..1455: mol_type = other DNA
atgagcaacaccaccgtggtgcccagcaccgccggccccggccccagcggcggccccggcggcggcggcggcggcggcggcggcggcggcggcaccgaggtgatccaggtgaccaacgtgagccccagcgccagcagcgagcagatgagaaccctgttcggcttcctgggcaagatcgacgagctgagactgttcccccccgacgacagccccctgcccgtgagcagcagagtgtgcttcgtgaagttccacgaccccgacagcgccgtggtggcccagcacctgaccaacaccgtgttcgtggacagagccctgatcgtggtgccctacgccgagggcgtgatccccgacgaggccaaggccctgagcctgctggcccccgccaacgccgtggccggcctgctgcccggcggcggcctgctgcccacccccaaccccctgacccagatcggcgccgtgcccctggccgccctgggcgcccccaccctggaccccgccctggccgccctgggcctgcccggcgccaacctgaacagccagagcctggccgccgaccagctgctgaagctgatgagcaccgtggaccccaagctgaaccacgtggccgccggcctggtgagccccagcctgaagagcgacaccagcagcaaggagatcgaggaggccatgaagagagtgagagaggcccagagcctgatcagcgccgccatcgagcccgacaagaaggaggagaagagaagacacagcagaagcagaagcagaagcagaagaagaagaacccccagcagcagcagacacagaagaagcagaagcagaagcagaagaagaagccacagcaagagcagaagcagaagaagaagcaagagccccagaagaagaagaagccacagcagagagagaggcagaagaagcagaagcaccagcaagaccagagacaagaagaaggaggacaaggagaagaagagaagcaagaccccccccaagagctacagcaccgccagaagaagcagaagcgccagcagagagagaagaagaagaagaagcagaagcggcaccagaagccccaagaagcccagaagccccaagagaaagctgagcagaagccccagccccagaagacacaagaaggagaagaagaaggacaaggacaaggagagaagcagagacgagagagagagaagcaccagcaagaagaagaagagcaaggacaaggagaaggacagagagagaaagagcgagagcgacaaggacgtgaagcaggtgaccagagactacgacgaggaggagcagggctacgacagcgagaaggagaagaaggaggagaagaagcccatcgagaccggcagccccaagaccaaggagtgcagcgtggagaagggcaccggcgacagcctgagagagagcaaggtgaacggcgacgaccaccacgaggaggacatggacatgagcgactag

SEQ ID NO: 98481 - DNA, 1452 bp, synthetic construct
  misc_feature 1..1452: note = Description of Artificial Sequence: Synthetic coding sequence
  source 1..1452: mol_type = other DNA
atgagcaacaccaccgtggtgcccagcaccgccggccccggccccagcggcggccccggcggcggcggcggcggcggcggcggcggcggcggcaccgaggtgatccaggtgaccaacgtgagccccagcgccagcagcgagcagatgagaaccctgttcggcttcctgggcaagatcgacgagctgagactgttcccccccgacgacagccccctgcccgtgagcagcagagtgtgcttcgtgaagttccacgaccccgacagcgccgtggtggcccagcacctgaccaacaccgtgttcgtggacagagccctgatcgtggtgccctacgccgagggcgtgatccccgacgaggccaaggccctgagcctgctggcccccgccaacgccgtggccggcctgctgcccggcggcggcctgctgcccacccccaaccccctgacccagatcggcgccgtgcccctggccgccctgggcgcccccaccctggaccccgccctggccgccctgggcctgcccggcgccaacctgaacagccagagcctggccgccgaccagctgctgaagctgatgagcaccgtggaccccaagctgaaccacgtggccgccggcctggtgagccccagcctgaagagcgacaccagcagcaaggagatcgaggaggccatgaagagagtgagagaggcccagagcctgatcagcgccgccatcgagcccgacaagaaggaggagaagagaagacacagcagaagcagaagcagaagcagaagaagaagaacccccagcagcagcagacacagaagaagcagaagcagaagcagaagaagaagccacagcaagagcagaagcagaagaagaagcaagagccccagaagaagaagaagccacagcagagagagaggcagaagaagcagaagcaccagcaagaccagagacaagaagaaggaggacaaggagaagaagagaagcaagaccccccccaagagctacagcaccgccagaagaagcagaagcgccagcagagagagaagaagaagaagaagcagaagcggcaccagaagccccaagaagcccagaagccccaagagaaagctgagcagaagccccagccccagaagacacaagaaggagaagaagaaggacaaggacaaggagagaagcagagacgagagagagagaagcaccagcaagaagaagaagagcaaggacaaggagaaggacagagagagaaagagcgagagcgacaaggacgtgaaggtgaccagagactacgacgaggaggagcagggctacgacagcgagaaggagaagaaggaggagaagaagcccatcgagaccggcagccccaagaccaaggagtgcagcgtggagaagggcaccggcgacagcctgagagagagcaaggtgaacggcgacgaccaccacgaggaggacatggacatgagcgactag

SEQ ID NO: 98482 - DNA, 1170 bp, synthetic construct
  misc_feature 1..1170: note = Description of Artificial Sequence: Synthetic coding sequence
  source 1..1170: mol_type = other DNA
atgagcaacaccaccgtggtgcccagcaccgccggccccggccccagcggcggccccggcggcggcggcggcggcggcggcggcggcggcggcaccgaggtgatccaggtgaccaacgtgagccccagcgccagcagcgagcagatgagaaccctgttcggcttcctgggcaagatcgacgagctgagactgttcccccccgacgacagccccctgcccgtgagcagcagagtgtgcttcgtgaagttccacgaccccgacagcgccgtggtggcccagcacctgaccaacaccgtgttcgtggacagagccctgatcgtggtgccctacgccgagggcgtgatccccgacgaggccaaggccctgagcctgctggcccccgccaacgccgtggccggcctgctgcccggcggcggcctgctgcccacccccaaccccctgacccagatcggcgccgtgcccctggccgccctgggcgcccccaccctggaccccgccctggccgccctgggcctgcccggcgccaacctgaacagccagagcctggccgccgaccagctgctgaagctgatgagcaccgtggaccccaagctgaaccacgtggccgccggcctggtgagccccagcctgaagagcgacaccagcagcaaggagatcgaggaggccatgaagagagtgagagaggcccagagcctgatcagcgccgccatcgagcccgacaagaaggaggagaagagaagacacagcagaagcagaagcagaagcagaagaagaagaacccccagcagcagcagacacagaagaagcagaagcagaagcagaagaagaagccacagcaagagcagaagcagaagaagaagcaagagccccagaagaagaagaagccacagcagagagagaggcagaagaagcagaagcaccagcaagaccagagacaagaagaaggaggacaaggagaagaagagaagcaagaccccccccaagagctacagcaccgccagaagaagcagaagcgccagcagcctgcacatctgcgacagcagagagagaagaagaagaagaagcagaagcggcaccagaagccccaagaagcccagaagccccaagagaaagctgagcagaagccccagccccagaagacacaagaaggagaagaagaaggacaagtag

SEQ ID NO: 98483 - DNA, 1455 bp, synthetic construct; identical to SEQ ID NO: 98480
  misc_feature 1..1455: note = Description of Artificial Sequence: Synthetic coding sequence
  source 1..1455: mol_type = other DNA

SEQ ID NO: 98484 - DNA, 387 bp, synthetic construct
  misc_feature 1..387: note = Description of Artificial Sequence: Synthetic coding sequence
  source 1..387: mol_type = other DNA
atgagcaacaccaccgtggtgcccagcaccgccggccccggccccagcggcggccccggcggcggcggcggcggcggcggcggcggcggcggcaccgaggtgatccaggtgaccaacgtgagccccagcgccagcagcgagcagatgagaaccctgttcggcttcctgggcaagatcgacgagctgagactgttcccccccgacgacagccccctgcccgtgagcagcagagtgtgcttcgtgaagttccacgaccccgacagcgccgtggtggcccagcacctgaccaacaccgtgttcgtggacagagccctgatcgtggtgccctacgccgaggtgaagcagcccaccagagtggtggtgcacaagaccgccttcgagagctag

SEQ ID NO: 98485 - DNA, 396 bp, synthetic construct
  misc_feature 1..396: note = Description of Artificial Sequence: Synthetic coding sequence
  source 1..396: mol_type = other DNA
atgagcaacaccaccgtggtgcccagcaccgccggccccggccccagcggcggccccggcggcggcggcggcggcggcggcggcggcggcggcaccgaggtgatccaggtgaccaacgtgagccccagcgccagcagcgagcagatgagaaccctgttcggcttcctgggcaagatcgacgagctgagactgttcccccccgacgacagccccctgcccgtgagcagcagagtgtgcttcgtgaagttccacgaccccgacagcgccgtggtggcccagcacctgaccaacaccgtgttcgtggacagagccctgatcgtggtgccctacgccgaggtgttccacggcagcatcaaggccgccgtgaagaagatcctgctgacccacgagaactag

SEQ ID NO: 98486 - DNA, 630 bp, synthetic construct
  misc_feature 1..630: note = Description of Artificial Sequence: Synthetic coding sequence
  source 1..630: mol_type = other DNA
atgaccagcctgaaggtggacaacctgacctacagaaccagccccgacaccctgagaagagtgttcgagaagtacggcagagtgggcgacgtgtacatccccagagacagatacaccaaggagagcagaggcttcgccttcgtgagattccacgacaagagagacgccgaggacgccatggacgccatggacggcgccgtgctggacggcagagagctgagagtgcagatggccagatacggcagaccccccgacagccaccacagcagaagaggccccccccccagaagatacggcggcggcggctacggcagaagaagcagaagccccagaagaagaagaagaagcagaagcagaagcagaagcagaagcagaagcagaagcagaagcagatacagcagaagcaagagcagaagcagaaccagaagcagaagcagaagcaccagcaagagcagaagcgccagaagaagcaagagcaagagcagcagcgtgagcagaagcagaagcagaagcagaagcagaagcagaagcagaagccccccccccgtgagcaagagagagagcaagagcagaagcagaagcaagagcccccccaagagccccgaggaggagggcgccgtgagcagctag

SEQ ID NO: 98487 - DNA, 606 bp, synthetic construct
  misc_feature 1..606: note = Description of Artificial Sequence: Synthetic coding sequence
  source 1..606: mol_type = other DNA
atgagctacggcagacccccccccgacgtggagggcatgaccagcctgaaggtggacaacctgacctacagaaccagccccgacaccctgagaagagtgttcgagaagtacggcagagtgggcgacgtgtacatccccagagacagatacaccaaggagagcagaggcttcgccttcgtgagattccacgacaagagagacgccgaggacgccatggacgccatggacggcgccgtgctggacggcagagagctgagagtgcagatggccagatgcggcggctacggcagaagaagcagaagccccagaagaagaagaagaagcagaagcagaagcagaagcagaagcagaagcagaagcagaagcagatacagcagaagcaagagcagaagcagaaccagaagcagaagcagaagcaccagcaagagcagaagcgccagaagaagcaagagcaagagcagcagcgtgagcagaagcagaagcagaagcagaagcagaagcagaagcagaagccccccccccgtgagcaagagagagagcaagagcagaagcagaagcaagagcccccccaagagccccgaggaggagggcgccgtgagcagctag

SEQ ID NO: 98488 - DNA, 666 bp, synthetic construct
  misc_feature 1..666: note = Description of Artificial Sequence: Synthetic coding sequence
  source 1..666: mol_type = other DNA
atgagctacggcagacccccccccgacgtggagggcatgaccagcctgaaggtggacaacctgacctacagaaccagccccgacaccctgagaagagtgttcgagaagtacggcagagtgggcgacgtgtacatccccagagacagatacaccaaggagagcagaggcttcgccttcgtgagattccacgacaagagagacgccgaggacgccatggacgccatggacggcgccgtgctggacggcagagagctgagagtgcagatggccagatacggcagaccccccgacagccaccacagcagaagaggccccccccccagaagatacggcggcggcggctacggcagaagaagcagaagccccagaagaagaagaagaagcagaagcagaagcagaagcagaagcagaagcagaagcagaagcagatacagcagaagcaagagcagaagcagaaccagaagcagaagcagaagcaccagcaagagcagaagcgccagaagaagcaagagcaagagcagcagcgtgagcagaagcagaagcagaagcagaagcagaagcagaagcagaagccccccccccgtgagcaagagagagagcaagagcagaagcagaagcaagagcccccccaagagccccgaggaggagggcgccgtgagcagctag

SEQ ID NO: 98489 - DNA, 540 bp, synthetic construct
  misc_feature 1..540: note = Description of Artificial Sequence: Synthetic coding sequence
  source 1..540: mol_type = other DNA
atgagctacggcagacccccccccgacgtggagggcatgaccagcctgaaggtggacaacctgacctacagaaccagccccgacaccctgagaagagtgttcgagaagtacggcagagtgggcgacgtgtacatccccagagacagatacaccaaggagagcagaggcttcgccttcgtgagattccacgacaagagagacgccgaggacgccatggacgccatggacggcgccgaccccggcgtgggcgtggtgcccggcctggccgccgacctggccaccgccgccagaagcctgggccccgccctggtgctggacctgggcagaccccccagccccgacccccacgagggccccagccccagccccagaagaagccccgacctggtgagaggccccggccccggcctgggccccggcgtgctgccccagtgccccagaggcaaccccaaccccggcagagacagaagagtgccccccagcctgctgaagagaaaggagagatgccccctgaagaagatgctgagaagccccgtgtag

SEQ ID NO: 98490 - DNA, 669 bp, synthetic construct
  misc_feature 1..669: note = Description of Artificial Sequence: Synthetic coding sequence
  source 1..669: mol_type = other DNA
cccgagagaagaggcgtggccccccccagagccgaggaggccggcgccagcagcagaggcagcggcccccccctgagagccatgagctacggcagacccccccccgacgtggagggcatgaccagcctgaaggtggacaacctgacctacagaaccagccccgacaccctgagaagagtgttcgagaagtacggcagagtgggcgacgtgtacatccccagagacagatacaccaaggagagcagaggcttcgccttcgtgagattccacgacaagagagacgccgaggacgccatggacgccatggacggcgccgtgctggacggcagagagctgagagtgcagatggccagatacggcagaccccccgacagccaccacagcagaagaggccccccccccagaagatacggcggcggcggctacggcagaagaagcagaagccccagaagaagaagaagaagcagaagcagaagcagaagcagaagcagaagcagaagcagaagcagatacagcagaagcaagagcagaagcagaaccagaagcagaagcagaagcaccagcaagagcagaagcgccagaagaagcaagagcaagagcagcagcgtgagcagaagcagaagcagaagcagaagcagaagcagaagcagaagccccccccccgtgtag

SEQ ID NO: 98491 - DNA, 375 bp, synthetic construct
  misc_feature 1..375: note = Description of Artificial Sequence: Synthetic coding sequence
  source 1..375: mol_type = other DNA
atgcacagagacagctgccccctggactgcaaggtgtacgtgggcaacctgggcaacaacggcaacaagaccgagctggagagagccttcggctactacggccccctgagaagcgtgtgggtggccagaaacccccccggcttcgccttcgtggagttcgaggaccccagagacgccgccgacgccgtgagagagctggacggcagaaccctgtgcggctgcagagtgagagtggagctgagcaacggcgagaagagaagcagaaacagaggccccccccccagctggggcagaagacccagagacgactacagaagaagaagccccccccccagaagaagagtgaccatcatgagcctgctgaccaccctgtag

SEQ ID NO: 98492 - DNA, 495 bp, synthetic construct
  misc_feature 1..495: note = Description of Artificial Sequence: Synthetic coding sequence
  source 1..495: mol_type = other DNA
atgcacagagacagctgccccctggactgcaaggtgtacgtgggcaacctgggcaacaacggcaacaagaccgagctggagagagccttcggctactacggccccctgagaagcgtgtgggtggccagaaacccccccggcttcgccttcgtggagttcgaggaccccagagacgccgccgacgccgtgagagagctggacggcagaaccctgtgcggctgcagagtgagagtggagctgagcaacggcgagaagagaagcagaaacagaggccccccccccagctggggcagaagacccagagacgactacagaagaagaagccccccccccagaagaagaagccccagaagaagaagcttcagcagaagcagaagcagaagcctgagcagagacagaagaagagagagaagcctgagcagagagagaaaccacaagcccagcagaagcttcagcagaagcagaagcagaagcagaagcaacgagagaaagtag

SEQ ID NO: 98493 - DNA, 1485 bp, synthetic construct
  misc_feature 1..1485: note = Description of Artificial Sequence: Synthetic coding sequence
  source 1..1485: mol_type = other DNA
atgcccagagtgtacatcggcagactgagctaccaggccagagagagagacgtggagagattcttcaagggctacggcaagatcctggaggtggacctgaagaacggctacggcttcgtggagttcgacgacctgagagacgccgacgacgccgtgtacgagctgaacggcaaggacctgtgcggcgagagagtgatcgtggagcacgccagaggccccagaagagacggcagctacggcagcggcagaagcggctacggctacagaagaagcggcagagacaagtacggcccccccaccagaaccgagtacagactgatcgtggagaacctgagcagcagatgcagctggcaggacctgaaggactacatgagacaggccggcgaggtgacctacgccgacgcccacaagggcagaaagaacgagggcgtgatcgagttcgtgagctacagcgacatgaagagagccctggagaagctggacggcaccgaggtgaacggcagaaagatcagactggtggaggacaagcccggcagcagaagaagaagaagctacagcagaagcagaagccacagcagaagcagaagcagaagcagacacagcagaaagagcagaagcagaagcggcagcagcaagagcagccacagcaagagcagaagcagaagcagaagcggcagcagaagcagaagcaagagcagaagcagaagccagagcagaagcagaagcaagaaggagaagagcagaagccccagcaaggagaagagcagaagcagaagccacagcgccggcaagagcagaagcaagagcaaggaccaggccgaggagaagatccagaacaacgacaacgtgggcaagcccaagagcagaagccccagcagacacaagagcaagagcaagagcagaagcagaagccaggagagaagagtggaggaggagaagagaggcagcgtgagcagaggcagaagccaggagaagagcctgagacagagcagaagcagaagcagaagcaagggcggcagcagaagcagaagcagaagcagaagcaagagcaaggacaagagaaagggcagaaagagaagcagagaggagagcagaagcagaagcagaagcagaagcaagagcgagagaagcagaaagagaggcagcaagagagacagcaaggccggcagcagcaagaagaagaagaaggaggacaccgacagaagccagagcagaagccccagcagaagcgtgagcaaggagagagagcacgccaagagcgagagcagccagagagagggcagaggcgagagcgagaacgccggcaccaaccaggagaccagaagcagaagcagaagcaacagcaagagcaagcccaacctgcccagcgagagcagaagcagaagcaagagcgccagcaagaccagaagcagaagcaagagcagaagcagaagcgccagcagaagccccagcagaagcagaagcagaagccacagcagaagctag

SEQ ID NO: 98494 - DNA, 1221 bp, synthetic construct
  misc_feature 1..1221: note = Description of Artificial Sequence: Synthetic coding sequence
  source 1..1221: mol_type = other DNA
atgcccagagtgtacatcggcagactgagctaccaggccagagagagagacgtggagagattcttcaagggctacggcaagatcctggaggtggacctgaagaacggctacggcttcgtggagttcgacgacctgagagacgccgacgacgccgtgtacgagctgaacggcaaggacctgtgcggcgagagagtgatcgtggagcacgccagaggccccagaagagacggcagctacggcagcggcagaagcggctacggctacagaagaagcggcagagacaagtacggcccccccaccagaaccgagtacagactgatcgtggagaacctgagcagcagatgcagctggcaggacctgaaggactacatgagacaggccggcgaggtgacctacgccgacgcccacaagggcagaaagaacgagggcgtgatcgagttcgtgagctacagcgacatgaagagagccctggagaagctggacggcaccgaggtgaacggcagaaagatcagactggtggaggacaagcccggcagcagaagaagaagaagctacagcagaagcagaagccacagcagaagcagaagcagaagcagacacagcagaaagagcagaagcagaagcggcagcagcaagagcagccacagcaagagcagaagcagaagcagaagcggcagcagaagcagaagcaagagcagaagcagaagccagagcagaagcagaagcaagaaggagaagagcagaagccccagcaaggagaagagcagaagcagaagccacagcgccggcaagagcagaagcaagagcaaggaccaggccgaggagaagatccagaacaacgacaacgtgggcaagcccaagagcagaagccccagcagacacaagagcaagagcaagagcagaagcagaagccaggagagaagagtggaggaggagaagagaggcagcgtgagcagaggcagaagccaggagaagagcctgagacagagcagaagcagaagcagaagcaagggcggcagcagaagcagaagcagaagcagaagcaagagcaaggacaagagaaagggcagaaagagaagcagagaggagagcagaagcagaagcagaagcagaagcaagagcgagagaagcagaaagagaggcagcctggccttcagacccggcctgagctacagagagctgagcaacctggacggcagcaaggccggcatgaccacctag

SEQ ID NO: 98495 - DNA, 477 bp, synthetic construct
  misc_feature 1..477: note = Description of Artificial Sequence: Synthetic coding sequence
  source 1..477: mol_type = other DNA
atgcccagagtgtacatcggcagactgagctaccaggccagagagagagacgtggagagattcttcaagggctacggcaagatcctggaggtggacctgaagaacggctacggcttcgtggagttcgacgacctgagagacgccgacgacgccgtgtacgagctgaacggcaaggacctgtgcggcgagagagtgatcgtggagcacgccagaggccccagaagagacggcagctacggcagcggcagaagcggctacggctacagaagaagcggcagagacaagtacggcccccccaccagaaccgagtacagactgatcgtggagaacctgagcagcagatgcagctggcaggacctgaaggtgggcctgcccctgcccgagcaggagcccgagcccgagcccgagagcgagcccgagcaggagagagagaagcaggagccccagcagggcaaggagccccagccccagccctag

SEQ ID NO: 98496 - DNA, 819 bp, synthetic construct
  misc_feature 1..819: note = Description of Artificial Sequence: Synthetic coding sequence
  source 1..819: mol_type = other DNA
atgagcggctgcagagtgttcatcggcagactgaaccccgccgccagagagaaggacgtggagagattcttcaagggctacggcagaatcagagacatcgacctgaagagaggcttcggcttcgtggagttcgaggaccccagagacgccgacgacgccgtgtacgagctggacggcaaggagctgtgcagcgagagagtgaccatcgagcacgccagagccagaagcagaggcggcagaggcagaggcagatacagcgacagattcagcagcagaagacccagaaacgacagaagaaacgccccccccgtgagaaccgagaacagactgatcgtggagaacctgagcagcagagtgagctggcaggacctgaaggacttcatgagacaggccggcgaggtgaccttcgccgacgcccacagacccaagctgaacgagggcgtggtggagttcgccagctacggcgacctgaagaacgccatcgagaagctgagcggcaaggagatcaacggcagaaagatcaagctgatcgagggcagcaagagacacagcagaagcagaagcagaagcagaagcagaaccagaagcagcagcagaagcagaagcagaagcagaagcagaagcagaaagagctacagcagaagcagaagcagaagcagaagcagaagcagaagcaagagcagaagcgtgagcagaagccccgtgcccgagaagagccagaagagaggcagcagcagcagaagcaagagccccgccagcgtggacagacagagaagcagaagcagaagcagaagcagaagcgtggacagcggcaactag

SEQ ID NO: 98497 - DNA, 417 bp, synthetic construct
  misc_feature 1..417: note = Description of Artificial Sequence: Synthetic coding sequence
  source 1..417: mol_type = other DNA
atgagcggctgcagagtgttcatcggcagactgaaccccgccgccagagagaaggacgtggagagattcttcaagggctacggcagaatcagagacatcgacctgaagagaggcttcggcttcgtggagttcgaggaccccagagacgccgacgacgccgtgtacgagctggacggcaaggagctgtgcagcgagagagtgaccatcgagcacgccagagccagaagcagaggcggcagaggcagaggcagatacagcgacagattcagcagcagaagacccagaaacgacagaagaaacgccccccccgtgagaaccgagaacagactgatcgtggagaacctgagcagcagagtgagctggcagcccgtgtgcgtggtgggcctgatgaccagaagcgcctgcggcctgagctag

SEQ ID NO: 98498 - DNA, 819 bp, synthetic construct; identical to SEQ ID NO: 98496
  misc_feature 1..819: note = Description of Artificial Sequence: Synthetic coding sequence
  source 1..819: mol_type = other DNA

SEQ ID NO: 98499 - DNA, 819 bp, synthetic construct; identical to SEQ ID NO: 98496
  misc_feature 1..819: note = Description of Artificial Sequence: Synthetic coding sequence
  source 1..819: mol_type = other DNA

SEQ ID NO: 98500 - DNA, 1035 bp, synthetic construct
  misc_feature 1..1035: note = Description of Artificial Sequence: Synthetic coding sequence
  source 1..1035: mol_type = other DNA
atgcccagagtgtacatcggcagactgagctacaacgtgagagagaaggacatccagagattcttcagcggctacggcagactgctggaggtggacctgaagaacggctacggcttcgtggagttcgaggacagcagagacgccgacgacgccgtgtacgagctgaacggcaaggagctgtgcggcgagagagtgatcgtggagcacgccagaggccccagaagagacagagacggctacagctacggcagcagaagcggcggcggcggctacagcagcagaagaaccagcggcagagacaagtacggcccccccgtgagaaccgagtacagactgatcgtggagaacctgagcagcagatgcagctggcaggacctgaaggacttcatgagacaggccggcgaggtgacctacgccgacgcccacaaggagagaaccaacgagggcgtgatcgagttcagaagctacagcgacatgaagagagccctggacaagctggacggcaccgagatcaacggcagaaacatcagactgatcgaggacaagcccagaaccagccacagaagaagctacagcggcagcagaagcagaagcagaagcagaagaagaagcagaagcagaagcagaagaagcagcagaagcagaagcagaagcatcagcaagagcagaagcagaagcagaagcagaagcaagggcagaagcagaagcagaagcaagggcagaaagagcagaagcaagagcaagagcaagcccaagagcgacagaggcagccacagccacagcagaagcagaagcaaggacgagtacgagaagagcagaagcagaagcagaagcagaagccccaaggagaacggcaagggcgacatcaagagcaagagcagaagcagaagccagagcagaagcaacagccccctgcccgtgccccccagcaaggccagaagcgtgagccccccccccaagagagccaccagcagaagcagaagcagaagcagaagcaagagcagaagcagaagcagaagcagcagcagagactag

SEQ ID NO: 98501 - DNA, 717 bp, synthetic construct
  misc_feature 1..717: note = Description of Artificial Sequence: Synthetic coding sequence
  source 1..717: mol_type = other DNA
atgagcagatacggcagatacggcggcgagaccaaggtgtacgtgggcaacctgggcaccggcgccggcaagggcgagctggagagagccttcagctactacggccccctgagaaccgtgtggatcgccagaaacccccccggcttcgccttcgtggagttcgaggaccccagagacgccgaggacgccgtgagaggcctggacggcaaggtgatctgcggcagcagagtgagagtggagctgagcaccggcatgcccagaagaagcagattcgacagaccccccgccagaagacccttcgaccccaacgacagatgctacgagtgcggcgagaagggccactacgcctacgactgccacagatacagcagaagaagaagaagcagaagcagaagcagaagccacagcagaagcagaggcagaagatacagcagaagcagaagcagaagcagaggcagaagaagcagaagcgccagccccagaagaagcagaagcatcagcctgagaagaagcagaagcgccagcctgagaagaagcagaagcggcagcatcaagggcagcagatacttccagagccccagcagaagcagaagcagaagcagaagcatcagcagacccagaagcagcagaagcaagagcagaagccccagccccaagagaagcagaagccccagcggcagccccagaagaagcgccagccccgagagaatggactag

SEQ ID NO: 98502 - DNA, 681 bp, synthetic construct
  misc_feature 1..681: note = Description of Artificial Sequence: Synthetic coding sequence
  source 1..681: mol_type = other DNA
atgagcagatacggcagatacggcggcgagaccaaggtgtacgtgggcaacctgggcaccggcgccggcaagggcgagctggagagagccttcagctactacggccccctgagaaccgtgtggatcgccagaaacccccccggcttcgccttcgtggagttcgaggaccccagagacgccgaggacgccgtgagaggcctggacggcaaggtgatctgcggcagcagagtgagagtggagctgagcaccggcatgcccagaagaagcagattcgacagaccccccgccagaagacccttcgaccccaacgacagatgctacgagtgcggcgagaagggccactacgcctacgactgccacagatacagcagaagaagaagaagcagaagcagaagcagaagccacagcagaagcagaggcagaagatacagcagaagcagaagcagaagcagaggcagaagaagcagaagcgccagccccagaagaagcagaagcatcagcctgagaagaagcagaagcgccagcctgagaagaagcagaagcggcagcatcaagggcagcagatacttccagagccccagcagaagcagaagcagaagcagaagcatcagcagacccagaagcagcagaagccccagcggcagccccagaagaagcgccagccccgagagaatggactag

SEQ ID NO: 98503 - DNA, 1926 bp, synthetic construct
  misc_feature 1..1926: note = Description of Artificial Sequence: Synthetic coding sequence
  source 1..1926: mol_type = other DNA
atgaactgggccgccttcggcggcagcgagttcttcatccccgagggcatccagatcgacagcagatgccccctgagcagaaacatcaccgagtggtaccactactacggcatcgccgtgaaggagagcagccagtactacgacgtgatgtacagcaagaagggcgccgcctgggtgagcgagaccggcaagaaggaggtgagcaagcagaccgtggcctacagccccagaagcaagctgggcaccctgctgcccgagttccccaacgtgaaggacctgaacctgcccgccagcctgcccgaggagaaggtgagcaccttcatcatgatgtacagaacccactgccagagaatcctggacaccgtgatcagagccaacttcgacgaggtgcagagcttcctgctgcacttctggcagggcatgcccccccacatgctgcccgtgctgggcagcagcaccgtggtgaacatcgtgggcgtgtgcgacagcatcctgtacaaggccatcagcggcgtgctgatgcccaccgtgctgcaggccctgcccgacagcctgacccaggtgatcagaaagttcgccaagcagctggacgagtggctgaaggtggccctgcacgacctgcccgagaacctgagaaacatcaagttcgagctgagcagaagattcagccagatcctgagaagacagaccagcctgaaccacctgtgccaggccagcagaaccgtgatccacagcgccgacatcaccttccagatgctggaggactggagaaacgtggacctgaacagcatcaccaagcagaccctgtacaccatggaggacagcagagacgagcacagaaagctgatcacccagctgtaccaggagttcgaccacctgctggaggagcagagccccatcgagagctacatcgagtggctggacaccatggtggacagatgcgtggtgaaggtggccgccaagagacagggcagcctgaagaaggtggcccagcagttcctgctgatgtggagctgcttcggcaccagagtgatcagagacatgaccctgcacagcgcccccagcttcggcagcttccacctgatccacctgatgttcgacgactacgtgctgtacctgctggagagcctgcactgccaggagagagccaacgagctgatgagagccatgaagggcgagggcagcaccgccgaggtgagagaggagatcatcctgaccgaggccgccgcccccacccccagccccgtgcccagcttcagccccgccaagagcgccaccagcgtggaggtgcccccccccagcagccccgtgagcaaccccagccccgagtacaccggcctgagcaccaccggcgccatgcagagctacacctggagcctgacctacaccgtgaccaccgccgccggcagccccgccgagaacagccagcagctgccctgcatgagaaacacccacgtgcccagcagcagcgtgacccacagaatccccgtgtacccccacagagaggagcacggctacaccggcagctacaactacggcagctacggcaaccagcacccccaccccatgcagagccagtaccccgccctgccccacgacaccgccatcagcggccccctgcactacgccccctaccacagaagcagcgcccagtaccccttcaacagccccaccagcagaatggagccctgcctgatgagcagcacccccagactgcaccccacccccgtgacccccagatggcccgaggtgcccagcgccaacacctgctacaccagccccagcgtgcacagcgccagatacggcaacagcagcgacatgtacacccccctgaccaccagaagaaacagcgagtacgagcacatgcagcacttccccggcttcgcctacatcaacggcgaggccagcaccggctgggccaagtag

SEQ ID NO: 98504 - DNA, 2907 bp, synthetic construct
  misc_feature 1..2907: note = Description of Artificial Sequence: Synthetic coding sequence
  source 1..2907: mol_type = other DNA
atggccttcgccaacttcagaagaatcctgagactgagcaccttcgagaagagaaagagcagagagtacgagcacgtgagaagagacctggaccccaacgaggtgtgggagatcgtgggcgagctgggcgacggcgccttcggcaaggtgtacaaggccaagaacaaggagaccggcgccctggccgccgccaaggtgatcgagaccaagagcgaggaggagctggaggactacatcgtggagatcgagatcctggccacctgcgaccacccctacatcgtgaagctgctgggcgcctactaccacgacggcaagctgtggatcatgatcgagttctgccccggcggcgccgtggacgccatcatgctggagctggacagaggcctgaccgagccccagatccaggtggtgtgcagacagatgctggaggccctgaacttcctgcacagcaagagaatcatccacagagacctgaaggccggcaacgtgctgatgaccctggagggcgacatcagactggccgacttcggcgtgagcgccaagaacctgaagaccctgcagaagagagacagcttcatcggcaccccctactggatggcccccgaggtggtgatgtgcgagaccatgaaggacaccccctacgactacaaggccgacatctggagcctgggcatcaccctgatcgagatggcccagatcgagcccccccaccacgagctgaaccccatgagagtgctgctgaagatcgccaagagcgacccccccaccctgctgacccccagcaagtggagcgtggagttcagagacttcctgaagatcgccctggacaagaaccccgagaccagacccagcgccgcccagctgctggagcaccccttcgtgagcagcatcaccagcaacaaggccctgagagagctggtggccgaggccaaggccgaggtgatggaggagatcgaggacggcagagacgagggcgaggaggaggacgccgtggacgccgccagcaccctggagaaccacacccagaacagcagcgaggtgagcccccccagcctgaacgccgacaagcccctggaggagagccccagcacccccctggcccccagccagagccaggacagcgtgaacgagccctgcagccagcccagcggcgacagaagcctgcagaccaccagcccccccgtggtggcccccggcaacgagaacggcctggccgtgcccgtgcccctgagaaagagcagacccgtgagcatggacgccagaatccaggtggcccaggagaagcaggtggccgagcagggcggcgacctgagccccgccgccaacagaagccagaaggccagccagagcagacccaacagcagcgccctggagaccctgggcggcgagaagctggccaacggcagcctggagccccccgcccaggccgcccccggccccagcaagagagacagcgactgcagcagcctgtgcaccagcgagagcatggactacggcaccaacctgagcaccgacctgagcctgaacaaggagatgggcagcctgagcatcaaggaccccaagctgtacaagaagaccctgaagagaaccagaaagttcgtggtggacggcgtggaggtgagcatcaccaccagcaagatcatcagcgaggacgagaagaaggacgaggagatgagattcctgagaagacaggagctgagagagctgagactgctgcagaaggaggagcacagaaaccagacccagctgagcaacaagcacgagctgcagctggagcagatgcacaagagattcgagcaggagatcaacgccaagaagaagttcttcgacaccgagctggagaacctggagagacagcagaagcagcaggtggagaagatggagcaggaccacgccgtgagaagaagagaggaggccagaagaatcagactggagcaggacagagactacaccagattccaggagcagctgaagctgatgaagaaggaggtgaagaacgaggtggagaagctgcccagacagcagagaaaggagagcatgaagcagaagatggaggagcacacccagaagaagcagctgctggacagagacttcgtggccaagcagaaggaggacctggagctggccatgaagagactgaccaccgacaacagaagagagatctgcgacaaggagagagagtgcctgatgaagaagcaggagctgctgagagacagagaggccgccctgtgggagatggaggagcaccagctgcaggagagacaccagctggtgaagcagcagctgaaggaccagtacttcctgcagagacacgagctgctgagaaagcacgagaaggagagagagcagatgcagagatacaaccagagaatgatcgagcagctgaaggtgagacagcagcaggagaaggccagactgcccaagatccagagaagcgagggcaagaccagaatggccatgtacaagaagagcctgcacatcaacggcggcggcagcgccgccgagcagagagagaagatcaagcagttcagccagcaggaggagaagagacagaagagcgagagactgcagcagcagcagaagcacgagaaccagatgagagacatgctggcccagtgcgagagcaacatgagcgagctgcagcagctgcagaacgagaagtgccacctgctggtggagcacgagacccagaagctgaaggccctggacgagagccacaaccagaacctgaaggagtggagagacaagctgagacccagaaagaaggccctggaggaggacctgaaccagaagaagagagagcaggagatgttcttcaagctgagcgaggaggccgagtgccccaaccccagcacccccagcaaggccgccaagttcttcccctacagcagcgccgacgccagctag

SEQ ID NO: 98505 - DNA, 2907 bp, synthetic construct; identical to SEQ ID NO: 98504
  misc_feature 1..2907: note = Description of Artificial Sequence: Synthetic coding sequence
  source 1..2907: mol_type = other DNA

SEQ ID NO: 98506 - DNA, 3300 bp, synthetic construct
  misc_feature 1..3300: note = Description of Artificial Sequence: Synthetic coding sequence
  source 1..3300: mol_type = other DNA
agattcggcagcgccccccagagacccgtggccatgaccaccgcccagagagacagcctgctgtggaagctggccggcctgctgagagagagcggcgacgtggtgctgagcggctgcagcaccctgagcctgctgacccccaccctgcagcagctgaaccacgtgttcgagctgcacctgggcccctggggccccggccagaccggcttcgtggccctgcccagccaccccgccgacagccccgtgatcctgcagctgcagttcctgttcgacgtgctgcagaagaccctgagcctgaagctggtgcacgtggccggccccggccccaccggccccatcaagatcttccccttcaagagcctgagacacctggagctgagaggcgtgcccctgcactgcctgcacggcctgagaggcatctacagccagctggagaccctgatctgcagcagaagcctgcaggccctggaggagctgctgagcgcctgcggcggcgacttctgcagcgccctgccctggctggccctgctgagcgccaacttcagctacaacgccctgaccgccctggacagcagcctgagactgctgagcgccctgagattcctgaacctgagccacaaccaggtgcaggactgccagggcttcctgatggacctgtgcgagctgcaccacctggacatcagctacaacagactgcacctggtgcccagaatgggccccagcggcgccgccctgggcgtgctgatcctgagaggcaacgagctgagaagcctgcacggcctggagcagctgagaaacctgagacacctggacctggcctacaacctgctggagggccacagagagctgagccccctgtggctgctggccgagctgagaaagctgtacctggagggcaaccccctgtggttccaccccgagcacagagccgccaccgcccagtacctgagccccagagccagagacgccgccaccggcttcctgctggacggcaaggtgctgagcctgaccgacttccagacccacaccagcctgggcctgagccccatgggcccccccctgccctggcccgtgggcagcacccccgagaccagcggcggccccgacctgagcgacagcctgagcagcggcggcgtggtgacccagcccctgctgcacaaggtgaagagcagagtgagagtgagaagagccagcatcagcgagcccagcgacaccgaccccgagcccagaaccctgaaccccagccccgccggctggttcgtgcagcagcaccccgagctggagctgatgagcagcttcagagagagattcggcagaaactggctgcagtacagaagccacctggagcccagcggcaaccccctgcccgccacccccaccaccagcgcccccagcgccccccccgccagcagccagggccccgacaccgcccccagacccagccccccccaggaggaggccagaggcccccaggagagcccccagaagatgagcgaggaggtgagagccgagccccaggaggaggaggaggagaaggagggcaaggaggagaaggaggagggcgagatggtggagcagggcgaggaggaggccggcgaggaggaggaggaggagcaggaccagaaggaggtggaggccgagctgtgcagacccctgctggtgtgccccctggagggccccgagggcgtgagaggcagagagtgcttcctgagagtgaccagcgcccacctgttcgaggtggagctgcaggccgccagaaccctggagagactggagctgcagagcctggaggccgccgagatcgagcccgaggcccaggcccagagaagccccagacccaccggcagcgacctgctgcccggcgcccccatcctgagcctgagattcagctacatctgccccgacagacagctgagaagatacctggtgctggagcccgacgcccacgccgccgtgcaggagctgctggccgtgctgacccccgtgaccaacgtggccagagagcagctgggcgaggccagagacctgctgctgggcagattccagtgcctgagatgcggccacgagttcaagcccgaggagcccagaatgggcctggacagcgaggagggctggagacccctgttccagaagaccgagagccccgccgtgtgccccaactgcggcagcgaccacgtggtgctgctggccgtgagcagaggcacccccaacagagagagaaagcagggcgagcagagcctggcccccagccccagcgccagccccgtgtgccacccccccggccacggcgaccacctggacagagccaagaacagccccccccaggcccccagcaccagagaccacggcagctggagcctgagccccccccccgagagatgcggcctgagaagcgtggaccacagactgagactgttcctggacgtggaggtgttcagcgacgcccaggaggagttccagtgctgcctgaaggtgcccgtggccctggccggccacaccggcgagttcatgtgcctggtggtggtgagcgacagaagactgtacctgctgaaggtgaccggcgagatgagagagccccccgccagctggctgcagctgaccctggccgtgcccctgcaggacctgagcggcatcgagctgggcctggccggccagagcctgagactggagtgggccgccggcgccggcagatgcgtgctgctgcccagagacgccagacactgcagagccttcctggaggagctgctggacgtgctgcagagcctgccccccgcctggagaaactgcgtgagcgccaccgaggaggaggtgaccccccagcacagactgtggcccctgctggagaaggacagcagcctggaggccagacagttcttctacctgagagccttcctggtggagggccccagcacctgcctggtgagcctgctgctgacccccagcaccctgttcctgctggacgaggacgccgccggcagccccgccgagcccagcccccccgccgccagcggcgaggccagcgagaaggtgccccccagcggccccggccccgccgtgagagtgagagagcagcagcccctgagcagcctgagcagcgtgctgctgtacagaagcgcccccgaggacctgagactgctgttctacgacgaggtgagcagactggagagcttctgggccctgagagtggtgtgccaggagcagctgaccgccctgctggcctggatcagagagccctgggaggagctgttcagcatcggcctgagaaccgtgatccaggaggccctggccctggacagatag

SEQ ID NO: 98507 - DNA, 1938 bp, synthetic construct
  misc_feature 1..1938: note = Description of Artificial Sequence: Synthetic coding sequence
  source 1..1938: mol_type = other DNA
agattcggcagcgccccccagagacccgtggccatgaccaccgcccagagagacagcctgctgtggaagctggccggcctgctgagagagagcggcgacgtggtgctgagcggctgcagcaccctgagcctgctgacccccaccctgcagcagctgaaccacgtgttcgagctgcacctgggcccctggggccccggccagaccggcttcgtggccctgcccagccaccccgccgacagccccgtgatcctgcagctgcagttcctgttcgacgtgctgcagaagaccctgagcctgaagctggtgcacgtggccggccccggccccaccggccccatcaagatcttccccttcaagagcctgagacacctggagctgagaggcgtgcccctgcactgcctgcacggcctgagaggcatctacagccagctggagaccctgatctgcagcagaagcctgcaggccctggaggagctgctgagcgcctgcggcggcgacttctgcagcgccctgccctggctggccctgctgagcgccaacttcagctacaacgccctgaccgccctggacagcagcctgagactgctgagcgccctgagattcctgaacctgagccacaaccaggtgcaggactgccagggcttcctgatggacctgtgcgagctgcaccacctggacatcagctacaacagactgcacctggtgcccagaatgggccccagcggcgccgccctgggcgtgctgatcctgagaggcaacgagctgagaagcctgcacggcctggagcagctgagaaacctgagacacctggacctggcctacaacctgctggagggccacagagagctgagccccctgtggctgctggccgagctgagaaagttcctgctggacggcaaggtgctgagcctgaccgacttccagacccacaccagcctgggcctgagccccatgggcccccccctgccctggcccgtgggcagcacccccgagaccagcggcggccccgacctgagcgacagcctgagcagcggcggcgtggtgacccagcccctgctgcacaaggtgaagagcagagtgagagtgagaagagccagcatcagcgagcccagcgacaccgaccccgagcccagaaccctgaaccccagccccgccggctggttcgtgcagcagcaccccgagctggagctgatgagcagcttcagagagagattcggcagaaactggctgcagtacagaagccacctggagcccagcggcaaccccctgcccgccacccccaccaccagcgcccccagcgccccccccgccagcagccagggccccgacaccgcccccagacccagccccccccaggaggaggccagaggcccccaggagagcccccagaagatgagcgaggaggtgagagccgagccccaggaggaggaggaggagaaggagggcaaggaggagaaggaggagggcgagatggtggagcagggcgaggaggaggccggcgaggaggaggaggaggagcaggaccagaaggaggtggaggccgagctgtgcagacccctgctggtgtgccccctggagggccccgagggcgtgagaggcagagagtgcttcctgagagtgaccagcgcccacctgttcgaggtggagctgcaggccgccagaaccctggagagactggagctgcagagcctggaggccgccgagatcgagcccgaggcccaggcccagagaagccccagacccaccggcagcgacctgctgcccggcgcccccatcctgagcctgagattcagctacatctgccccgacagacagctgagaagatacctggtgctggagcccgacgcccacgccgccgtgcaggtgatggcccccagagtgggcgcccaggaggccgtgggcatcaagagagccagaggcaagtggcagcaggcctag

SEQ ID NO: 98508 - DNA, 1095 bp, synthetic construct
  misc_feature 1..1095: note = Description of Artificial Sequence: Synthetic coding sequence
  source 1..1095: mol_type = other DNA
atgcagaagtggttcagcgccttcgacgacgccatcatccagagacagtggagagccaaccccagcagaggcggcggcggcgtgagcttcaccaaggaggtggacaccaacgtggccaccggcgccccccccagaagacagagagtgcccggcagagcctgcccctggagagagcccatcagaggcagaagaggcgccagacccggcggcggcgacgccggcggcacccccggcgagaccgtgagacactgcagcgcccccgaggaccccatcttcagattcagcagcctgcacagctaccccttccccggcaccatcaagagcagagacatgagctggaagagacaccacctgatccccgagaccttcggcgtgaagagaagaagaaagagaggccccgtggagagcgaccccctgagaggcgagcccggcagcgccagagccgccgtgagcgagctgatgcagctgttccccagaggcctgttcgaggacgccctgccccccatcgtgctgagaagccaggtgtacagcctggtgcccgacagaaccgtggccgacagacagctgaaggagctgcaggagcagggcgagatcagaatcgtgcagctgggcttcgacctggacgcccacggcatcatcttcaccgaggactacagaaccagagtgctgaaggcctgcgacggcagaccctacgccggcgccgtgcagaagttcctggccagcgtgctgcccgcctgcggcgacctgagcttccagcaggaccagatgacccagaccttcggcttcagagacagcgagatcacccacctggtgaacgccggcgtgctgaccgtgagagacgccggcagctggtggctggccgtgcccggcgccggcagattcatcaagtacttcgtgaagggcagacaggccgtgctgagcatggtgagaaaggccaagtacagagagctgctgctgagcgagctgctgggcagaagagcccccgtggtggtgagactgggcctgacctaccacgtgcacgacctgatcggcgcccagctggtggactgcatcagcaccaccagcggcaccctgctgagactgcccgagacctag

SEQ ID NO: 98509 - DNA, 1107 bp, synthetic construct
  misc_feature 1..1107: note = Description of Artificial Sequence: Synthetic coding sequence
  source 1..1107: mol_type = other DNA
atgcagaagtggttcagcgccttcgacgacgccatcatccagagacagtggagagccaaccccagcagaggcggcggcggcgtgagcttcaccaaggaggtggacaccaacgtggccaccggcgccccccccagaagacagagagtgcccggcagagcctgcccctggagagagcccatcagaggcagaagaggcgccagacccggcggcggcgacgccggcggcacccccggcgagaccgtgagacactgcagcgcccccgaggaccccatcttcagattcagcagcctgcacagctaccccttccccggcaccatcaagagcagagacatgagctggaagagacaccacctgatccccgagaccttcggcgtgaagagaagaagaaagagaggccccgtggagagcgaccccctgagaggcgagcccggcagcgccagagccgccgtgagcgagctgatgcagctgttccccagaggcctgttcgaggacgccctgccccccatcgtgctgagaagccaggtgtacagcctggtgcccgacagaaccgtggccgacagacagctgaaggagctgcaggagcagggcgagatcagaatcgtgcagctgggcttcgacctggacgcccacggcatcatcttcaccgaggactacagaaccagagtgtgcgactgcgtgctgaaggcctgcgacggcagaccctacgccggcgccgtgcagaagttcctggccagcgtgctgcccgcctgcggcgacctgagcttccagcaggaccagatgacccagaccttcggcttcagagacagcgagatcacccacctggtgaacgccggcgtgctgaccgtgagagacgccggcagctggtggctggccgtgcccggcgccggcagattcatcaagtacttcgtgaagggcagacaggccgtgctgagcatggtgagaaaggccaagtacagagagctgctgctgagcgagctgctgggcagaagagcccccgtggtggtgagactgggcctgacctaccacgtgcacgacctgatcggcgcccagctggtggactgcatcagcaccaccagcggcaccctgctgagactgcccgagacctag

SEQ ID NO: 98510 - DNA, 1107 bp, synthetic construct
  misc_feature 1..1107: note = Description of Artificial Sequence: Synthetic coding sequence
  source 1..1107: mol_type = other DNA
atgcagaagtggttcagcgccttcgacgacgccatcatccagagacagtggagagccaaccccagcagaggcggcggcggcgtgagcttcaccaaggaggtggacaccaacgtggccaccggcgccccccccagaagacagagagtgcccggcagagcctgcccctggagagagcccatcagaggcagaagaggcgccagacccggcggcggcgacgccggcggcacccccggcgagaccgtgagacactgcagcgcccccgaggaccccatcttcagattcagcagcctgcacagctaccccttccccggcaccatcaagagcagagacatgagctggaagagacaccacctgatccccgagaccttcggcgtgaagagaagaagaaagagaggccccgtggagagcgaccccctgagaggcgagcccggcagcgccagagccgccgtgagcgagctgatgcagctgttccccagaggcctgttcgaggacgccctgccccccatcgtgctgagaagccaggtgtacagcctggtgcccgacagaaccgtggccgacagacagctgaaggagctgcaggagcagggcgagatcagaatcgtgcagctgggcttcgacctggacgcccacggcatcatcttcaccgaggactacagaaccagagtgtgcgactgcgtgctgaaggcctgcgacggcagaccctacgccggcgccgtgcagaagttcctggccagcgtgctgcccgcctgcggcgacctgagcttccagcaggaccagatgacccagaccttcggcttcagagacagcgagatcacccacctggtgaacgccggcgtgctgaccgtgagagacgccggcagctggtggctggccgtgcccggcgccggcagattcatcaagtacttcgtgaagggcagacaggccgtgctgggcatggtgagaaaggccaagtacagagagctgctgctgagcgagctgctgggcagaagagcccccgtggtggtgagactgggcctgacctaccacgtgcacgacctgatcggcgcccagctggtggactgcatcagcaccaccagcggcaccctgctgagactgcccgagacctag

SEQ ID NO: 98511 - DNA, 1095 bp, synthetic construct
  misc_feature 1..1095: note = Description of Artificial Sequence: Synthetic coding sequence
  source 1..1095: mol_type = other DNA
atgcagaagtggttcagcgccttcgacgacgccatcatccagagacagtggagagccaaccccagcagaggcggcggcggcgtgagcttcaccaaggaggtggacaccaacgtggccaccggcgccccccccagaagacagagagtgcccggcagagcctgcccctggagagagcccatcagaggcagaagaggcgccagacccggcggcggcgacgccggcggcacccccggcgagaccgtgagacactgcagcgcccccgaggaccccatcttcagattcagcagcctgcacagctaccccttccccggcaccatcaagagcagagacatgagctggaagagacaccacctgatccccgagaccttcggcgtgaagagaagaagaaagagaggccccgtggagagcgaccccctgagaggcgagcccggcagcgccagagccgccgtgagcgagctgatgcagctgttccccagaggcctgttcgaggacgccctgccccccatcgtgctgagaagccaggtgtacagcctggtgcccgacagaaccgtggccgacagacagctgaaggagctgcaggagcagggcgagatcagaatcgtgcagctgggcttcgacctggacgcccacggcatcatcttcaccgaggactacagaaccagagtgctgaaggcctgcgacggcagaccctacgccggcgccgtgcagaagttcctggccagcgtgctgcccgcctgcggcgacctgagcttccagcaggaccagatgacccagaccttcggcttcagagacagcgagatcacccacctggtgaacgccggcgtgctgaccgtgagagacgccggcagctggtggctggccgtgcccggcgccggcagattcatcaagtacttcgtgaagggcagacaggccgtgctgggcatggtgagaaaggccaagtacagagagctgctgctgagcgagctgctgggcagaagagcccccgtggtggtgagactgggcctgacctaccacgtgcacgacctgatcggcgcccagctggtggactgcatcagcaccaccagcggcaccctgctgagactgcccgagacctag

SEQ ID NO: 98512 - DNA, 1095 bp, synthetic construct; identical to SEQ ID NO: 98508
  misc_feature 1..1095: note = Description of Artificial Sequence: Synthetic coding sequence
  source 1..1095: mol_type = other DNA

SEQ ID NO: 98513 - DNA, 1095 bp, synthetic construct; identical to SEQ ID NO: 98508
  misc_feature 1..1095: note = Description of Artificial Sequence: Synthetic coding sequence
  source 1..1095: mol_type = other DNA

SEQ ID NO: 98514 - DNA, 1095 bp, synthetic construct; identical to SEQ ID NO: 98508
  misc_feature 1..1095: note = Description of Artificial Sequence: Synthetic coding sequence
  source 1..1095: mol_type = other DNA

SEQ ID NO: 98515 - DNA, 1107 bp, synthetic construct; identical to SEQ ID NO: 98509
  misc_feature 1..1107: note = Description of Artificial Sequence: Synthetic coding sequence
  source 1..1107: mol_type = other DNA

SEQ ID NO: 98516 - DNA, 1107 bp, synthetic construct; identical to SEQ ID NO: 98509
  misc_feature 1..1107: note = Description of Artificial Sequence: Synthetic coding sequence
  source 1..1107: mol_type = other DNA

SEQ ID NO: 98517 - DNA, 1107 bp, synthetic construct; identical to SEQ ID NO: 98509
  misc_feature 1..1107: note = Description of Artificial Sequence: Synthetic coding sequence
  source 1..1107: mol_type = other DNA

SEQ ID NO: 98518 - DNA, 1095 bp, synthetic construct; identical to SEQ ID NO: 98508
  misc_feature 1..1095: note = Description of Artificial Sequence: Synthetic coding sequence
  source 1..1095: mol_type = other DNA

SEQ ID NO: 98519 - DNA, 1107 bp, synthetic construct; identical to SEQ ID NO: 98509
  misc_feature 1..1107: note = Description of Artificial Sequence: Synthetic coding sequence
  source 1..1107: mol_type = other DNA

SEQ ID NO: 98520 - DNA, 339 bp, synthetic construct
  misc_feature 1..339: note = Description of Artificial Sequence: Synthetic coding sequence
  source 1..339: mol_type = other DNA
atgcagaagtggttcagcgccttcgacgacgccatcatccagagacagtggagagccaaccccagcagaggcggcggcggcgtgagcttcaccaaggaggtggacaccaacgtggccaccggcgccccccccagaagacagagagtgcccggcagagcctgcccctggagagagcccatcagaggcagaagaggcgccagacccggcggcggcgacgccggcggcacccccggcgagaccgtgagacactgcagcgcccccgaggaccccatcttcagattcagcagcctgcacagctaccccttccccggcaccatcaagagcagagacatgagctag

SEQ ID NO: 98521 - DNA, 966 bp, synthetic construct
  misc_feature 1..966: note = Description of Artificial Sequence: Synthetic coding sequence
  source 1..966: mol_type = other DNA
atgctggtgtgcgccagccccccccccctgcccgccctgaccggcctgagagacgacaagctgaccctgctgagcagcagccccggcctgggcggcacccccggcgagaccgtgagacactgcagcgcccccgaggaccccatcttcagattcagcagcctgcacagctaccccttccccggcaccatcaagagcagagacatgagctggaagagacaccacctgatccccgagaccttcggcgtgaagagaagaagaaagagaggccccgtggagagcgaccccctgagaggcgagcccggcagcgccagagccgccgtgagcgagctgatgcagctgttccccagaggcctgttcgaggacgccctgccccccatcgtgctgagaagccaggtgtacagcctggtgcccgacagaaccgtggccgacagacagctgaaggagctgcaggagcagggcgagatcagaatcgtgcagctgggcttcgacctggacgcccacggcatcatcttcaccgaggactacagaaccagagtgctgaaggcctgcgacggcagaccctacgccggcgccgtgcagaagttcctggccagcgtgctgcccgcctgcggcgacctgagcttccagcaggaccagatgacccagaccttcggcttcagagacagcgagatcacccacctggtgaacgccggcgtgctgaccgtgagagacgccggcagctggtggctggccgtgcccggcgccggcagattcatcaagtacttcgtgaagggcagacaggccgtgctgggcatggtgagaaaggccaagtacagagagctgctgctgagcgagctgctgggcagaagagcccccgtggtggtgagactgggcctgacctaccacgtgcacgacctgatcggcgcccagctggtggactgcatcagcaccaccagcggcaccctgctgagactgcccgagacctag

SEQ ID NO: 98522 - DNA, 966 bp, synthetic construct
  misc_feature 1..966: note = Description of Artificial Sequence: Synthetic coding sequence
  source 1..966: mol_type = other DNA
atgctggtgtgcgccagccccccccccctgcccgccctgaccggcctgagagacgacaagctgaccctgctgagcagcagccccggcctgggcggcacccccggcgagaccgtgagacactgcagcgcccccgaggaccccatcttcagattcagcagcctgcacagctaccccttccccggcaccatcaagagcagagacatgagctggaagagacaccacctgatccccgagaccttcggcgtgaagagaagaagaaagagaggccccgtggagagcgaccccctgagaggcgagcccggcagcgccagagccgccgtgagcgagctgatgcagctgttccccagaggcctgttcgaggacgccctgccccccatcgtgctgagaagccaggtgtacagcctggtgcccgacagaaccgtggccgacagacagctgaaggagctgcaggagcagggcgagatcagaatcgtgcagctgggcttcgacctggacgcccacggcatcatcttcaccgaggactacagaaccagagtgctgaaggcctgcgacggcagaccctacgccggcgccgtgcagaagttcctggccagcgtgctgcccgcctgcggcgacctgagcttccagcaggaccagatgacccagaccttcggcttcagagacagcgagatcacccacctggtgaacgccggcgtgctgaccgtgagagacgccggcagctggtggctggccgtgcccggcgccggcagattcatcaagtacttcgtgaagggcagacaggccgtgctgagcatggtgagaaaggccaagtacagagagctgctgctgagcgagctgctgggcagaagagcccccgtggtggtgagactgggcctgacctaccacgtgcacgacctgatcggcgcccagctggtggactgcatcagcaccaccagcggcaccctgctgagactgcccgagacctag

SEQ ID NO: 98523 - DNA, 966 bp, synthetic construct; identical to SEQ ID NO: 98522
  misc_feature 1..966: note = Description of Artificial Sequence: Synthetic coding sequence
  source 1..966: mol_type = other DNA

SEQ ID NO: 98524 - DNA, 966 bp, synthetic construct; identical to SEQ ID NO: 98522
  misc_feature 1..966: note = Description of Artificial Sequence: Synthetic coding sequence
  source 1..966: mol_type = other DNA

SEQ ID NO: 98525 - DNA, 966 bp, synthetic construct; identical to SEQ ID NO: 98522
  misc_feature 1..966: note = Description of Artificial Sequence: Synthetic coding sequence
  source 1..966: mol_type = other DNA

SEQ ID NO: 98526 - DNA, 1320 bp, synthetic construct
  misc_feature 1..1320: note = Description of Artificial Sequence: Synthetic coding sequence
  source 1..1320: mol_type = other DNA
atgcagaacctgaaggccgaccccgaggagctgttcaccaagctggagaagatcggcaagggcagcttcggcgaggtgttcaagggcatcgacaacagaacccagaaggtggtggccatcaagatcatcgacctggaggaggccgaggacgagatcgaggacatccagcaggagatcaccgtgctgagccagtgcgacagcccctacgtgaccaagtactacggcagctacctgaaggacaccaagctgtggatcatcatggagtacctgggcggcggcagcgccctggacctgctggagcccggccccctggacgagacccagatcgccaccatcctgagagagatcctgaagggcctggactacctgcacagcgagaagaagatccacagagacatcaaggccgccaacgtgctgctgagcgagcacggcgaggtgaagctggccgacttcggcgtggccggccagctgaccgacacccagatcaagagaaacaccttcgtgggcacccccttctggatggcccccgaggtgatcaagcagagcgcctacgacagcaaggccgacatctggagcctgggcatcaccgccatcgagctggccagaggcgagcccccccacagcgagctgcaccccatgaaggtgctgttcctgatccccaagaacaacccccccaccctggagggcaactacagcaagcccctgaaggagttcgtggaggcctgcctgaacaaggagcccagcttcagacccaccgccaaggagctgctgaagcacaagttcatcctgagaaacgccaagaagaccagctacctgaccgagctgatcgacagatacaagagatggaaggccgagcagagccacgacgacagcagcagcgaggacagcgacgccgagaccgacggccaggccagcggcggcagcgacagcggcgactggatcttcaccatcagagagaaggaccccaagaacctggagaacggcgccctgcagcccagcgacctggacagaaacaagatgaaggacatccccaagagacccttcagccagtgcctgagcaccatcatcagccccctgttcgccgagctgaaggagaagagccaggcctgcggcggcaacctgggcagcatcgaggagctgagaggcgccatctacctggccgaggaggcctgccccggcatcagcgacaccatggtggcccagctggtgcagagactgcagagaagcatccacggcaaccaggccccccccgactgccacctggcccaggtgcaggccttcggcggcagcggctgcgtgctgggcagcagaagcgtgtag

SEQ ID NO: 98527 - DNA, 672 bp, synthetic construct
  misc_feature 1..672: note = Description of Artificial Sequence: Synthetic coding sequence
  source 1..672: mol_type = other DNA
atggcccccgaggtgatcaagcagagcgcctacgacagcaaggccgacatctggagcctgggcatcaccgccatcgagctggccagaggcgagcccccccacagcgagctgcaccccatgaaggtgctgttcctgatccccaagaacaacccccccaccctggagggcaactacagcaagcccctgaaggagttcgtggaggcctgcctgaacaaggagcccagcttcagacccaccgccaaggagctgctgaagcacaagttcatcctgagaaacgccaagaagaccagctacctgaccgagctgatcgacagatacaagagatggaaggccgagcagagccacgacgacagcagcagcgaggacagcgacgccgagaccgacggccaggccagcggcggcagcgacagcggcgactggatcttcaccatcagagagaaggaccccaagaacctggagaacggcgccctgcagcccagcgacctggacagaaacaagctgaaggagaagagccaggcctgcggcggcaacctgggcagcatcgaggagctgagaggcgccatctacctggccgaggaggcctgccccggcatcagcgacaccatggtggcccagctggtgcagagactgcagagatacagcctgagcggcggcggcaccagcagccactag

SEQ ID NO: 98528 - DNA, 1332 bp, synthetic construct
  misc_feature 1..1332: note = Description of Artificial Sequence: Synthetic coding sequence
  source 1..1332: mol_type = other DNA
atggacagcagagcccagctgtggggcctggccctgaacaagagaagagccaccctgccccaccccggcggcagcaccaacctgaaggccgaccccgaggagctgttcaccaagctggagaagatcggcaagggcagcttcggcgaggtgttcaagggcatcgacaacagaacccagaaggtggtggccatcaagatcatcgacctggaggaggccgaggacgagatcgaggacatccagcaggagatcaccgtgctgagccagtgcgacagcccctacgtgaccaagtactacggcagctacctgaaggacaccaagctgtggatcatcatggagtacctgggcggcggcagcgccctggacctgctggagcccggccccctggacgagacccagatcgccaccatcctgagagagatcctgaagggcctggactacctgcacagcgagaagaagatccacagagacatcaaggccgccaacgtgctgctgagcgagcacggcgaggtgaagctggccgacttcggcgtggccggccagctgaccgacacccagatcaagagaaacaccttcgtgggcacccccttctggatggcccccgaggtgatcaagcagagcgcctacgacagcaaggccgacatctggagcctgggcatcaccgccatcgagctggccagaggcgagcccccccacagcgagctgcaccccatgaaggtgctgttcctgatccccaagaacaacccccccaccctggagggcaactacagcaagcccctgaaggagttcgtggaggcctgcctgaacaaggagcccagcttcagacccaccgccaaggagctgctgaagcacaagttcatcctgagaaacgccaagaagaccagctacctgaccgagctgatcgacagatacaagagatggaaggccgagcagagccacgacgacagcagcagcgaggacagcgacgccgagaccgacggccaggccagcggcggcagcgacagcggcgactggatcttcaccatcagagagaaggaccccaagaacctggagaacggcgccctgcagcccagcgacctggacagaaacaagatgaaggacatccccaagagacccttcagccagtgcctgagcaccatcatcagccccctgttcgccgagctgaaggagaagagccaggcctgcggcggcaacctgggcagcatcgaggagctgagaggcgccatctacctggccgaggaggcctgccccggcatcagcgacaccatggtggcccagctggtgcagagactgcagagatacagcctgagcggcggcggcaccagcagccactag

SEQ ID NO: 98529 - DNA, 1296 bp, synthetic construct
  misc_feature 1..1296: note = Description of Artificial Sequence: Synthetic coding sequence
  source 1..1296: mol_type = other DNA
atggcccacagccccgtgcagagcggcctgcccggcatgcagaacctgaaggccgaccccgaggagctgttcaccaagctggagaagatcggcaagggcagcttcggcgaggtgttcaagggcatcgacaacagaacccagaaggtggtggccatcaagatcatcgacctggaggaggccgaggacgagatcgaggacatccagcaggagatcaccgtgctgagccagtgcgacagcccctacgtgaccaagtactacggcagctacctgaaggacaccaagctgtggatcatcatggagtacctgggcggcggcagcgccctggacctgctggagcccggccccctggacgagacccagatcgccaccatcctgagagagatcctgaagggcctggactacctgcacagcgagaagaagatccacagagacatcaaggccgccaacgtgctgctgagcgagcacggcgaggtgaagctggccgacttcggcgtggccggccagctgaccgacacccagatcaagagaaacaccttcgtgggcacccccttctggatggcccccgaggtgatcaagcagagcgcctacgacagcaaggccgacatctggagcctgggcatcaccgccatcgagctggccagaggcgagcccccccacagcgagctgcaccccatgaaggtgctgttcctgatccccaagaacaacccccccaccctggagggcaactacagcaagcccctgaaggagttcgtggaggcctgcctgaacaaggagcccagcttcagacccaccgccaaggagctgctgaagcacaagttcatcctgagaaacgccaagaagaccagctacctgaccgagctgatcgacagatacaagagatggaaggccgagcagagccacgacgacagcagcagcgaggacagcgacgccgagaccgacggccaggccagcggcggcagcgacagcggcgactggatcttcaccatcagagagaaggaccccaagaacctggagaacggcgccctgcagcccagcgacctggacagaaacaagatgaaggacatccccaagagacccttcagccagtgcctgagcaccatcatcagccccctgttcgccgagctgaaggagaagagccaggcctgcggcggcaacctgggcagcatcgaggagctgagaggcgccatctacctggccgaggaggcctgccccggcatcagcgacaccatggtggcccagctggtgcagagactgcagagatacagcctgagcggcggcggcaccagcagccactag

SEQ ID NO: 98530 - DNA, 1239 bp, synthetic construct
  misc_feature 1..1239: note = Description of Artificial Sequence: Synthetic coding sequence
  source 1..1239: mol_type = other DNA
atggcccacagccccgtgcagagcggcctgcccggcatgcagaacctgaaggccgaccccgaggagctgttcaccaagctggagaagatcggcaagggcagcttcggcgaggtgttcaagggcatcgacaacagaacccagaaggtggtggccatcaagatcatcgacctggaggaggccgaggacgagatcgaggacatccagcaggagatcaccgtgctgagccagtgcgacagcccctacgtgaccaagtactacggcagctacctgaagctggagcccggccccctggacgagacccagatcgccaccatcctgagagagatcctgaagggcctggactacctgcacagcgagaagaagatccacagagacatcaaggccgccaacgtgctgctgagcgagcacggcgaggtgaagctggccgacttcggcgtggccggccagctgaccgacacccagatcaagagaaacaccttcgtgggcacccccttctggatggcccccgaggtgatcaagcagagcgcctacgacagcaaggccgacatctggagcctgggcatcaccgccatcgagctggccagaggcgagcccccccacagcgagctgcaccccatgaaggtgctgttcctgatccccaagaacaacccccccaccctggagggcaactacagcaagcccctgaaggagttcgtggaggcctgcctgaacaaggagcccagcttcagacccaccgccaaggagctgctgaagcacaagttcatcctgagaaacgccaagaagaccagctacctgaccgagctgatcgacagatacaagagatggaaggccgagcagagccacgacgacagcagcagcgaggacagcgacgccgagaccgacggccaggccagcggcggcagcgacagcggcgactggatcttcaccatcagagagaaggaccccaagaacctggagaacggcgccctgcagcccagcgacctggacagaaacaagatgaaggacatccccaagagacccttcagccagtgcctgagcaccatcatcagccccctgttcgccgagctgaaggagaagagccaggcctgcggcggcaacctgggcagcatcgaggagctgagaggcgccatctacctggccgaggaggcctgccccggcatcagcgacaccatggtggcccagctggtgcagagactgcagagatacagcctgagcggcggcggcaccagcagccactag

SEQ ID NO: 98531 - DNA, 1029 bp, synthetic construct
  misc_feature 1..1029: note = Description of Artificial Sequence: Synthetic coding sequence
  source 1..1029: mol_type = other DNA
atggcccacagccccgtgcagagcggcctgcccggcatgcagaacctgaaggccgaccccgaggagctgttcaccaagctggagaagatcggcaagggcagcttcggcgaggtgttcaagggcatcgacaacagaacccagaaggtggtggccatcaagatcatcgacctggaggaggccgaggacgagatcgaggacatccagcaggagatcaccgtgctgagccagtgcgacagcccctacgtgaccaagtactacggcagctacctgaaggacaccaagctgtggatcatcatggagtacctgggcggcggcagcgccctggacctgctggagcccggccccctggacgagacccagatcgccaccatcctgagagagatcctgaagggcctggactacctgcacagcgagaagaagatccacagagacatcaaggccgccaacgtgctgctgagcgagcacggcgaggtgaagctggccgacttcggcgtggccggccagctgaccgacacccagatcaagagaaacaccttcgtgggcacccccttctggatggcccccgaggtgatcaagcagagcgcctacgacagcaaggccgacatctggagcctgggcatcaccgccatcgagctggccagaggcgagcccccccacagcgagctgcaccccatgaaggtgctgttcctgatccccaagaacaacccccccaccctggagggcaactacagcaagcccctgaaggagttcgtggaggcctgcctgaacaaggagcccagcttcagacccaccgccaaggagctgctgaagcacaagttcatcctgagaaacgccaagaagaccagctacctgaccgagctgatcgacagatacaagagatggaaggccgagcagagccacgacgacagcagcagcgaggacagcgacgccgagaccgacggccaggccagcggcggcagcgacagcggcgactggatcttcaccatcagagagtggagcagcagcgccatcggcctgggccagaagtag

SEQ ID NO: 98532 - DNA, 2991 bp, synthetic construct
  misc_feature 1..2991: note = Description of Artificial Sequence: Synthetic coding sequence
  source 1..2991: mol_type = other DNA
atggacgaggacacccactacgacaaggtggaggacgtggtgggcagccacatcgaggacgccgtgaccttctgggcccagagcatcaacagaaacaaggacatcatgaagatcggctgcagcctgagcgaggtgtgcccccaggccagcagcgtgctgggcaacctggaccccaacaagatctacggcggcctgttcagcgaggaccagtgctggtacagatgcaaggtgctgaagatcatcagcgtggagaagtgcctggtgagatacatcgactacggcaacaccgagatcctgaacagaagcgacatcgtggagatccccctggagctgcagttcagcagcgtggccaagaagtacaagctgtggggcctgcacatccccagcgaccaggaggtgacccagttcgaccagggcaccaccttcctgggcagcctgatcttcgagaaggagatcaagatgagaatcaaggccaccagcgaggacggcaccgtgatcgcccaggccgagtacggcagcgtggacatcggcgaggaggtgctgaagaagggcttcgccgagaagtgcagactggccagcagaaccgacatctgcgaggagaagaagctggaccccggccagctggtgctgagaaacctgaagagccccatccccctgtggggccacagaagcaaccagagcaccttcagcagacccaagggccacctgagcgagaagatgaccctggacctgaaggacgagaacgacgccggcaacctgatcaccttccccaaggagagcctggccgtgggcgacttcaacctgggcagcaacgtgagcctggagaagatcaagcaggaccagaagctgatcgaggagaacgagaagctgaagaccgagaaggacgccctgctggagagctacaaggccctggagctgaaggtggagcagatcgcccaggagctgcagcaggagaaggccgccgccgtggacctgaccaaccacctggagtacaccctgaagacctacatcgacaccagaatgaagaacctggccgccaagatggagatcctgaaggagatgagacacgtggacatcagcgtgagattcggcaaggacctgagcgacgccatccaggtgctggacgagggctgcttcaccacccccgccagcctgaacggcctggagatcatctgggccgagtacagcctggcccaggagaacatcaagacctgcgagtacgtgagcgagggcaacatcctgatcgcccagagaaacgagatgcagcagaagctgtacatgagcgtggaggacttcatcctggaggtggacgagagcagcctgaacaagagactgaagaccctgcaggacctgagcgtgagcctggaggccgtgtacggccaggccaaggagggcgccaacagcgacgagatcctgaagaagttctacgactggaagtgcgacaagagagaggagttcaccagcgtgagaagcgagaccgacgccagcctgcacagactggtggcctggttccagagaaccctgaaggtgttcgacctgagcgtggagggcagcctgatcagcgaggacgccatggacaacatcgacgagatcctggagaagaccgagagcagcgtgtgcaaggagctggagatcgccctggtggaccagggcgacgccgacaaggagatcatcagcaacacctacagccaggtgctgcagaagatccacagcgaggagagactgatcgccaccgtgcaggccaagtacaaggacagcatcgagttcaagaagcagctgatcgagtacctgaacaagagccccagcgtggaccacctgctgagcatcaagaagaccctgaagagcctgaaggccctgctgagatggaagctggtggagaagagcaacctggaggagagcgacgaccccgacggcagccagatcgagaagatcaaggaggagatcacccagctgagaaacaacgtgttccaggagatctaccacgagagagaggagtacgagatgctgaccagcctggcccagaagtggttccccgagctgcccctgctgcaccccgagatcggcctgctgaagtacatgaacagcggcggcctgctgaccatgagcctggagagagacctgctggacgccgagcccatgaaggagctgagcagcaagagacccctggtgagaagcgaggtgaacggccagatcatcctgctgaagggctacagcgtggacgtggacaccgaggccaaggtgatcgagagagccgccacctaccacagagcctggagagaggccgagggcgacagcggcctgctgcccctgatcttcctgttcctgtgcaagagcgaccccatggcctacctgatggtgccctactaccccagagccaacctgaacgccgtgcaggccaacatgcccctgaacagcgaggagaccctgaaggtgatgaagggcgtggcccagggcctgcacaccctgcacaaggccgacatcatccacggcagcctgcaccagaacaacgtgttcgccctgaacagagagcagggcatcgtgggcgacttcgacttcaccaagagcgtgagccagagagccagcgtgaacatgatggtgggcgacctgagcctgatgagccccgagctgaagatgggcaagcccgccagccccggcagcgacctgtacgcctacggctgcctgctgctgtggctgagcgtgcagaaccaggagttcgagatcaacaaggacggcatccccaaggtggaccagttccacctggacgacaaggtgaagagcctgctgtgcagcctgatctgctacagaagcagcatgaccgccgagcaggtgctgaacgccgagtgcttcctgatgcccaaggagcagagcgtgcccaaccccgagaaggacaccgagtacaccctgtacaagaaggaggaggagatcaagaccgagaacctggacaagtgcatggagaagaccagaaacggcgaggccaacttcgactgctag

SEQ ID NO: 98533 - DNA, 3060 bp, synthetic construct
  misc_feature 1..3060: note = Description of Artificial Sequence: Synthetic coding sequence
  source 1..3060: mol_type = other DNA
atgtgggtgcagggccacagcagcagagccagcgccaccgagagcgtgagcttcagcggcatcgtgcagatggacgaggacacccactacgacaaggtggaggacgtggtgggcagccacatcgaggacgccgtgaccttctgggcccagagcatcaacagaaacaaggacatcatgaagatcggctgcagcctgagcgaggtgtgcccccaggccagcagcgtgctgggcaacctggaccccaacaagatctacggcggcctgttcagcgaggaccagtgctggtacagatgcaaggtgctgaagatcatcagcgtggagaagtgcctggtgagatacatcgactacggcaacaccgagatcctgaacagaagcgacatcgtggagatccccctggagctgcagttcagcagcgtggccaagaagtacaagctgtggggcctgcacatccccagcgaccaggaggtgacccagttcgaccagggcaccaccttcctgggcagcctgatcttcgagaaggagatcaagatgagaatcaaggccaccagcgaggacggcaccgtgatcgcccaggccgagtacggcagcgtggacatcggcgaggaggtgctgaagaagggcttcgccgagaagtgcagactggccagcagaaccgacatctgcgaggagaagaagctggaccccggccagctggtgctgagaaacctgaagagccccatccccctgtggggccacagaagcaaccagagcaccttcagcagacccaagggccacctgagcgagaagatgaccctggacctgaaggacgagaacgacgccggcaacctgatcaccttccccaaggagagcctggccgtgggcgacttcaacctgggcagcaacgtgagcctggagaagatcaagcaggaccagaagctgatcgaggagaacgagaagctgaagaccgagaaggacgccctgctggagagctacaaggccctggagctgaaggtggagcagatcgcccaggagctgcagcaggagaaggccgccgccgtggacctgaccaaccacctggagtacaccctgaagacctacatcgacaccagaatgaagaacctggccgccaagatggagatcctgaaggagatgagacacgtggacatcagcgtgagattcggcaaggacctgagcgacgccatccaggtgctggacgagggctgcttcaccacccccgccagcctgaacggcctggagatcatctgggccgagtacagcctggcccaggagaacatcaagacctgcgagtacgtgagcgagggcaacatcctgatcgcccagagaaacgagatgcagcagaagctgtacatgagcgtggaggacttcatcctggaggtggacgagagcagcctgaacaagagactgaagaccctgcaggacctgagcgtgagcctggaggccgtgtacggccaggccaaggagggcgccaacagcgacgagatcctgaagaagttctacgactggaagtgcgacaagagagaggagttcaccagcgtgagaagcgagaccgacgccagcctgcacagactggtggcctggttccagagaaccctgaaggtgttcgacctgagcgtggagggcagcctgatcagcgaggacgccatggacaacatcgacgagatcctggagaagaccgagagcagcgtgtgcaaggagctggagatcgccctggtggaccagggcgacgccgacaaggagatcatcagcaacacctacagccaggtgctgcagaagatccacagcgaggagagactgatcgccaccgtgcaggccaagtacaaggacagcatcgagttcaagaagcagctgatcgagtacctgaacaagagccccagcgtggaccacctgctgagcatcaagaagaccctgaagagcctgaaggccctgctgagatggaagctggtggagaagagcaacctggaggagagcgacgaccccgacggcagccagatcgagaagatcaaggaggagatcacccagctgagaaacaacgtgttccaggagatctaccacgagagagaggagtacgagatgctgaccagcctggcccagaagtggttccccgagctgcccctgctgcaccccgagatcggcctgctgaagtacatgaacagcggcggcctgctgaccatgagcctggagagagacctgctggacgccgagcccatgaaggagctgagcagcaagagacccctggtgagaagcgaggtgaacggccagatcatcctgctgaagggctacagcgtggacgtggacaccgaggccaaggtgatcgagagagccgccacctaccacagagcctggagagaggccgagggcgacagcggcctgctgcccctgatcttcctgttcctgtgcaagagcgaccccatggcctacctgatggtgccctactaccccagagccaacctgaacgccgtgcaggccaacatgcccctgaacagcgaggagaccctgaaggtgatgaagggcgtggcccagggcctgcacaccctgcacaaggccgacatcatccacggcagcctgcaccagaacaacgtgttcgccctgaacagagagcagggcatcgtgggcgacttcgacttcaccaagagcgtgagccagagagccagcgtgaacatgatggtgggcgacctgagcctgatgagccccgagctgaagatgggcaagcccgccagccccggcagcgacctgtacgcctacggctgcctgctgctgtggctgagcgtgcagaaccaggagttcgagatcaacaaggacggcatccccaaggtggaccagttccacctggacgacaaggtgaagagcctgctgtgcagcctgatctgctacagaagcagcatgaccgccgagcaggtgctgaacgccgagtgcttcctgatgcccaaggagcagagcgtgcccaaccccgagaaggacaccgagtacaccctgtacaagaaggaggaggagatcaagaccgagaacctggacaagtgcatggagaagaccagaaacggcgaggccaacttcgactgctag

SEQ ID NO: 98534 - DNA, 2991 bp, synthetic construct; identical to SEQ ID NO: 98532
  misc_feature 1..2991: note = Description of Artificial Sequence: Synthetic coding sequence
  source 1..2991: mol_type = other DNA

SEQ ID NO: 98535 - DNA, 285 bp, synthetic construct
  misc_feature 1..285: note = Description of Artificial Sequence: Synthetic coding sequence
  source 1..285: mol_type = other DNA
atggacgaggacacccactacgacaaggtggaggacgtggtgggcagccacatcgaggacgccgtgaccttctgggcccagagcatcaacagaaacaaggacatcatgaagatcggctgcagcctgagcgaggtgtgcccccaggccagcagcgtgctgggcaacctggaccccaacaagatctacggcggcctgttcagcgaggaccagtgctggtacagatgcaaggtgctgaagatcatcagcgtggagaagtgcctggtgagatacatcgactacggctag

SEQ ID NO: 98536 - DNA, 132 bp, synthetic construct
  misc_feature 1..132: note = Description of Artificial Sequence: Synthetic coding sequence
  source 1..132: mol_type = other DNA
atggacgaggacacccactacgacaaggtggaggacgtggtgggcagccacatcgaggacgccgtgaccttctgggcccagagcatcaacagaaacaaggacatcatgaagatcggctgcagcctgagctag

SEQ ID NO: 98537 - DNA, 2991 bp, synthetic construct
  misc_feature 1..2991: note = Description of Artificial Sequence: Synthetic coding sequence
  source 1..2991: mol_type = other DNA
atgtgggtgcagggccacagcagcagagccagcgccaccgagagcgtgagcttcagcggcatcgtgcagatggacgaggacacccactacgacaaggtggaggacgtggtgggcagccacatcgaggacgccgtgaccttctgggcccagagcatcaacagaaacaaggacatcatgaagatcggctgcagcctgagcgaggtgtgcccccaggccagcagcgtgctgggcaacctggaccccaacaagatctacggcggcctgttcagcgaggaccagtgctggtacagatgcaaggtgctgaagatcatcagcgtggagaagtgcctggtgagatacatcgactacggcaacaccgagatcctgaacagaagcgacatcgtggagatccccctggagctgcagttcagcagcgtggccaagaagtacaagctgtggggcctgcacatccccagcgaccaggaggtgacccagttcgaccagggcaccaccttcctgggcagcctgatcttcgagaaggagatcaagatgagaatcaaggccaccagcgaggacggcaccgtgatcgcccaggccgagtacggcagcgtggacatcggcgaggaggtgctgaagaagggcttcgccgagaagtgcagactggccagcagaaccgacatctgcgaggagaagaagctggaccccggccagctggtgctgagaaacctgaagagccccatccccctgtggggccacagaagcaaccagagcaccttcagcagacccaagggccacctgagcgagaagatgaccctggacctgaaggacgagaacgacgccggcaacctgatcaccttccccaaggagagcctggccgtgggcgacttcaacctgggcagcaacgtgagcctggagaagatcaagcaggaccagaagctgatcgaggagaacgagaagctgaagaccgagaaggacgccctgctggagagctacaaggccctggagctgaaggtggagcagatcgcccaggagctgcagcaggagaaggccgccgccgtggacctgaccaaccacctggagtacaccctgaagacctacatcgacaccagaatgaagaacctggccgccaagatggagatcctgaaggagatgagacacgtggacatcagcgtgagattcggcaaggacctgagcgacgccatccaggtgctggacgagggctgcttcaccacccccgccagcctgaacggcctggagatcatctgggccgagtacagcctggcccaggagaacatcaagacctgcgagtacgtgagcgagggcaacatcctgatcgcccagagaaacgagatgcagcagaagctgtacatgagcgtggaggacttcatcctggaggtggacgagagcagcctgaacaagagactgaagaccctgcaggacctgagcgtgagcctggaggccgtgtacggccaggccaaggagggcgccaacagcgacgagatcctgaagaagttctacgactggaagtgcgacaagagagaggagttcaccagcgtgagaagcgagaccgacgccagcctgcacagactggtggcctggttccagagaaccctgaaggtgttcgacctgagcgtggagggcagcctgatcagcgaggacgccatggacaacatcgacgagatcctggagaagaccgagagcagcgtgtgcaaggagctggagatcgccctggtggaccagggcgacgccgacaaggagatcatcagcaacacctacagccaggtgctgcagaagatccacagcgaggagagactgatcgccaccgtgcaggccaagtacaaggacagcatcgagttcaagaagcagctgatcgagtacctgaacaagagccccagcgtggaccacctgctgagcatcaagaagaccctgaagagcctgaaggccctgctgagatggaagctggtggagaagagcaacctggaggagagcgacgaccccgacggcagccagatcgagaagatcaaggaggagatcacccagctgagaaacaacgtgttccaggagatctaccacgagagagaggagtacgagatgctgaccagcctggcccagaagtggttccccgagctgcccctgctgcaccccgagatcggcctgctgaagtacatgaacagcggcggcctgctgaccatgagcctggagagagacctgctggacgccgagcccatgaaggagctgagcagcaagagacccctggtgagaagcgaggtgaacggccagatcatcctgctgaagggctacagcgtggacgtggacaccgaggccaaggtgatcgagagagccgccacctaccacagagcctggagagaggccgagggcgacagcggcctgctgcccctgatcttcctgttcctgtgcaagagcgaccccatggcctacctgatggtgccctactaccccagagccaacctgaacgccgtgcaggccaacatgcccctgaacagcgaggagaccctgaaggtgatgaagggcgtggcccagggcctgcacaccctgcacaaggccgacatcatccacggcagcctgcaccagaacaacgtgttcgccctgaacagagagcagggcatcgtgggcgacttcgacttcaccaagagcgtgagccagagagccagcgtgaacatgatggtgggcgacctgagcctgatgagccccgagctgaagatgggcaagcccgccagccccggcagcgacctgtacgcctacggctgcctgctgctgtgggacgacaaggtgaagagcctgctgtgcagcctgatctgctacagaagcagcatgaccgccgagcaggtgctgaacgccgagtgcttcctgatgcccaaggagcagagcgtgcccaaccccgagaaggacaccgagtacaccctgtacaagaaggaggaggagatcaagaccgagaacctggacaagtgcatggagaagaccagaaacggcgaggccaacttcgactgctag

SEQ ID NO: 98538 - DNA, 1545 bp, synthetic construct
  misc_feature 1..1545: note = Description of Artificial Sequence: Synthetic coding sequence
  source 1..1545: mol_type = other DNA
atggccgacagcggcctggacaagaagagcaccaagtgccccgactgcagcagcgccagccagaaggacgtgctgtgcgtgtgcagcagcaagaccagagtgccccccgtgctggtggtggagatgagccagaccagcagcatcggcagcgccgagagcctgatcagcctggagagaaagaaggagaagaacatcaacagagacatcaccagcagaaaggacctgcccagcagaaccagcaacgtggagagaaaggccagccagcagcagtggggcagaggcaacttcaccgagggcaaggtgccccacatcagaatcgagaacggcgccgccatcgaggagatctacaccttcggcagaatcctgggcaagggcagcttcggcatcgtgatcgaggccaccgacaaggagaccgagaccaagtgggccatcaagaaggtgaacaaggagaaggccggcagcagcgccgtgaagctgctggagagagaggtgaacatcctgaagagcgtgaagcacgagcacatcatccacctggagcaggtgttcgagacccccaagaagatgtacctggtgatggagctgtgcgaggacggcgagctgaaggagatcctggacagaaagggccacttcagcgagaacgagaccagatggatcatccagagcctggccagcgccatcgcctacctgcacaacaacgacatcgtgcacagagacctgaagctggagaacatcatggtgaagagcagcctgatcgacgacaacaacgagatcaacctgaacatcaaggtgaccgacttcggcctggccgtgaagaagcagagcagaagcgaggccatgctgcaggccacctgcggcacccccatctacatggcccccgaggtgatcagcgcccacgactacagccagcagtgcgacatctggagcatcggcgtggtgatgtacatgctgctgagaggcgagccccccttcctggccagcagcgaggagaagctgttcgagctgatcagaaagggcgagctgcacttcgagaacgccgtgtggaacagcatcagcgactgcgccaagagcgtgctgaagcagctgatgaaggtggaccccgcccacagaatcaccgccaaggagctgctggacaaccagtggctgaccggcaacaagctgagcagcgtgagacccaccaacgtgctggagatgatgaaggagtggaagaacaaccccgagagcgtggaggagaacaccaccgaggagaagaacaagcccagcaccgaggagaagctgaagagctaccagccctggggcaacgtgcccgacgccaactacaccagcgacgaggaggaggagaagcagagcaccgcctacgagaagcagttccccgccaccagcaaggacaacttcgacatgtgcagcagcagcttcaccagcagcaagctgctgcccgccgagatcaagggcgagatggagaagacccccgtgacccccagccagggcaccgccaccaagtaccccgccaagagcggcgccctgagcagaaccaagaagaagctgtag

SEQ ID NO: 98539 - DNA, 1545 bp, synthetic construct; identical to SEQ ID NO: 98538
  misc_feature 1..1545: note = Description of Artificial Sequence: Synthetic coding sequence
  source 1..1545: mol_type = other DNA

SEQ ID NO: 98540 - DNA, 1347 bp, synthetic construct
  misc_feature 1..1347: note = Description of Artificial Sequence: Synthetic coding sequence
  source 1..1347: mol_type = other DNA
atggccgacagcggcctggacaagaagagcaccaagtgccccgactgcagcagcgccagccagaaggacgtgctgtgcgtgtgcagcagcaagaccagagtgccccccgtgctggtggtggagatgagccagaccagcagcatcggcagcgccgagagcctgatcagcctggagagaaagaaggagaagaacatcaacagagacatcaccagcagaaaggacctgcccagcagaaccagcaacgtggagagaaaggccagccagcagcagtggggcagaggcaacttcaccgagggcaaggtgccccacatcagaatcgagaacggcgccgccatcgaggagatctacaccttcggcagaatcctgggcaagggcagcttcggcatcgtgatcgaggccaccgacaaggagaccgagaccaagtgggccatcaagaaggtgaacaaggagaaggccggcagcagcgccgtgaagctgctggagagagaggtgaacatcctgaagagcgtgaagcacgagcacatcatccacctggagcaggtgttcgagacccccaagaagatgtacctggtgatggagctgtgcgaggacggcgagctgaaggagatcctggacagaaagggccacttcagcgagaacgagaccagatggatcatccagagcctggccagcgccatcgcctacctgcacaacaacgacatcgtgcacagagacctgaagctggagaacatcatggtgaagagcagcctgatcgacgacaacaacgagatcaacctgaacatcaaggtgaccgacttcggcctggccgtgaagaagcagagcagaagcgaggccatgctgcaggccacctgcggcacccccatctacatggcccccgaggtgatcagcgcccacgactacagccagcagtgcgacatctggagcatcggcgtggtgatgtacatgctgctgagaggcgagccccccttcctggccagcagcgaggagaagctgttcgagctgatcagaaagggcgagctgcacttcgagaacgccgtgtggaacagcatcagcgactgcgccaagagcgtgctgaagcagctgatgaaggtggaccccgcccacagaatcaccgccaaggagctgctggacaaccagtggctgaccagcaccgcctacgagaagcagttccccgccaccagcaaggacaacttcgacatgtgcagcagcagcttcaccagcagcaagctgctgcccgccgagatcaagggcgagatggagaagacccccgtgacccccagccagggcaccgccaccaagtaccccgccaagagcggcgccctgagcagaaccaagaagaagctgtag

SEQ ID NO: 98541 - DNA, 192 bp, synthetic construct
  misc_feature 1..192: note = Description of Artificial Sequence: Synthetic coding sequence
  source 1..192: mol_type = other DNA
atggccgacagcggcctggacaagaagagcaccaagtgccccgactgcagcagcgccagccagaaggacgtgctgtgcgtgtgcagcagcaagaccagagtgccccccgtgctggtggtggagatgagccagaccagcagcatcggcagcgccgagagcctgatcagcctggagagaaagaaggagaagtag

SEQ ID NO: 98542 - DNA, 1545 bp, synthetic construct; identical to SEQ ID NO: 98538
  misc_feature 1..1545: note = Description of Artificial Sequence: Synthetic coding sequence
  source 1..1545: mol_type = other DNA

SEQ ID NO: 98543 - DNA, 114 bp, synthetic construct
  misc_feature 1..114: note = Description of Artificial Sequence: Synthetic coding sequence
  source 1..114: mol_type = other DNA
atggccgacagcggcctggacaagaagagcaccaagtgccccgactgcagcagcgccagccagaaggacgtgctgtgcgtgtgcagcagcaagaccagagtgccccccgtgtag

SEQ ID NO: 98544 - DNA, 516 bp, synthetic construct
  misc_feature 1..516: note = Description of Artificial Sequence: Synthetic coding sequence
  source 1..516: mol_type = other DNA
atggccgacagcggcctggacaagaagagcaccaagtgccccgactgcagcagcgccagccagaaggacgtgctgtgcgtgtgcagcagcaagaccagagtgccccccgtgctggtggtggagatgagccagaccagcagcatcggcagcgccgagagcctgatcagcctggagagaaagaaggagaagaacatcaacagagacatcaccagcagaaaggacctgcccagcagaaccagcaacgtggagagaaaggccagccagcagcagtggggcagaggcaacttcaccgagggcaaggtgccccacatcagaatcgagaacggcgccgccatcgaggagatctacaccttcggcagaatcctgggcaagggcagcttcggcatcgtgatcgaggccaccgacaaggagaccgagaccaagtgggccatcaagaaggtgaacaaggagaaggccggcagcagcgccgtgaagctgctggagagagaggtgaacatcctgaagagcgtgaagtag

SEQ ID NO: 98545 - DNA, 90 bp, synthetic construct
  misc_feature 1..90: note = Description of Artificial Sequence: Synthetic coding sequence
  source 1..90: mol_type = other DNA
atggccgacagcggcctggacaagaagagcaccaagtgccccgactgcagcagcgccagccagaaggacgtgctgtgcgtgtgcagctag

SEQ ID NO: 98546 - DNA, 1206 bp, synthetic construct
  misc_feature 1..1206: note = Description of Artificial Sequence: Synthetic coding sequence
  source 1..1206: mol_type = other DNA
atggagaccggcaaggacggcgccagaagaggcacccagagccccgagagaaagagaagaagccccgtgcccagagcccccagcaccaagctgagacccgccgccgccgccagagccatggaccccgtggccgccgaggcccccggcgaggccttcctggccagaagaagacccgagggcggcggcggcagcgccagacccagatacagcctgctggccgagatcggcagaggcagctacggcgtggtgtacgaggccgtggccggcagaagcggcgccagagtggccgtgaagaagatcagatgcgacgcccccgagaacgtggagctggccctggccgagttctgggccctgaccagcctgaagagaagacaccagaacgtggtgcagttcgaggagtgcgtgctgcagagaaacggcctggcccagagaatgagccacggcaacaagagcagccagctgtacctgagactggtggagaccagcctgaagggcgagagaatcctgggctacgccgaggagccctgctacctgtggttcgtgatggagttctgcgagggcggcgacctgaaccagtacgtgctgagcagaagacccgaccccgccaccaacaagagcttcatgctgcagctgaccagcgccatcgccttcctgcacaagaaccacatcgtgcacagagacctgaagcccgacaacatcctgatcaccgagagaagcggcacccccatcctgaaggtggccgacttcggcctgagcaaggtgtgcgccggcctggcccccagaggcaaggagggcaaccaggacaacaagaacgtgaacgtgaacaagtactggctgagcagcgcctgcggcagcgacttctacatggcccccgaggtgtgggagggccactacaccgccaaggccgacatcttcgccctgggcatcatcatctgggccatgatcgagagaatcaccttcatcgacagcgagaccaagaaggagctgctgggcacctacatcaagcagggcaccgagatcgtgcccgtgggcgaggccctgctggagaaccccaagatggagctgcacatcccccagaagagaagaaccagcatgagcgagggcatcaagcagctgctgaaggacatgctggccgccaacccccaggacagacccgacgccttcgagctggagaccagaatggaccaggtgacctgcgccgcctag

SEQ ID NO: 98547 - DNA, 1605 bp, synthetic construct
  misc_feature 1..1605: note = Description of Artificial Sequence: Synthetic coding sequence
  source 1..1605: mol_type = other DNA
atgggccaccaggagagccccctggccagagcccccgccggcggcgccgcctacgtgaagagactgtgcaagggcctgagctggagagagcacgtggagagccacggcagcctgggcgcccaggccagccccgccagcgccgccgccgccgagggcagcgccaccagaagagccagagccgccaccagcagagccgccagaagcagaagacagcccggccccggcgccgaccacccccaggccggcgcccccggcggcaagagagccgccagaaagtggagatgcgccggccaggtgaccatccagggccccgccccccccagacccagagccggcagaagagacgaggccggcggcgccagagccgcccccctgctgctgccccccccccccgccgccatggagaccggcaaggacggcgccagaagaggcacccagagccccgagagaaagagaagaagccccgtgcccagagcccccagcaccaagctgagacccgccgccgccgccagagccatggaccccgtggccgccgaggcccccggcgaggccttcctggccagaagaagacccgagggcggcggcggcagcgccagacccagatacagcctgctggccgagatcggcagaggcagctacggcgtggtgtacgaggccgtggccggcagaagcggcgccagagtggccgtgaagaagatcagatgcgacgcccccgagaacgtggagctggccctggccgagttctgggccctgaccagcctgaagagaagacaccagaacgtggtgcagttcgaggagtgcgtgctgcagagaaacggcctggcccagagaatgagccacggcaacaagagcagccagctgtacctgagactggtggagaccagcctgaagggcgagagaatcctgggctacgccgaggagccctgctacctgtggttcgtgatggagttctgcgagggcggcgacctgaaccagtacgtgctgagcagaagacccgaccccgccaccaacaagagcttcatgctgcagctgaccagcgccatcgccttcctgcacaagaaccacatcgtgcacagagacctgaagcccgacaacatcctgatcaccgagagaagcggcacccccatcctgaaggtggccgacttcggcctgagcaaggtgtgcgccggcctggcccccagaggcaaggagggcaaccaggacaacaagaacgtgaacgtgaacaagtactggctgagcagcgcctgcggcagcgacttctacatggcccccgaggtgtgggagggccactacaccgccaaggccgacatcttcgccctgggcatcatcatctgggccatgatcgagagaatcaccttcatcgacagcgagaccaagaaggagctgctgggcacctacatcaagcagggcaccgagatcgtgcccgtgggcgaggccctgctggagaaccccaagatggagctgcacatcccccagaagagaagaaccagcatgagcgagggcatcaagcagctgctgaaggacatgctggccgccaacccccaggacagacccgacgccttcgagctggagaccagaatggaccaggtgacctgcgccgcctag

SEQ ID NO: 98548 - DNA, 489 bp, synthetic construct
  misc_feature 1..489: note = Description of Artificial Sequence: Synthetic coding sequence
  source 1..489: mol_type = other DNA
atggaccccgtggccgccgaggcccccggcgaggccttcctggccagaagaagacccgagggcggcggcggcagcgccagacccagatacagcctgctggccgagatcggcagaggcagctacggcgtggtgtacgaggccgtggccggcagaagcggcgccagagtggccgtgaagaagatcagatgcgacgcccccgagaacgtggagctggccctggccgagttctgggccctgaccagcctgaagagaagacaccagaacgtggtgcagttcgaggagtgcgtgctgcagagaaacggcctggcccagagaatgagccacggcaacaagagcagccagctgtacctgagactggtggagaccagcctgaagggcagattcctgggcacccacagcctgaccaccagcccccccgaggacggcagaggctacagatggtggcccggcagactggccatcagcagacagctggaccccgccatgtag

SEQ ID NO: 98549 - DNA, 3948 bp, synthetic construct
  misc_feature 1..3948: note = Description of Artificial Sequence: Synthetic coding sequence
  source 1..3948: mol_type = other DNA
atggagaagtaccacgtgctggagatgatcggcgagggcagcttcggcagagtgtacaagggcagaagaaagtacagcgcccaggtggtggccctgaagttcatccccaagctgggcagaagcgagaaggagctgagaaacctgcagagagagatcgagatcatgagaggcctgagacaccccaacatcgtgcacatgctggacagcttcgagaccgacaaggaggtggtggtggtgaccgactacgccgagggcgagctgttccagatcctggaggacgacggcaagctgcccgaggaccaggtgcaggccatcgccgcccagctggtgagcgccctgtactacctgcacagccacagaatcctgcacagagacatgaagccccagaacatcctgctggccaagggcggcggcatcaagctgtgcgacttcggcttcgccagagccatgagcaccaacaccatggtgctgaccagcatcaagggcacccccctgtacatgagccccgagctggtggaggagagaccctacgaccacaccgccgacctgtggagcgtgggctgcatcctgtacgagctggccgtgggcaccccccccttctacgccaccagcatcttccagctggtgagcctgatcctgaaggaccccgtgagatggcccagcaccatcagcccctgcttcaagaacttcctgcagggcctgctgaccaaggaccccagacagagactgagctggcccgacctgctgtaccaccccttcatcgccggccacgtgaccatcatcaccgagcccgccggccccgacctgggcacccccttcaccagcagactgccccccgagctgcaggtgctgaaggacgagcaggcccacagactggcccccaagggcaaccagagcagaatcctgacccaggcctacaagagaatggccgaggaggccatgcagaagaagcaccagaacaccggccccgccctggagcaggaggacaagaccagcaaggtggcccccggcaccgcccccctgcccagactgggcgccaccccccaggagagcagcctgctggccggcatcctggccagcgagctgaagagcagctgggccaagagcggcaccggcgaggtgcccagcgcccccagagagaacagaaccacccccgactgcgagagagccttccccgaggagagacccgaggtgctgggccagagaagcaccgacgtggtggacctggagaacgaggagcccgacagcgacaacgagtggcagcacctgctggagaccaccgagcccgtgcccatccagctgaaggcccccctgaccctgctgtgcaaccccgacttctgccagagaatccagagccagctgcacgaggccggcggccagatcctgaagggcatcctggagggcgccagccacatcctgcccgccttcagagtgctgagcagcctgctgagcagctgcagcgacagcgtggccctgtacagcttctgcagagaggccggcctgcccggcctgctgctgagcctgctgagacacagccaggagagcaacagcctgcagcagcagagctggtacggcaccttcctgcaggacctgatggccgtgatccaggcctacttcgcctgcaccttcaacctggagagaagccagaccagcgacagcctgcaggtgttccaggaggccgccaacctgttcctggacctgctgggcaagctgctggcccagcccgacgacagcgagcagaccctgagaagagacagcctgatgtgcttcaccgtgctgtgcgaggccatggacggcaacagcagagccatcagcaaggccttctacagcagcctgctgaccacccagcaggtggtgctggacggcctgctgcacggcctgaccgtgccccagctgcccgtgcacaccccccagggcgccccccaggtgagccagcccctgagagagcagagcgaggacatccccggcgccatcagcagcgccctggccgccatctgcaccgcccccgtgggcctgcccgactgctgggacgccaaggagcaggtgtgctggcacctggccaaccagctgaccgaggacagcagccagctgagacccagcctgatcagcggcctgcagcaccccatcctgtgcctgcacctgctgaaggtgctgtacagctgctgcctggtgagcgagggcctgtgcagactgctgggccaggagcccctggccctggagagcctgttcatgctgatccagggcaaggtgaaggtggtggactgggaggagagcaccgaggtgaccctgtacttcctgagcctgctggtgttcagactgcagaacctgccctgcggcatggagaagctgggcagcgacgtggccaccctgttcacccacagccacgtggtgagcctggtgagcgccgccgcctgcctgctgggccagctgggccagcagggcgtgaccttcgacctgcagcccatggagtggatggccgccgccacccacgccctgagcgcccccgccgaggtgagactgaccccccccggcagctgcggcttctacgacggcctgctgatcctgctgctgcagctgctgaccgagcagggcaaggccagcctgatcagagacatgagcagcagcgagatgtggaccgtgctgtggcacagattcagcatggtgctgagactgcccgaggaggccagcgcccaggagggcgagctgagcctgagcagcccccccagccccgagcccgactggaccctgatcagcccccagggcatggccgccctgctgagcctggccatggccaccttcacccaggagccccagctgtgcctgagctgcctgagccagcacggcagcatcctgatgagcatcctgaagcacctgctgtgccccagcttcctgaaccagctgagacaggccccccacggcagcgagttcctgcccgtggtggtgctgagcgtgtgccagctgctgtgcttccccttcgccctggacatggacgccgacctgctgatcggcgtgctggccgacctgagagacagcgaggtggccgcccacctgctgcaggtgtgctgctaccacctgcccctgatgcaggtggagctgcccatcagcctgctgaccagactggccctgatggaccccaccagcctgaaccagttcgtgaacaccgtgagcgccagccccagaaccatcgtgagcttcctgagcgtggccctgctgagcgaccagcccctgctgaccagcgacctgctgagcctgctggcccacaccgccagagtgctgagccccagccacctgagcttcatccaggagctgctggccggcagcgacgagagctacagacccctgagaagcctgctgggccaccccgagaacagcgtgagagcccacacctacagactgctgggccacctgctgcagcacagcatggccctgagaggcgccctgcagagccagagcggcctgctgagcctgctgctgctgggcctgggcgacaaggaccccgtggtgagatgcagcgccagcttcgccgtgggcaacgccgcctaccaggccggccccctgggccccgccctggccgccgccgtgcccagcatgacccagctgctgggcgacccccaggccggcatcagaagaaacgtggccagcgccctgggcaacctgggccccgagggcctgggcgaggagctgctgcagtgcgaggtgccccagagactgctggagatggcctgcggcgacccccagcccaacgtgaaggaggccgccctgatcgccctgagaagcctgcagcaggagcccggcatccaccaggtgctggtgagcctgggcgccagcgagaagctgagcctgctgagcctgggcaaccagagcctgccccacagcagccccagacccgccagcgccaagcactgcagaaagctgatccacctgctgagacccgcccacagcatgtag

SEQ ID NO: 98550 - DNA, 3885 bp, synthetic construct
  misc_feature 1..3885: note = Description of Artificial Sequence: Synthetic coding sequence
  source 1..3885: mol_type = other DNA
atggagaagtaccacgtgctggagatgatcggcgagggcagcttcggcagagtgtacaagggcagaagaaagtacagcgcccaggtggtggccctgaagttcatccccaagctgggcagaagcgagaaggagctgagaaacctgcagagagagatcgagatcatgagaggcctgagacaccccaacatcgtgcacatgctggacagcttcgagaccgacaaggaggtggtggtggtgaccgactacgccgagggcgagctgttccagatcctggaggacgacggcaagctgcccgaggaccaggtgcaggccatcgccgcccagctggtgagcgccctgtactacctgcacagccacagaatcctgcacagagacatgaagccccagaacatcctgctggccaagggcggcggcatcaagctgtgcgacttcggcttcgccagagccatgagcaccaacaccatggtgctgaccagcatcaagggcacccccctgtacatgagccccgagctggtggaggagagaccctacgaccacaccgccgacctgtggagcgtgggctgcatcctgtacgagctggccgtgggcaccccccccttctacgccaccagcatcttccagctggtgagcctgatcctgaaggaccccgtgagatggcccagcaccatcagcccctgcttcaagaacttcctgcagggcctgctgaccaaggaccccagacagagactgagctggcccgacctgctgtaccaccccttcatcgccggccacgtgaccatcatcaccgagcccgccggccccgacctgggcacccccttcaccagcagactgccccccgagctgcaggtgctgaaggacgagcaggcccacagactggcccccaagggcaaccagagcagaatcctgacccaggcctacaagagaatggccgaggaggccatgcagaagaagcaccagaacaccggccccgccctggagcaggaggacaagaccagcaaggtggcccccggcaccgcccccctgcccagactgggcgccaccccccaggagagcagcctgctggccggcatcctggccagcgagctgaagagcagctgggccaagagcggcaccggcgaggtgcccagcgcccccagagagaacagaaccacccccgactgcgagagagccttccccgaggagagacccgaggtgctgggccagagaagcaccgacgtggtggacctggagaacgaggagcccgacagcgacaacgagtggcagcacctgctggagaccaccgagcccgtgcccatccagctgaaggcccccctgaccctgctgtgcaaccccgacttctgccagagaatccagagccagctgcacgaggccggcggccagatcctgaagggcatcctggagggcgccagccacatcctgcccgccttcagagtgctgagcagcctgctgagcagctgcagcgacagcgtggccctgtacagcttctgcagagaggccggcctgcccggcctgctgctgagcctgctgagacacagccaggagagcaacagcctgcagcagcagagctggtacggcaccttcctgcaggacctgatggccgtgatccaggcctacttcgcctgcaccttcaacctggagagaagccagaccagcgacagcctgcaggtgttccaggaggccgccaacctgttcctggacctgctgggcaagctgctggcccagcccgacgacagcgagcagaccctgagaagagacagcctgatgtgcttcaccgtgctgtgcgaggccatggacggcaacagcagagccatcagcaaggccttctacagcagcctgctgaccacccagcaggtggtgctggacggcctgctgcacggcctgaccgtgccccagctgcccgtgcacaccccccagggcgccccccaggtgagccagcccctgagagagcagagcgaggacatccccggcgccatcagcagcgccctggccgccatctgcaccgcccccgtgggcctgcccgactgctgggacgccaaggagcaggtgtgctggcacctggccaaccagctgaccgaggacagcagccagctgagacccagcctgatcagcggcctgcagcaccccatcctgtgcctgcacctgctgaaggtgctgtacagctgctgcctggtgagcgagggcctgtgcagactgctgggccaggagcccctggccctggagagcctgttcatgctgatccagggcaaggtgaaggtggtggactgggaggagagcaccgaggtgaccctgtacttcctgagcctgctggtgttcagactgcagaacctgccctgcggcatggagaagctgggcagcgacgtggccaccctgttcacccacagccacgtggtgagcctggtgagcgccgccgcctgcctgctgggccagctgggccagcagggcgtgaccttcgacctgcagcccatggagtggatggccgccgccacccacgccctgagcgcccccgccgagctgctgaccgagcagggcaaggccagcctgatcagagacatgagcagcagcgagatgtggaccgtgctgtggcacagattcagcatggtgctgagactgcccgaggaggccagcgcccaggagggcgagctgagcctgagcagcccccccagccccgagcccgactggaccctgatcagcccccagggcatggccgccctgctgagcctggccatggccaccttcacccaggagccccagctgtgcctgagctgcctgagccagcacggcagcatcctgatgagcatcctgaagcacctgctgtgccccagcttcctgaaccagctgagacaggccccccacggcagcgagttcctgcccgtggtggtgctgagcgtgtgccagctgctgtgcttccccttcgccctggacatggacgccgacctgctgatcggcgtgctggccgacctgagagacagcgaggtggccgcccacctgctgcaggtgtgctgctaccacctgcccctgatgcaggtggagctgcccatcagcctgctgaccagactggccctgatggaccccaccagcctgaaccagttcgtgaacaccgtgagcgccagccccagaaccatcgtgagcttcctgagcgtggccctgctgagcgaccagcccctgctgaccagcgacctgctgagcctgctggcccacaccgccagagtgctgagccccagccacctgagcttcatccaggagctgctggccggcagcgacgagagctacagacccctgagaagcctgctgggccaccccgagaacagcgtgagagcccacacctacagactgctgggccacctgctgcagcacagcatggccctgagaggcgccctgcagagccagagcggcctgctgagcctgctgctgctgggcctgggcgacaaggaccccgtggtgagatgcagcgccagcttcgccgtgggcaacgccgcctaccaggccggccccctgggccccgccctggccgccgccgtgcccagcatgacccagctgctgggcgacccccaggccggcatcagaagaaacgtggccagcgccctgggcaacctgggccccgagggcctgggcgaggagctgctgcagtgcgaggtgccccagagactgctggagatggcctgcggcgacccccagcccaacgtgaaggaggccgccctgatcgccctgagaagcctgcagcaggagcccggcatccaccaggtgctggtgagcctgggcgccagcgagaagctgagcctgctgagcctgggcaaccagagcctgccccacagcagccccagacccgccagcgccaagcactgcagaaagctgatccacctgctgagacccgcccacagcatgtag

SEQ ID NO: 98551 - DNA, 3885 bp, synthetic construct
  misc_feature 1..3885: note = Description of Artificial Sequence: Synthetic coding sequence
  source 1..3885: mol_type = other DNA
atggagaagtaccacgtgctggagatgatcggcgagggcagcttcggcagagtgtacaagggcagaagaaagtacagcgcccaggtggtggccctgaagttcatccccaagctgggcagaagcgagaaggagctgagaaacctgcagagagagatcgagatcatgagaggcctgagacaccccaacatcgtgcacatgctggacagcttcgagaccgacaaggaggtggtggtggtgaccgactacgccgagggcgagctgttccagatcctggaggacgacggcaagctgcccgaggaccaggtgcaggccatcgccgcccagctggtgagcgccctgtactacctgcacagccacagaatcctgcacagagacatgaagccccagaacatcctgctggccaagggcggcggcatcaagctgtgcgacttcggcttcgccagagccatgagcaccaacaccatggtgctgaccagcatcaagggcacccccctgtacatgagccccgagctggtggaggagagaccctacgaccacaccgccgacctgtggagcgtgggctgcatcctgtacgagctggccgtgggcaccccccccttctacgccaccagcatcttccagctggtgagcctgatcctgaaggaccccgtgagatggcccagcaccatcagcccctgcttcaagaacttcctgcagggcctgctgaccaaggaccccagacagagactgagctggcccgacctgctgtaccaccccttcatcgccggccacgtgaccatcatcaccgagcccgccggccccgacctgggcacccccttcaccagcagactgccccccgagctgcaggtgctgaaggacgagcaggcccacagactggcccccaagggcaaccagagcagaatcctgacccaggcctacaagagaatggccgaggaggccatgcagaagaagcaccagaacaccggccccgccctggagcaggaggacaagaccagcaaggtggcccccggcaccgcccccctgcccagactgggcgccaccccccaggagagcagcctgctggccggcatcctggccagcgagctgaagagcagctgggccaagagcggcaccggcgaggtgcccagcgcccccagagagaacagaaccacccccgactgcgagagagccttccccgaggagagacccgaggtgctgggccagagaagcaccgacgtggtggacctggagaacgaggagcccgacagcgacaacgagtggcagcacctgctggagaccaccgagcccgtgcccatccagctgaaggcccccctgaccctgctgtgcaaccccgacttctgccagagaatccagagccagctgcacgaggccggcggccagatcctgaagggcatcctggagggcgccagccacatcctgcccgccttcagagtgctgagcagcctgctgagcagctgcagcgacagcgtggccctgtacagcttctgcagagaggccggcctgcccggcctgctgctgagcctgctgagacacagccaggagagcaacagcctgcagcagcagagctggtacggcaccttcctgcaggacctgatggccgtgatccaggcctacttcgcctgcaccttcaacctggagagaagccagaccagcgacagcctgcaggtgttccaggaggccgccaacctgttcctggacctgctgggcaagctgctggcccagcccgacgacagcgagcagaccctgagaagagacagcctgatgtgcttcaccgtgctgtgcgaggccatggacggcaacagcagagccatcagcaaggccttctacagcagcctgctgaccacccagcaggtggtgctggacggcctgctgcacggcctgaccgtgccccagctgcccgtgcacaccccccagggcgccccccaggtgagccagcccctgagagagcagagcgaggacatccccggcgccatcagcagcgccctggccgccatctgcaccgcccccgtgggcctgcccgactgctgggacgccaaggagcaggtgtgctggcacctggccaaccagctgaccgaggacagcagccagctgagacccagcctgatcagcggcctgcagcaccccatcctgtgcctgcacctgctgaaggtgctgtacagctgctgcctggtgagcgagggcctgtgcagactgctgggccaggagcccctggccctggagagcctgttcatgctgatccagggcaaggtgaaggtggtggactgggaggagagcaccgaggtgaccctgtacttcctgagcctgctggtgttcagactgcagaacctgccctgcggcatggagaagctgggcagcgacgtggccaccctgttcacccacagccacgtggtgagcctggtgagcgccgccgcctgcctgctgggccagctgggccagcagggcgtgaccttcgacctgcagcccatggagtggatggccgccgccacccacgccctgagcgcccccgccgagatgagctgcgagcagggcaaggccagcctgatcagagacatgagcagcagcgagatgtggaccgtgctgtggcacagattcagcatggtgctgagactgcccgaggaggccagcgcccaggagggcgagctgagcctgagcagcccccccagccccgagcccgactggaccctgatcagcccccagggcatggccgccctgctgagcctggccatggccaccttcacccaggagccccagctgtgcctgagctgcctgagccagcacggcagcatcctgatgagcatcctgaagcacctgctgtgccccagcttcctgaaccagctgagacaggccccccacggcagcgagttcctgcccgtggtggtgctgagcgtgtgccagctgctgtgcttccccttcgccctggacatggacgccgacctgctgatcggcgtgctggccgacctgagagacagcgaggtggccgcccacctgctgcaggtgtgctgctaccacctgcccctgatgcaggtggagctgcccatcagcctgctgaccagactggccctgatggaccccaccagcctgaaccagttcgtgaacaccgtgagcgccagccccagaaccatcgtgagcttcctgagcgtggccctgctgagcgaccagcccctgctgaccagcgacctgctgagcctgctggcccacaccgccagagtgctgagccccagccacctgagcttcatccaggagctgctggccggcagcgacgagagctacagacccctgagaagcctgctgggccaccccgagaacagcgtgagagcccacacctacagactgctgggccacctgctgcagcacagcatggccctgagaggcgccctgcagagccagagcggcctgctgagcctgctgctgctgggcctgggcgacaaggaccccgtggtgagatgcagcgccagcttcgccgtgggcaacgccgcctaccaggccggccccctgggccccgccctggccgccgccgtgcccagcatgacccagctgctgggcgacccccaggccggcatcagaagaaacgtggccagcgccctgggcaacctgggccccgagggcctgggcgaggagctgctgcagtgcgaggtgccccagagactgctggagatggcctgcggcgacccccagcccaacgtgaaggaggccgccctgatcgccctgagaagcctgcagcaggagcccggcatccaccaggtgctggtgagcctgggcgccagcgagaagctgagcctgctgagcctgggcaaccagagcctgccccacagcagccccagacccgccagcgccaagcactgcagaaagctgatccacctgctgagacccgcccacagcatgtag

SEQ ID NO: 98552 - DNA, 840 bp, synthetic construct
  misc_feature 1..840: note = Description of Artificial Sequence: Synthetic coding sequence
  source 1..840: mol_type = other DNA
atggagaagtaccacgtgctggagatgatcggcgagggcagcttcggcagagtgtacaagggcagaagaaagtacagcgcccaggtggtggccctgaagttcatccccaagctgggcagaagcgagaaggagctgagaaacctgcagagagagatcgagatcatgagaggcctgagacaccccaacatcgtgcacatgctggacagcttcgagaccgacaaggaggtggtggtggtgaccgactacgccgagggcgagctgttccagatcctggaggacgacggcaagctgcccgaggaccaggtgcaggccatcgccgcccagctggtgagcgccctgtactacctgcacagccacagaatcctgcacagagacatgaagccccagaacatcctgctggccaagggcggcggcatcaagctgtgcgacttcggcttcgccagagccatgagcaccaacaccatggtgctgaccagcatcaagggcacccccctgtacatgagccccgagctggtggaggagagaccctacgaccacaccgccgacctgtggagcgtgggctgcatcctgtacgagctggccgtgggcaccccccccttctacgccaccagcatcttccagctggtgagcctgatcctgaaggaccccgtgagatggcccagcaccatcagcccctgcttcaagaacttcctgcagggcctgctgaccaaggaccccagacagagactgagctggcccgacctgctgtaccaccccttcatcgccggccacgtgaccatcatcaccgagcccgccggccccgacctgggcacccccttcaccagcagactgcccccctag

SEQ ID NO: 98553 - DNA, 3948 bp, synthetic construct; identical to SEQ ID NO: 98549
  misc_feature 1..3948: note = Description of Artificial Sequence: Synthetic coding sequence
  source 1..3948: mol_type = other DNA

SEQ ID NO: 98554 - DNA, 1056 bp, synthetic construct
  misc_feature 1..1056: note = Description of Artificial Sequence: Synthetic coding sequence
  source 1..1056: mol_type = other DNA
atgagattcaccttccccctgatggccatcgtgctggagatcgccatgatcgtgctgttcggcctgttcgtggagtacgagaccgaccagaccgtgctggagcagctgaacatcaccaagcccaccgacatgggcatcttcttcgagctgtaccccctgttccaggacgtgcacgtgatgatcttcgtgggcttcggcttcctgatgaccttcctgaagaagtacggcttcagcagcgtgggcatcaacctgctggtggccgccctgggcctgcagtggggcaccatcgtgcagggcatcctgcagagccagggccagaagttcaacatcggcatcaagaacatgatcaacgccgacttcagcgccgccaccgtgctgatcagcttcggcgccgtgctgggcaagaccagccccacccagatgctgatcatgaccatcctggagatcgtgttcttcgcccacaacgagtacctggtgagcgagatcttcaaggccagcgacatcggcgccagcatgaccatccacgccttcggcgcctacttcggcctggccgtggccggcatcctgtacagaagcggcctgagaaagggccacgagaacgaggagagcgcctactacagcgacctgttcgccatgatcggcaccctgttcctgtggatgttctggcccagcttcaacagcgccatcgccgagcccggcgacaagcagtgcagagccatcgtgaacacctacttcagcctggccgcctgcgtgctgaccgccttcgccttcagcagcctggtggagcacagaggcaagctgaacatggtgcacatccagaacgccaccctggccggcggcgtggccgtgggcacctgcgccgacatggccatccaccccttcggcagcatgatcatcggcagcatcgccggcatggtgagcgtgctgggctacaagttcctgaccgtgtacggccacgccggcagctgcaccggcttcctgtacagaaacagcagctgctggagaagcgacgacagattcaacagcaaggtggccagcctgggcaccgccatctag

SEQ ID NO: 98555 - DNA, 1389 bp, synthetic construct
  misc_feature 1..1389: note = Description of Artificial Sequence: Synthetic coding sequence
  source 1..1389: mol_type = other DNA
atggagaccgtgcagctgagaaacccccccagaagacagctgaagaagctggacgaggacagcctgaccaagcagcccgaggaggtgttcgacgtgctggagaagctgggcgagggcagctacggcagcgtgtacaaggccatccacaaggagaccggccagatcgtggccatcaagcaggtgcccgtggagagcgacctgcaggagatcatcaaggagatcagcatcatgcagcagtgcgacagcccccacgtggtgaagtactacggcagctacttcaagaacaccgacctgtggatcgtgatggagtactgcggcgccggcagcgtgagcgacatcatcagactgagaaacaagaccctgaccgaggacgagatcgccaccatcctgcagagcaccctgaagggcctggagtacctgcacttcatgagaaagatccacagagacatcaaggccggcaacatcctgctgaacaccgagggccacgccaagctggccgacttcggcgtggccggccagctgaccgacaccatggccaagagaaacaccgtgatcggcacccccttctggatggcccccgaggtgatccaggagatcggctacaactgcgtggccgacatctggagcctgggcatcaccgccatcgagatggccgagggcaagcccccctacgccgacatccaccccatgagagccatcttcatgatccccaccaaccccccccccaccttcagaaagcccgagctgtggagcgacaacttcaccgacttcgtgaagcagtgcctggtgaagagccccgagcagagagccaccgccacccagctgctgcagcaccccttcgtgagaagcgccaagggcgtgagcatcctgagagacctgatcaacgaggccatggacgtgaagctgaagagacaggagagccagcagagagaggtggaccaggacgacgaggagaacagcgaggaggacgagatggacagcggcaccatggtgagagccgtgggcgacgagatgggcaccgtgagagtggccagcaccatgaccgacggcgccaacaccatgatcgagcacgacgacaccctgcccagccagctgggcaccatggtgatcaacgccgaggacgaggaggaggagggcaccatgaagagaagagacgagaccatgcagcccgccaagcccagcttcctggagtacttcgagcagaaggagaaggagaaccagatcaacagcttcggcaagagcgtgcccggccccctgaagaacagcagcgactggaagatcccccaggacggcgactacgagttcaagaccagccaggagcagcagagcggcaaggacatctgcatccagaactgccagggcaacctgctgtgcagatacgccttctag

SEQ ID NO: 98556 - DNA, 1464 bp, synthetic construct
  misc_feature 1..1464: note = Description of Artificial Sequence: Synthetic coding sequence
  source 1..1464: mol_type = other DNA
atggagaccgtgcagctgagaaacccccccagaagacagctgaagaagctggacgaggacagcctgaccaagcagcccgaggaggtgttcgacgtgctggagaagctgggcgagggcagctacggcagcgtgtacaaggccatccacaaggagaccggccagatcgtggccatcaagcaggtgcccgtggagagcgacctgcaggagatcatcaaggagatcagcatcatgcagcagtgcgacagcccccacgtggtgaagtactacggcagctacttcaagaacaccgacctgtggatcgtgatggagtactgcggcgccggcagcgtgagcgacatcatcagactgagaaacaagaccctgaccgaggacgagatcgccaccatcctgcagagcaccctgaagggcctggagtacctgcacttcatgagaaagatccacagagacatcaaggccggcaacatcctgctgaacaccgagggccacgccaagctggccgacttcggcgtggccggccagctgaccgacaccatggccaagagaaacaccgtgatcggcacccccttctggatggcccccgaggtgatccaggagatcggctacaactgcgtggccgacatctggagcctgggcatcaccgccatcgagatggccgagggcaagcccccctacgccgacatccaccccatgagagccatcttcatgatccccaccaaccccccccccaccttcagaaagcccgagctgtggagcgacaacttcaccgacttcgtgaagcagtgcctggtgaagagccccgagcagagagccaccgccacccagctgctgcagcaccccttcgtgagaagcgccaagggcgtgagcatcctgagagacctgatcaacgaggccatggacgtgaagctgaagagacaggagagccagcagagagaggtggaccaggacgacgaggagaacagcgaggaggacgagatggacagcggcaccatggtgagagccgtgggcgacgagatgggcaccgtgagagtggccagcaccatgaccgacggcgccaacaccatgatcgagcacgacgacaccctgcccagccagctgggcaccatggtgatcaacgccgaggacgaggaggaggagggcaccatgaagagaagagacgagaccatgcagcccgccaagcccagcttcctggagtacttcgagcagaaggagaaggagaaccagatcaacagcttcggcaagagcgtgcccggccccctgaagaacagcagcgactggaagatcccccaggacggcgactacgagttcctgaagagctggaccgtggaggacctgcagaagagactgctggccctggaccccatgatggagcaggagatcgaggagatcagacagaagtaccagagcaagagacagcccatcctggacgccatcgaggccaagaagagaagacagcagaacttctag

SEQ ID NO: 98557 - DNA, 1389 bp, synthetic construct; identical to SEQ ID NO: 98555
  misc_feature 1..1389: note = Description of Artificial Sequence: Synthetic coding sequence
  source 1..1389: mol_type = other DNA

SEQ ID NO: 98558 - DNA, 1299 bp, synthetic construct
  misc_feature 1..1299: note = Description of Artificial Sequence: Synthetic coding sequence
  source 1..1299: mol_type = other DNA
atggagaccgtgcagctgagaaacccccccagaagacagctgaagaagctggacgaggacagcctgaccaagcagcccgaggaggtgttcgacgtgctggagaagctgggcgagggcagctacggcagcgtgtacaaggccatccacaaggagaccggccagatcgtggccatcaagcaggtgcccgtggagagcgacctgcaggagatcatcaaggagatcagcatcatgcagcagtgcgacagcccccacgtggtgaagtactacggcagctacttcaagaacaccgacctgtggatcgtgatggagtactgcggcgccggcagcgtgagcgacatcatcagactgagaaacaagaccgacaccatggccaagagaaacaccgtgatcggcacccccttctggatggcccccgaggtgatccaggagatcggctacaactgcgtggccgacatctggagcctgggcatcaccgccatcgagatggccgagggcaagcccccctacgccgacatccaccccatgagagccatcttcatgatccccaccaaccccccccccaccttcagaaagcccgagctgtggagcgacaacttcaccgacttcgtgaagcagtgcctggtgaagagccccgagcagagagccaccgccacccagctgctgcagcaccccttcgtgagaagcgccaagggcgtgagcatcctgagagacctgatcaacgaggccatggacgtgaagctgaagagacaggagagccagcagagagaggtggaccaggacgacgaggagaacagcgaggaggacgagatggacagcggcaccatggtgagagccgtgggcgacgagatgggcaccgtgagagtggccagcaccatgaccgacggcgccaacaccatgatcgagcacgacgacaccctgcccagccagctgggcaccatggtgatcaacgccgaggacgaggaggaggagggcaccatgaagagaagagacgagaccatgcagcccgccaagcccagcttcctggagtacttcgagcagaaggagaaggagaaccagatcaacagcttcggcaagagcgtgcccggccccctgaagaacagcagcgactggaagatcccccaggacggcgactacgagttcctgaagagctggaccgtggaggacctgcagaagagactgctggccctggaccccatgatggagcaggagatcgaggagatcagacagaagtaccagagcaagagacagcccatcctggacgccatcgaggccaagaagagaagacagcagaacttctag

SEQ ID NO: 98559 - DNA, 1254 bp, synthetic construct
  misc_feature 1..1254: note = Description of Artificial Sequence: Synthetic coding sequence
  source 1..1254: mol_type = other DNA
atgaagagaagagccagcgacagaggcgccggcgagaccagcgccagagccaaggccctgggcagcggcatcagcggcaacaacgccaagagagccggccccttcatcctgggccccagactgggcaacagccccgtgcccagcatcgtgcagtgcctggccagaaaggacggcaccgacgacttctaccagctgaagatcctgaccctggaggagagaggcgaccagggcatcgagagccaggaggagagacagggcaagatgctgctgcacaccgagtacagcctgctgagcctgctgcacacccaggacggcgtggtgcaccaccacggcctgttccaggacagaacctgcgagatcgtggaggacaccgagagcagcagaatggtgaagaagatgaagaagagaatctgcctggtgctggactgcctgtgcgcccacgacttcagcgacaagaccgccgacctgatcaacctgcagcactacgtgatcaaggagaagagactgagcgagagagagaccgtggtgatcttctacgacgtggtgagagtggtggaggccctgcaccagaagaacatcgtgcacagagacctgaagctgggcaacatggtgctgaacaagagaacccacagaatcaccatcaccaacttctgcctgggcaagcacctggtgagcgagggcgacctgctgaaggaccagagaggcagccccgcctacatcagccccgacgtgctgagcggcagaccctacagaggcaagcccagcgacatgtgggccctgggcgtggtgctgttcaccatgctgtacggccagttccccttctacgacagcatcccccaggagctgttcagaaagatcaaggccgccgagtacaccatccccgaggacggcagagtgagcgagaacaccgtgtgcctgatcagaaagctgctggtgctggacccccagcagagactggccgccgccgacgtgctggaggccctgagcgccatcatcgccagctggcagagcctgagcagcctgagcggccccctgcaggtggtgcccgacatcgacgaccagatgagcaacgccgacagcagccaggaggtgagctggggcggccagatgggccactaccccgcccccagagacagactgctgggcgccggcagagccagagccgaggtggccgccaccagaagaccccagagcttcctgggcctgctgccccagccctggggcggcaagggcagactgcagagcagcgcctag

SEQ ID NO: 98560 - DNA, 1308 bp, synthetic construct
  misc_feature 1..1308: note = Description of Artificial Sequence: Synthetic coding sequence
  source 1..1308: mol_type = other DNA
atgaagagaagagccagcgacagaggcgccggcgagaccagcgccagagccaaggccctgggcagcggcatcagcggcaacaacgccaagagagccggccccttcatcctgggccccagactgggcaacagccccgtgcccagcatcgtgcagtgcctggccagaaaggacggcaccgacgacttctaccagctgaagatcctgaccctggaggagagaggcgaccagggcatcgagagccaggaggagagacagggcaagatgctgctgcacaccgagtacagcctgctgagcctgctgcacacccaggacggcgtggtgcaccaccacggcctgttccaggacagaacctgcgagatcgtggaggacaccgagagcagcagaatggtgaagaagatgaagaagagaatctgcctggtgctggactgcctgtgcgcccacgacttcagcgacaagaccgccgacctgatcaacctgcagcactacgtgatcaaggagaagagactgagcgagagagagaccgtggtgatcttctacgacgtggtgagagtggtggaggccctgcaccagaagaacatcgtgcacagagacctgaagctgggcaacatggtgctgaacaagagaacccacagaatcaccatcaccaacttctgcctgggcaagcacctggtgagcgagggcgacctgctgaaggaccagagaggcagccccgcctacatcagccccgacgtgctgagcggcagaccctacagaggcaagcccagcgacatgtgggccctgggcgtggtgctgttcaccatgctgtacggccagttccccttctacgacagcatcccccaggagctgttcagaaagatcaaggccgccgagtacaccatccccgaggacggcagagtgagcgagaacaccgtgtgcctgatcagaaagctgctggtgctggacccccagcagagactggccgccgccgacgtgctggaggccctgagcgccatcatcgccagctggcagagcctgagcagcctgagcggccccctgcaggtggtgcccgacatcgacgaccagatgagcaacgccgacagcagccaggaggccaaggtgaccgaggagtgcagccagtacgagttcgagaactacatgagacagcagctgctgctggccgaggagaagagcagcatccacgacgccagaagctgggtgcccaagagacagttcggcagcgccccccccgtgagaagactgggccacgacgcccagcccatgaccagcctggacaccgccatcctggcccagagatacctgagaaagtag

SEQ ID NO: 98561 - DNA, 1323 bp, synthetic construct
  misc_feature 1..1323: note = Description of Artificial Sequence: Synthetic coding sequence
  source 1..1323: mol_type = other DNA
atgaagagaagagccagcgacagaggcgccggcgagaccagcgccagagccaaggccctgggcagcggcatcagcggcaacaacgccaagagagccggccccttcatcctggccctgtgcgccgtgggccccagactgggcaacagccccgtgcccagcatcgtgcagtgcctggccagaaaggacggcaccgacgacttctaccagctgaagatcctgaccctggaggagagaggcgaccagggcatcgagagccaggaggagagacagggcaagatgctgctgcacaccgagtacagcctgctgagcctgctgcacacccaggacggcgtggtgcaccaccacggcctgttccaggacagaacctgcgagatcgtggaggacaccgagagcagcagaatggtgaagaagatgaagaagagaatctgcctggtgctggactgcctgtgcgcccacgacttcagcgacaagaccgccgacctgatcaacctgcagcactacgtgatcaaggagaagagactgagcgagagagagaccgtggtgatcttctacgacgtggtgagagtggtggaggccctgcaccagaagaacatcgtgcacagagacctgaagctgggcaacatggtgctgaacaagagaacccacagaatcaccatcaccaacttctgcctgggcaagcacctggtgagcgagggcgacctgctgaaggaccagagaggcagccccgcctacatcagccccgacgtgctgagcggcagaccctacagaggcaagcccagcgacatgtgggccctgggcgtggtgctgttcaccatgctgtacggccagttccccttctacgacagcatcccccaggagctgttcagaaagatcaaggccgccgagtacaccatccccgaggacggcagagtgagcgagaacaccgtgtgcctgatcagaaagctgctggtgctggacccccagcagagactggccgccgccgacgtgctggaggccctgagcgccatcatcgccagctggcagagcctgagcagcctgagcggccccctgcaggtggtgcccgacatcgacgaccagatgagcaacgccgacagcagccaggaggccaaggtgaccgaggagtgcagccagtacgagttcgagaactacatgagacagcagctgctgctggccgaggagaagagcagcatccacgacgccagaagctgggtgcccaagagacagttcggcagcgccccccccgtgagaagactgggccacgacgcccagcccatgaccagcctggacaccgccatcctggcccagagatacctgagaaagtag

SEQ ID NO: 98562 - DNA, 1308 bp, synthetic construct; identical to SEQ ID NO: 98560
  misc_feature 1..1308: note = Description of Artificial Sequence: Synthetic coding sequence
  source 1..1308: mol_type = other DNA

SEQ ID NO: 98563 - DNA, 1092 bp, synthetic construct
  misc_feature 1..1092: note = Description of Artificial Sequence: Synthetic coding sequence
  source 1..1092: mol_type = other DNA
atggccatgagacagacccccctgacctgcagcggccacaccagacccgtggtggacctggccttcagcggcatcaccccctacggctacttcctgatcagcgcctgcaagggcgccggccagcacctgcccagactgagcggccagcacgacggcaagcccatgctgagacagggcgacaccggcgactggatcggcaccttcctgggccacaagggcgccgtgtggggcgccaccctgaacaaggacgccaccaaggccgccaccgccgccgccgacttcaccgccaaggtgtgggacgccgtgagcggcgacgagctgatgaccctggcccacaagcacatcgtgaagaccgtggacttcacccaggacagcaactacctgctgaccggcggccaggacaagctgctgagaatctacgacctgaacaagcccgaggccgagcccaaggagatcagcggccacaccagcggcatcaagaaggccctgtggtgcagcgaggacaagcagatcctgagcgccgacgacaagaccgtgagactgtgggaccacgccaccatgaccgaggtgaagagcctgaacttcaacatgagcgtgagcagcatggagtacatccccgagggcgagatcctggtgatcacctacggcagaagcatcgccttccacagcgccgtgagcctggaccccatcaagagcttcgaggcccccgccaccatcaacagcgccagcctgcaccccgagaaggagttcctggtggccggcggcgaggacttcaagctgtacaagtacgactacaacagcggcgaggagctggagagctacaagggccacttcggccccatccactgcgtgagattcagccccgacggcgagctgtacgccagcggcagcgaggacggcaccctgagactgtggcagaccgtggtgggcaagacctacggcctgtggaagtgcgtgctgcccgaggaggacagcggcgagctggccaagcccaagatcggcttccccgagaccaccgaggaggagctggaggagatcgccagcgagaacagcgactgcatcttccccagcgcccccgacgtgaaggcctag

SEQ ID NO: 98564 - DNA, 1053 bp, synthetic construct
  misc_feature 1..1053: note = Description of Artificial Sequence: Synthetic coding sequence
  source 1..1053: mol_type = other DNA
atggccatgagacagacccccctgacctgcagcggccacaccagacccgtggtggacctggccttcagcggcatcaccccctacggctacttcctgatcagcgcctgcaaggacggcaagcccatgctgagacagggcgacaccggcgactggatcggcaccttcctgggccacaagggcgccgtgtggggcgccaccctgaacaaggacgccaccaaggccgccaccgccgccgccgacttcaccgccaaggtgtgggacgccgtgagcggcgacgagctgatgaccctggcccacaagcacatcgtgaagaccgtggacttcacccaggacagcaactacctgctgaccggcggccaggacaagctgctgagaatctacgacctgaacaagcccgaggccgagcccaaggagatcagcggccacaccagcggcatcaagaaggccctgtggtgcagcgaggacaagcagatcctgagcgccgacgacaagaccgtgagactgtgggaccacgccaccatgaccgaggtgaagagcctgaacttcaacatgagcgtgagcagcatggagtacatccccgagggcgagatcctggtgatcacctacggcagaagcatcgccttccacagcgccgtgagcctggaccccatcaagagcttcgaggcccccgccaccatcaacagcgccagcctgcaccccgagaaggagttcctggtggccggcggcgaggacttcaagctgtacaagtacgactacaacagcggcgaggagctggagagctacaagggccacttcggccccatccactgcgtgagattcagccccgacggcgagctgtacgccagcggcagcgaggacggcaccctgagactgtggcagaccgtggtgggcaagacctacggcctgtggaagtgcgtgctgcccgaggaggacagcggcgagctggccaagcccaagatcggcttccccgagaccaccgaggaggagctggaggagatcgccagcgagaacagcgactgcatcttccccagcgcccccgacgtgaaggcctag

SEQ ID NO: 98565 - DNA, 771 bp, synthetic construct
  misc_feature 1..771: note = Description of Artificial Sequence: Synthetic coding sequence
  source 1..771: mol_type = other DNA
atgaccctggcccacaagcacatcgtgaagaccgtggacttcacccaggacagcaactacctgctgaccggcggccaggacaagctgctgagaatctacgacctgaacaagcccgaggccgagcccaaggagatcagcggccacaccagcggcatcaagaaggccctgtggtgcagcgaggacaagcagatcctgagcgccgacgacaagaccgtgagactgtgggaccacgccaccatgaccgaggtgaagagcctgaacttcaacatgagcgtgagcagcatggagtacatccccgagggcgagatcctggtgatcacctacggcagaagcatcgccttccacagcgccgtgagcctggaccccatcaagagcttcgaggcccccgccaccatcaacagcgccagcctgcaccccgagaaggagttcctggtggccggcggcgaggacttcaagctgtacaagtacgactacaacagcggcgaggagctggagagctacaagggccacttcggccccatccactgcgtgagattcagccccgacggcgagctgtacgccagcggcagcgaggacggcaccctgagactgtggcagaccgtggtgggcaagacctacggcctgtggaagtgcgtgctgcccgaggaggacagcggcgagctggccaagcccaagatcggcttccccgagaccaccgaggaggagctggaggagatcgccagcgagaacagcgactgcatcttccccagcgcccccgacgtgaaggcctag

SEQ ID NO: 98566 - DNA, 1707 bp, synthetic construct
  misc_feature 1..1707: note = Description of Artificial Sequence: Synthetic coding sequence
  source 1..1707: mol_type = other DNA
atgaagaacaagatccaggtggtggtgctggagaacgagggcctgcagcagcagctgaagagccagagacaggaggagaccctgagagagcagaccctgctggacgccagcggcaacatgcacaacagctggatcaccaccggcgaggacagcggcgtgggcgagaccagcaagagacccttcagccacgacaacgccgacttcggcaaggccgccagcgccggcgagcagctggagctggagaagctgaagctgacctacgaggagaagtgcgagatcgaggagagccagctgaagttcctgagaaacgacctggccgagtaccagagaacctgcgaggacctgaaggagcagctgaagcacaaggagttcctgctggccgccaacacctgcaacagagtgggcggcctgtgcctgaagtgcgcccagcacgaggccgtgctgagccagacccacaccaacgtgcacatgcagaccatcgagagactggtgaaggagagagacgacctgatgagcgccctggtgagcgtgagaagcagcctggccgacacccagcagagagaggccagcgcctacgagcaggtgaagcaggtgctgcagatcagcgaggaggccaacttcgagaagaccaaggccctgatccagtgcgaccagctgagaaaggagctggagagacaggccgagagactggagaaggagctggccagccagcaggagaagagagccatcgagaaggacatgatgaagaaggagatcaccaaggagagagagtacatgggcagcaagatgctgatcctgagccagaacatcgcccagctggaggcccaggtggagaaggtgaccaaggagaagatcagcgccatcaaccagctggaggagatccagagccagctggccagcagagagatggacgtgaccaaggtgtgcggcgagatgagataccagctgaacaagaccaacatggagaaggacgaggccgagaaggagcacagagagttcagagccaagaccaacagagacctggagatcaaggaccaggagatcgagaagctgagaatcgagctggacgagagcaagcagcacctggagcaggagcagcagaaggccgccctggccagagaggagtgcctgagactgaccgagctgctgggcgagagcgagcaccagctgcacctgaccagacaggagaaggacagcatccagcagagcttcagcaaggaggccaaggcccaggccctgcaggcccagcagagagagcaggagctgacccagaagatccagcagatggaggcccagcacgacaagaccgagaacgagcagtacctgctgctgaccagccagaacaccttcctgaccaagctgaaggaggagtgctgcaccctggccaagaagctggagcagatcagccagaagaccagaagcgagatcgcccagctgagccaggagaagagatacacctacgacaagctgggcaagctgcagagaagaaacgaggagctggaggagcagtgcgtgcagcacggcagagtgcacgagaccatgaagcagagactgagacagctggacaagcacagccaggccaccgcccagcagctggtgcagctgctgagcaagcagaaccagctgctgctggagagacagagcctgagcgaggaggtggacagactgagaacccagctgcccagcatgccccagagcgactgctag

SEQ ID NO: 98567 - DNA, 2013 bp, synthetic construct
  misc_feature 1..2013: note = Description of Artificial Sequence: Synthetic coding sequence
  source 1..2013: mol_type = other DNA
atggccaagagccccgagaacagcaccctggaggagatcctgggccagtaccagagaagcctgagagagcacgccagcagaagcatccaccagctgacctgcgccctgaaggagggcgacgtgaccatcggcgaggacgcccccaacctgagcttcagcaccagcgtgggcaacgaggacgccagaaccgcctggcccgagctgcagcagagccacgccgtgaaccagctgaaggacctgctgagacagcaggccgacaaggagagcgaggtgagccccagcagaagaagaaagatgagccccctgagaagcctggagcacgaggagaccaacatgcccaccatgcacgacctggtgcacaccatcaacgaccagagccagtacatccaccacctggaggccgaggtgaagttctgcaaggaggagctgagcggcatgaagaacaagatccaggtggtggtgctggagaacgagggcctgcagcagcagctgaagagccagagacaggaggagaccctgagagagcagaccctgctggacgccagcgagaagctgaagctgacctacgaggagaagtgcgagatcgaggagagccagctgaagttcctgagaaacgacctggccgagtaccagagaacctgcgaggacctgaaggagcagctgaagcacaaggagttcctgctggccgccaacacctgcaacagagtgggcggcctgtgcctgaagtgcgcccagcacgaggccgtgctgagccagacccacaccaacgtgcacatgcagaccatcgagagactggtgaaggagagagacgacctgatgagcgccctggtgagcgtgagaagcagcctggccgacacccagcagagagaggccagcgcctacgagcaggtgaagcaggtgctgcagatcagcgaggaggccaacttcgagaagaccaaggccctgatccagtgcgaccagctgagaaaggagctggagagacaggccgagagactggagaaggagctggccagccagcaggagaagagagccatcgagaaggacatgatgaagaaggagatcaccaaggagagagagtacatgggcagcaagatgctgatcctgagccagaacatcgcccagctggaggcccaggtggagaaggtgaccaaggagaagatcagcgccatcaaccagctggaggagatccagagccagctggccagcagagagatggacgtgaccaaggtgtgcggcgagatgagataccagctgaacaagaccaacatggagaaggacgaggccgagaaggagcacagagagttcagagccaagaccaacagagacctggagatcaaggaccaggagatcgagaagctgagaatcgagctggacgagagcaagcagcacctggagcaggagcagcagaaggccgccctggccagagaggagtgcctgagactgaccgagctgctgggcgagagcgagcaccagctgcacctgaccagacaggagaaggacagcatccagcagagcttcagcaaggaggccaaggcccaggccctgcaggcccagcagagagagcaggagctgacccagaagatccagcagatggaggcccagcacgacaagaccgagaacgagcagtacctgctgctgaccagccagaacaccttcctgaccaagctgaaggaggagtgctgcaccctggccaagaagctggagcagatcagccagaagaccagaagcgagatcgcccagctgagccaggagaagagatacacctacgacaagctgggcaagctgcagagaagaaacgaggagctggaggagcagtgcgtgcagcacggcagagtgcacgagaccatgaagcagagactgagacagctggacaagcacagccaggccaccgcccagcagctggtgcagctgctgagcaagcagaaccagctgctgctggagagacagagcctgagcgaggaggtggacagactgagaacccagctgcccagcatgccccagagcgactgctag

SEQ ID NO: 98568 - DNA, 2142 bp, synthetic construct
  misc_feature 1..2142: note = Description of Artificial Sequence: Synthetic coding sequence
  source 1..2142: mol_type = other DNA
atggccaagagccccgagaacagcaccctggaggagatcctgggccagtaccagagaagcctgagagagcacgccagcagaagcatccaccagctgacctgcgccctgaaggagggcgacgtgaccatcggcgaggacgcccccaacctgagcttcagcaccagcgtgggcaacgaggacgccagaaccgcctggcccgagctgcagcagagccacgccgtgaaccagctgaaggacctgctgagacagcaggccgacaaggagagcgaggtgagccccagcagaagaagaaagatgagccccctgagaagcctggagcacgaggagaccaacatgcccaccatgcacgacctggtgcacaccatcaacgaccagagccagtacatccaccacctggaggccgaggtgaagttctgcaaggaggagctgagcggcatgaagaacaagatccaggtggtggtgctggagaacgagggcctgcagcagcagctgaagagccagagacaggaggagaccctgagagagcagaccctgctggacgccagcggcaacatgcacaacagctggatcaccaccggcgaggacagcggcgtgggcgagaccagcaagagacccttcagccacgacaacgccgacttcggcaaggccgccagcgccggcgagcagctggagctggagaagctgaagctgacctacgaggagaagtgcgagatcgaggagagccagctgaagttcctgagaaacgacctggccgagtaccagagaacctgcgaggacctgaaggagcagctgaagcacaaggagttcctgctggccgccaacacctgcaacagagtgggcggcctgtgcctgaagtgcgcccagcacgaggccgtgctgagccagacccacaccaacgtgcacatgcagaccatcgagagactggtgaaggagagagacgacctgatgagcgccctggtgagcgtgagaagcagcctggccgacacccagcagagagaggccagcgcctacgagcaggtgaagcaggtgctgcagatcagcgaggaggccaacttcgagaagaccaaggccctgatccagtgcgaccagctgagaaaggagctggagagacaggccgagagactggagaaggagctggccagccagcaggagaagagagccatcgagaaggacatgatgaagaaggagatcaccaaggagagagagtacatgggcagcaagatgctgatcctgagccagaacatcgcccagctggaggcccaggtggagaaggtgaccaaggagaagatcagcgccatcaaccagctggaggagatccagagccagctggccagcagagagatggacgtgaccaaggtgtgcggcgagatgagataccagctgaacaagaccaacatggagaaggacgaggccgagaaggagcacagagagttcagagccaagaccaacagagacctggagatcaaggaccaggagatcgagaagctgagaatcgagctggacgagagcaagcagcacctggagcaggagcagcagaaggccgccctggccagagaggagtgcctgagactgaccgagctgctgggcgagagcgagcaccagctgcacctgaccagacaggagaaggacagcatccagcagagcttcagcaaggaggccaaggcccaggccctgcaggcccagcagagagagcaggagctgacccagaagatccagcagatggaggcccagcacgacaagaccgagaacgagcagtacctgctgctgaccagccagaacaccttcctgaccaagctgaaggaggagtgctgcaccctggccaagaagctggagcagatcagccagaagaccagaagcgagatcgcccagctgagccaggagaagagatacacctacgacaagctgggcaagctgcagagaagaaacgaggagctggaggagcagtgcgtgcagcacggcagagtgcacgagaccatgaagcagagactgagacagctggacaagcacagccaggccaccgcccagcagctggtgcagctgctgagcaagcagaaccagctgctgctggagagacagagcctgagcgaggaggtggacagactgagaacccagctgcccagcatgccccagagcgactgctag

SEQ ID NO: 98569 - DNA, 1083 bp, synthetic construct
  misc_feature 1..1083: note = Description of Artificial Sequence: Synthetic coding sequence
  source 1..1083: mol_type = other DNA
atggccaagagccccgagaacagcaccctggaggagatcctgggccagtaccagagaagcctgagagagcacgccagcagaagcatccaccagctgacctgcgccctgaaggagggcgacgtgaccatcggcgaggacgcccccaacctgagcttcagcaccagcgtgggcaacgaggacgccagaaccgcctggcccgagctgcagcagagccacgccgtgaaccagctgaaggacctgctgagacagcaggccgacaaggagagcgaggtgagccccagcagaagaagaaagatgagccccctgagaagcctggagcacgaggagaccaacatgcccaccatgcacgacctggtgcacaccatcaacgaccagagccagtacatccaccacctggaggccgaggtgaagttctgcaaggaggagctgagcggcatgaagaacaagatccaggtggtggtgctggagaacgagggcctgcagcagcagctgaagagccagagacaggaggagaccctgagagagcagaccctgctggacgccagcggcaacatgcacaacagctggatcaccaccggcgaggacagcggcgtgggcgagaccagcaagagacccttcagccacgacaacgccgacttcggcaaggccgccagcgccggcgagcagctggagctggagaagctgaagctgacctacgaggagaagtgcgagatcgaggagagccagctgaagttcctgagaaacgacctggccgagtaccagagaacctgcgaggacctgaaggagcagctgaagcacaaggagttcctgctggccgccaacacctgcaacagagtgggcggcctgtgcctgaagtgcgcccagcacgaggccgtgctgagccagacccacaccaacgtgcacatgcagaccatcgagagactggtgaaggagagagacgacctgatgagcgccctggtgagcgtgagaagcagcctggccgacacccagcagagagaggccagcgcctacgagcaggtgaagcaggtgctgcagatcagcgaggaggccaacttcgagaagaccaagcaccccagccagtag

SEQ ID NO: 98570 - DNA, 1245 bp, synthetic construct
  misc_feature 1..1245: note = Description of Artificial Sequence: Synthetic coding sequence
  source 1..1245: mol_type = other DNA
ctgctggacgccagcgagaagctgaagctgacctacgaggagaagtgcgagatcgaggagagccagctgaagttcctgagaaacgacctggccgagtaccagagaacctgcgaggacctgaaggagcagctgaagcacaaggagttcctgctggccgccaacacctgcaacagagtgggcggcctgtgcctgaagtgcgcccagcacgaggccgtgctgagccagacccacaccaacgtgcacatgcagaccatcgagagactggtgaaggagagagacgacctgatgagcgccctggtgagcgtgagaagcagcctggccgacacccagcagagagaggccagcgcctacgagcaggtgaagcaggtgctgcagatcagcgaggaggccaacttcgagaagaccaaggccctgatccagtgcgaccagctgagaaaggagctggagagacaggccgagagactggagaaggagctggccagccagcaggagaagagagccatcgagaaggacatgatgaagaaggagatcaccaaggagagagagtacatgggcagcaagatgctgatcctgagccagaacatcgcccagctggaggcccaggtggagaaggtgaccaaggagaagatcagcgccatcaaccagctggaggagatccagagccagctggccagcagagagatggacgtgaccaaggtgtgcggcgagatgagataccagctgaacaagaccaacatggagaaggacgaggccgagaaggagcacagagagttcagagccaagaccaacagagacctggagatcaaggaccaggagatcgagaagctgagaatcgagctggacgagagcaagcagcacctggagcaggagcagcagaaggccgccctggccagagaggagtgcctgagactgaccgagctgctgggcgagagcgagcaccagctgcacctgaccagaagcgagatcgcccagctgagccaggagaagagatacacctacgacaagctgggcaagctgcagagaagaaacgaggagctggaggagcagtgcgtgcagcacggcagagtgcacgagaccatgaagcagagactgagacagctggacaagcacagccaggccaccgcccagcagctggtgcagctgctgagcaagcagaaccagctgctgctggagagacagagcctgagcgaggaggtggacagactgagaacccagctgcccagcatgccccagagcgactgctag

SEQ ID NO: 98571 - DNA, 729 bp, synthetic construct
  misc_feature 1..729: note = Description of Artificial Sequence: Synthetic coding sequence
  source 1..729: mol_type = other DNA
atggacgacctgtgcgaggccaacggcaccttcgccatcagcctgttcaagatcctgggcgaggaggacaacagcagaaacgtgttcttcagccccatgagcatcagcagcgccctggccatggtgttcatgggcgccaagggcagcaccgccgcccagatgagccaggccctgtgcctgtacaaggacggcgacatccacagaggcttccagagcctgctgagcgaggtgaacagaaccggcacccagtacctgctgagaaccgccaacagactgttcggcgagaagacctgcgacttcctgcccgacttcaaggagtactgccagaagttctaccaggccgagctggaggagctgagcttcgccgaggacaccgaggagtgcagaaagcacatcaacgactgggtggccgagaagaccgagggcaagatcagcgaggtgctggacgccggcaccgtggaccccctgaccaagctggtgctggtgaacgccatctacttcaagggcaagtggaacgagcagttcgacagaaagtacaccagaggcatgctgttcaagaccaacgaggagaagaagaccgtgcagatgatgttcaaggaggccaagttcaagatgggctacgccgacgaggtgcacacccaggtgctggagctgccctacgtggaggaggagctgagcatggtgatcctgctgcccgacgacaacaccgacctggccgtgaaggagtag

SEQ ID NO: 98572 - DNA, 1335 bp, synthetic construct
  misc_feature 1..1335: note = Description of Artificial Sequence: Synthetic coding sequence
  source 1..1335: mol_type = other DNA
atgaaggtggtgcccagcctgctgctgagcgtgctgctggcccaggtgtggctggtgcccggcctggcccccagcccccagagccccgagacccccgccccccagaaccagaccagcagagtggtgcaggcccccaaggaggaggaggaggacgagcaggaggccagcgaggagaaggccagcgaggaggagaaggcctggctgatggccagcagacagcagctggccaaggagaccagcaacttcggcttcagcctgctgagaaagatcagcatgagacacgacggcaacatggtgttcagccccttcggcatgagcctggccatgaccggcctgatgctgggcgccaccggccccaccgagacccagatcaagagaggcctgcacctgcaggccctgaagcccaccaagcccggcctgctgcccagcctgttcaagggcctgagagagaccctgagcagaaacctggagctgggcctgacccagggcagcttcgccttcatccacaaggacttcgacgtgaaggagaccttcttcaacctgagcaagagatacttcgacaccgagtgcgtgcccatgaacttcagaaacgccagccaggccaagagactgatgaaccactacatcaacaaggagaccagaggcaagatccccaagctgttcgacgagatcaaccccgagaccaagctgatcctggtggactacatcctgttcaagggcaagtggctgacccccttcgaccccgtgttcaccgaggtggacaccttccacctggacaagtacaagaccatcaaggtgcccatgatgtacggcgccggcaagttcgccagcaccttcgacaagaacttcagatgccacgtgctgaagctgccctaccagggcaacgccaccatgctggtggtgctgatggagaagatgggcgaccacctggccctggaggactacctgaccaccgacctggtggagacctggctgagaaacatgaagaccagaaacatggaggtgttcttccccaagttcaagctggaccagaagtacgagatgcacgagctgctgagacagatgggcatcagaagaatcttcagccccttcgccgacctgagcgagctgagcgccaccggcagaaacctgcaggtgagcagagtgctgcagagaaccgtgatcgaggtggacgagagaggcaccgaggccgtggccggcatcctgagcgagatcaccgcctacagcatgccccccgtgatcaaggtggacagacccttccacttcatgatctacgaggagaccagcggcatgctgctgttcctgggcagagtggtgaaccccaccctgctgtag

SEQ ID NO: 98573 - DNA, 1335 bp, synthetic construct; identical to SEQ ID NO: 98572
  misc_feature 1..1335: note = Description of Artificial Sequence: Synthetic coding sequence
  source 1..1335: mol_type = other DNA

SEQ ID NO: 98574 - DNA, 1335 bp, synthetic construct; identical to SEQ ID NO: 98572
  misc_feature 1..1335: note = Description of Artificial Sequence: Synthetic coding sequence
  source 1..1335: mol_type = other DNA

SEQ ID NO: 98575 - DNA, 1455 bp, synthetic construct
  misc_feature 1..1455: note = Description of Artificial Sequence: Synthetic coding sequence
  source 1..1455: mol_type = other DNA
atgagcagaagcacccaggagctgctgggctaccactgcagactgcaggacaagctgcaggagcaggagggcagcctggccgccgagggcagacacagcctggccagcgccgccgaccacatgaaggtggtgcccagcctgctgctgagcgtgctgctggcccaggtgtggctggtgcccggcctggcccccagcccccagagccccgagacccccgccccccagaaccagaccagcagagtggtgcaggcccccaaggaggaggaggaggacgagcaggaggccagcgaggagaaggccagcgaggaggagaaggcctggctgatggccagcagacagcagctggccaaggagaccagcaacttcggcttcagcctgctgagaaagatcagcatgagacacgacggcaacatggtgttcagccccttcggcatgagcctggccatgaccggcctgatgctgggcgccaccggccccaccgagacccagatcaagagaggcctgcacctgcaggccctgaagcccaccaagcccggcctgctgcccagcctgttcaagggcctgagagagaccctgagcagaaacctggagctgggcctgacccagggcagcttcgccttcatccacaaggacttcgacgtgaaggagaccttcttcaacctgagcaagagatacttcgacaccgagtgcgtgcccatgaacttcagaaacgccagccaggccaagagactgatgaaccactacatcaacaaggagaccagaggcaagatccccaagctgttcgacgagatcaaccccgagaccaagctgatcctggtggactacatcctgttcaagggcaagtggctgacccccttcgaccccgtgttcaccgaggtggacaccttccacctggacaagtacaagaccatcaaggtgcccatgatgtacggcgccggcaagttcgccagcaccttcgacaagaacttcagatgccacgtgctgaagctgccctaccagggcaacgccaccatgctggtggtgctgatggagaagatgggcgaccacctggccctggaggactacctgaccaccgacctggtggagacctggctgagaaacatgaagaccagaaacatggaggtgttcttccccaagttcaagctggaccagaagtacgagatgcacgagctgctgagacagatgggcatcagaagaatcttcagccccttcgccgacctgagcgagctgagcgccaccggcagaaacctgcaggtgagcagagtgctgcagagaaccgtgatcgaggtggacgagagaggcaccgaggccgtggccggcatcctgagcgagatcaccgcctacagcatgccccccgtgatcaaggtggacagacccttccacttcatgatctacgaggagaccagcggcatgctgctgttcctgggcagagtggtgaaccccaccctgctgtag

SEQ ID NO: 98576 - DNA, 288 bp, synthetic construct
  misc_feature 1..288: note = Description of Artificial Sequence: Synthetic coding sequence
  source 1..288: mol_type = other DNA
atggagagaatgctgcccctgctggccctgggcctgctggccgccggcttctgccccgccgtgctgtgccaccccaacagccccctggacgaggagaacctgacccaggagaaccaggacagaggcacccacgtggacctgggcctggccagcgccaacgtggacttcgccttcagcctgtacaagcacccccacagatggagcatcagactgtgcctgatgtacctgagaagagcccagaagcacctgctgccccagcagagcaagagccccagcttcctgcactag

SEQ ID NO: 98577 - DNA, 1272 bp, synthetic construct
  misc_feature 1..1272: note = Description of Artificial Sequence: Synthetic coding sequence
  source 1..1272: mol_type = other DNA
atggagagaatgctgcccctgctggccctgggcctgctggccgccggcttctgccccgccgtgctgtgccaccccaacagccccctggacgaggagaacctgacccaggagaaccaggacagaggcacccacgtggacctgggcctggccagcgccaacgtggacttcgccttcagcctgtacaagcagctggtgctgaaggcccccgacaagaacgtgatcttcagccccctgagcatcagcaccgccctggccttcctgagcctgggcgcccacaacaccaccctgaccgagatcctgaagggcctgaagttcaacctgaccgagaccagcgaggccgagatccaccagagcttccagcacctgctgagaaccctgaaccagagcagcgacgagctgcagctgagcatgggcaacgccatgttcgtgaaggagcagctgagcctgctggacagattcaccgaggacgccaagagactgtacggcagcgaggccttcgccaccgacttccaggacagcgccgccgccaagaagctgatcaacgactacgtgaagaacggcaccagaggcaagatcaccgacctgatcaaggacctggacagccagaccatgatggtgctggtgaactacatcttcttcaaggccaagtgggagatgcccttcgacccccaggacacccaccagagcagattctacctgagcaagaagaagtgggtgatggtgcccatgatgagcctgcaccacctgaccatcccctacttcagagacgaggagctgagctgcaccgtggtggagctgaagtacaccggcaacgccagcgccctgttcatcctgcccgaccaggacaagatggaggaggtggaggccatgctgctgcccgagaccctgaagagatggagagacagcctggagttcagagagatcggcgagctgtacctgcccaagttcagcatcagcagagactacaacctgaacgacatcctgctgcagctgggcatcgaggaggccttcaccagcaaggccgacctgagcggcatcaccggcgccagaaacctggccgtgagccaggtggtgcacaaggccgtgctggacgtgttcgaggagggcaccgaggccagcgccgccaccgccgtgaagatcaccctgctgagcgccctggtggagaccagaaccatcgtgagattcaacagacccttcctgatgatcatcgtgcccaccgacacccagaacatcttcttcatgagcaaggtgaccaaccccaagcaggcctag

SEQ ID NO: 98578 - DNA, 1272 bp, synthetic construct; identical to SEQ ID NO: 98577
  misc_feature 1..1272: note = Description of Artificial Sequence: Synthetic coding sequence
  source 1..1272: mol_type = other DNA

SEQ ID NO: 98579 - DNA, 1272 bp, synthetic construct; identical to SEQ ID NO: 98577
  misc_feature 1..1272: note = Description of Artificial Sequence: Synthetic coding sequence
  source 1..1272: mol_type = other DNA

SEQ ID NO: 98580 - DNA, 1347 bp, synthetic construct
  misc_feature 1..1347: note = Description of Artificial Sequence: Synthetic coding sequence
  source 1..1347: mol_type = other DNA
atgaagatccactacagcagacagaccgccctggagagcaccagctacatccagctgcccgaggccgagctgagaatggagagaatgctgcccctgctggccctgggcctgctggccgccggcttctgccccgccgtgctgtgccaccccaacagccccctggacgaggagaacctgacccaggagaaccaggacagaggcacccacgtggacctgggcctggccagcgccaacgtggacttcgccttcagcctgtacaagcagctggtgctgaaggcccccgacaagaacgtgatcttcagccccctgagcatcagcaccgccctggccttcctgagcctgggcgcccacaacaccaccctgaccgagatcctgaagggcctgaagttcaacctgaccgagaccagcgaggccgagatccaccagagcttccagcacctgctgagaaccctgaaccagagcagcgacgagctgcagctgagcatgggcaacgccatgttcgtgaaggagcagctgagcctgctggacagattcaccgaggacgccaagagactgtacggcagcgaggccttcgccaccgacttccaggacagcgccgccgccaagaagctgatcaacgactacgtgaagaacggcaccagaggcaagatcaccgacctgatcaaggacctggacagccagaccatgatggtgctggtgaactacatcttcttcaaggccaagtgggagatgcccttcgacccccaggacacccaccagagcagattctacctgagcaagaagaagtgggtgatggtgcccatgatgagcctgcaccacctgaccatcccctacttcagagacgaggagctgagctgcaccgtggtggagctgaagtacaccggcaacgccagcgccctgttcatcctgcccgaccaggacaagatggaggaggtggaggccatgctgctgcccgagaccctgaagagatggagagacagcctggagttcagagagatcggcgagctgtacctgcccaagttcagcatcagcagagactacaacctgaacgacatcctgctgcagctgggcatcgaggaggccttcaccagcaaggccgacctgagcggcatcaccggcgccagaaacctggccgtgagccaggtggtgcacaaggccgtgctggacgtgttcgaggagggcaccgaggccagcgccgccaccgccgtgaagatcaccctgctgagcgccctggtggagaccagaaccatcgtgagattcaacagacccttcctgatgatcatcgtgcccaccgacacccagaacatcttcttcatgagcaaggtgaccaaccccaagcaggcctag

SEQ ID NO: 98581 - DNA, 918 bp, synthetic construct
  misc_feature 1..918: note = Description of Artificial Sequence: Synthetic coding sequence
  source 1..918: mol_type = other DNA
atggagagaatgctgcccctgctggccctgggcctgctggccgccggcttctgccccgccgtgctgtgccaccccaacagccccctggacgaggagaacctgacccaggagaaccaggacagaggcacccacgtggacctgggcctggccagcgccaacgtggacttcgccttcagcctgtacaagcagctggtgctgaaggcccccgacaagaacgtgatcttcagccccctgagcatcagcaccgccctggccttcctgagcctgggcgcccacaacaccaccctgaccgagatcctgaagggcctgaagttcaacctgaccgagaccagcgaggccgagatccaccagagcttccagcacctgctgagaaccctgaaccagagcagcgacgagctgcagctgagcatgggcaacgccatgttcgtgaaggagcagctgagcctgctggacagattcaccgaggacgccaagagactgtacggcagcgaggccttcgccaccgacttccaggacagcgccgccgccaagaagctgatcaacgactacgtgaagaacggcaccagaggcaagatcaccgacctgatcaaggacctggacagccagaccatgatggtgctggtgaactacatcttcttcaaggccaagtgggagatgcccttcgacccccaggacacccaccagagcagattctacctgagcaagaagaagtgggtgatggtgcccatgatgagcctgcaccacctgaccatcccctacttcagagacgaggagctgagctgcaccgtggtggagctgaagtacaccggcaacgccagcgccctgttcatcctgcccgaccaggacaagatggaggaggtggaggccatgctgctgcccgagaccctgaagagatggagagacagcctggagttctag

SEQ ID NO: 98582 - DNA, 1284 bp, synthetic construct
  misc_feature 1..1284: note = Description of Artificial Sequence: Synthetic coding sequence
  source 1..1284: mol_type = other DNA
atgcacctgatcgactacctgctgctgctgctggtgggcctgctggccctgagccacggccagctgcacgtggagcacgacggcgagagctgcagcaacagcagccaccagcagatcctggagaccggcgagggcagccccagcctgaagatcgcccccgccaacgccgacttcgccttcagattctactacctgatcgccagcgagacccccggcaagaacatcttcttcagccccctgagcatcagcgccgcctacgccatgctgagcctgggcgcctgcagccacagcagaagccagatcctggagggcctgggcttcaacctgaccgagctgagcgagagcgacgtgcacagaggcttccagcacctgctgcacaccctgaacctgcccggccacggcctggagaccagagtgggcagcgccctgttcctgagccacaacctgaagttcctggccaagttcctgaacgacaccatggccgtgtacgaggccaagctgttccacaccaacttctacgacaccgtgggcaccatccagctgatcaacgaccacgtgaagaaggagaccagaggcaagatcgtggacctggtgagcgagctgaagaaggacgtgctgatggtgctggtgaactacatctacttcaaggccctgtgggagaagcccttcatcagcagcagaaccacccccaaggacttctacgtggacgagaacaccaccgtgagagtgcccatgatgctgcaggaccaggagcaccactggtacctgcacgacagatacctgccctgcagcgtgctgagaatggactacaagggcgacgccaccgtgttcttcatcctgcccaaccagggcaagatgagagagatcgaggaggtgctgacccccgagatgctgatgagatggaacaacctgctgagaaagagaaacttctacaagaagctggagctgcacctgcccaagttcagcatcagcggcagctacgtgctggaccagatcctgcccagactgggcttcaccgacctgttcagcaagtgggccgacctgagcggcatcaccaagcagcagaagctggaggccagcaagagcttccacaaggccaccctggacgtggacgaggccggcaccgaggccgccgccgccaccagcttcgccatcaagttcttcagcgcccagaccaacagacacatcctgagattcaacagacccttcctggtggtgatcttcagcaccagcacccagagcgtgctgttcctgggcaaggtggtggaccccaccaagccctag

SEQ ID NO: 98583 - DNA, 1284 bp, synthetic construct; identical to SEQ ID NO: 98582
  misc_feature 1..1284: note = Description of Artificial Sequence: Synthetic coding sequence
  source 1..1284: mol_type = other DNA

SEQ ID NO: 98584 - DNA, 1284 bp, synthetic construct; identical to SEQ ID NO: 98582
  misc_feature 1..1284: note = Description of Artificial Sequence: Synthetic coding sequence
  source 1..1284: mol_type = other DNA

SEQ ID NO: 98585 - DNA, 1218 bp, synthetic construct
  misc_feature 1..1218: note = Description of Artificial Sequence: Synthetic coding sequence
  source 1..1218: mol_type = other DNA
atgcccctgctgctgtacacctgcctgctgtggctgcccaccagcggcctgtggaccgtgcaggccatggaccccaacgccgcctacgtgaacatgagcaaccaccacagaggcctggccagcgccaacgtggacttcgccttcagcctgtacaagcacctggtggccctgagccccaagaagaacatcttcatcagccccgtgagcatcagcatggccctggccatgctgagcctgggcacctgcggccacaccagagcccagctgctgcagggcctgggcttcaacctgaccgagagaagcgagaccgagatccaccagggcttccagcacctgcaccagctgttcgccaagagcgacaccagcctggagatgaccatgggcaacgccctgttcctggacggcagcctggagctgctggagagcttcagcgccgacatcaagcactactacgagagcgaggtgctggccatgaacttccaggactgggccaccgccagcagacagatcaacagctacgtgaagaacaagacccagggcaagatcgtggacctgttcagcggcctggacagccccgccatcctggtgctggtgaactacatcttcttcaagggcacctggacccagcccttcgacctggccagcaccagagaggagaacttctacgtggacgagaccaccgtggtgaaggtgcccatgatgctgcagagcagcaccatcagctacctgcacgacagcgagctgccctgccagctggtgcagatgaactacgtgggcaacggcaccgtgttcttcatcctgcccgacaagggcaagatgaacaccgtgatcgccgccctgagcagagacaccatcaacagatggagcgccggcctgaccagcagccaggtggacctgtacatccccaaggtgaccatcagcggcgtgtacgacctgggcgacgtgctggaggagatgggcatcgccgacctgttcaccaaccaggccaacttcagcagaatcacccaggacgcccagctgaagagcagcaaggtggtgcacaaggccgtgctgcagctgaacgaggagggcgtggacaccgccggcagcaccggcgtgaccctgaacctgaccagcaagcccatcatcctgagattcaaccagcccttcatcatcatgatcttcgaccacttcacctggagcagcctgttcctggccagagtgatgaaccccgtgtag

SEQ ID NO: 98586 - DNA, 411 bp, synthetic construct
  misc_feature 1..411: note = Description of Artificial Sequence: Synthetic coding sequence
  source 1..411: mol_type = other DNA
atgcccctgctgctgtacacctgcctgctgtggctgcccaccagcggcctgtggaccgtgcaggccatggaccccaacgccgcctacgtgaacatgagcaaccaccacagaggcctggccagcgccaacgtggacttcgccttcagcctgtacaagcacctggtggccctgagccccaagaagaacatcttcatcagccccgtgagcatcagcatggccctggccatgctgagcctgggcacctgcggccacaccagagcccagctgctgcagggcctgggcttcaacctgaccgagagaagcgagaccgagatccaccagggcttccagcacctgcaccagctgttcgccaagagcgacaccagcctggagatgaccatgggcaacgccctgttcctggacggcagctag

SEQ ID NO: 98587 - DNA, 1194 bp, synthetic construct
  misc_feature 1..1194: note = Description of Artificial Sequence: Synthetic coding sequence
  source 1..1194: mol_type = other DNA
atggacagcctggccaccagcatcaaccagttcgccctggagctgagcaagaagctggccgagagcgcccagggcaagaacatcttcttcagcagctggagcatcagcaccagcctgaccatcgtgtacctgggcgccaagggcaccaccgccgcccagatggcccaggtgctgcagttcaacagagaccagggcgtgaagtgcgaccccgagagcgagaagaagagaaagatggagttcaacctgagcaacagcgaggagatccacagcgacttccagaccctgatcagcgagatcctgaagcccaacgacgactacctgctgaagaccgccaacgccatctacggcgagaagacctacgccttccacaacaagtacctggaggacatgaagacctacttcggcgccgagccccagcccgtgaacttcgtggaggccagcgaccagatcagaaaggacatcaacagctgggtggagagacagaccgagggcaagatccagaacctgctgcccgacgacagcgtggacagcaccaccagaatgatcctggtgaacgccctgtacttcaagggcatctgggagcaccagttcctggtgcagaacaccaccgagaagcccttcagaatcaacgagaccaccagcaagcccgtgcagatgatgttcatgaagaagaagctgcacatcttccacatcgagaagcccaaggccgtgggcctgcagctgtactacaagagcagagacctgagcctgctgatcctgctgcccgaggacatcaacggcctggagcagctggagaaggccatcacctacgagaagctgaacgagtggaccagcgccgacatgatggagctgtacgaggtgcagctgcacctgcccaagttcaagctggaggacagctacgacctgaagagcaccctgagcagcatgggcatgagcgacgccttcagccagagcaaggccgacttcagcggcatgagcagcgccagaaacctgttcctgagcaacgtgttccacaaggccttcgtggagatcaacgagcagggcaccgaggccgccgccggcagcggcagcgagatcgacatcagaatcagagtgcccagcatcgagttcaacgccaaccaccccttcctgttcttcatcagacacaacaagaccaacaccatcctgttctacggcagactgtgcagcccctag

SEQ ID NO: 98588 - DNA, 1020 bp, synthetic construct
  misc_feature 1..1020: note = Description of Artificial Sequence: Synthetic coding sequence
  source 1..1020: mol_type = other DNA
atggacagcctgggcgccgtgagcaccagactgggcttcgacctgttcaaggagctgaagaagaccaacgacggcaacatcttcttcagccccgtgggcatcctgaccgccatcggcatggtgctgctgggcaccagaggcgccaccgccagccagctggaggaggtgttccacagcgagaaggagaccaagagcagcagaatcaaggccgaggagaaggaggtgatcgagaacaccgaggccgtgcaccagcagttccagaagttcctgaccgagatcagcaagctgaccaacgactacgagctgaacatcaccaacagactgttcggcgagaagacctacctgttcctgcagaagtacctggactacgtggagaagtactaccacgccagcctggagcccgtggacttcgtgaacgccgccgacgagagcagaaagaagatcaacagctgggtggagagcaagaccaacgagaagatcaaggacctgttccccgacggcagcatcagcagcagcaccaagctggtgctggtgaacatggtgtacttcaagggccagtgggacagagagttcaagaaggagaacaccaaggaggagaagttctggatgaacaagatcatcgacaagatcagccccgagaagctggtggagtggaccagccccggccacatggaggagagaaaggtgaacctgcacctgcccagattcgaggtggaggacggctacgacctggaggccgtgctggccgccatgggcatgggcgacgccttcagcgagcacaaggccgactacagcggcatgagcagcggcagcggcctgtacgcccagaagttcctgcacagcagcttcgtggccgtgaccgaggagggcaccgaggccgccgccgccaccggcatcggcttcaccgtgaccagcgcccccggccacgagaacgtgcactgcaaccaccccttcctgttcttcatcagacacaacgagagcaacagcatcctgttcttcggcagattcagcagcccctag

SEQ ID NO: 98589 - DNA, 1176 bp, synthetic construct
  misc_feature 1..1176: note = Description of Artificial Sequence: Synthetic coding sequence
  source 1..1176: mol_type = other DNA
atggacagcctgggcgccgtgagcaccagactgggcttcgacctgttcaaggagctgaagaagaccaacgacggcaacatcttcttcagccccgtgggcatcctgaccgccatcggcatggtgctgctgggcaccagaggcgccaccgccagccagctggaggaggtgttccacagcgagaaggagaccaagagcagcagaatcaaggccgaggagaaggaggtgatcgagaacaccgaggccgtgcaccagcagttccagaagttcctgaccgagatcagcaagctgaccaacgactacgagctgaacatcaccaacagactgttcggcgagaagacctacctgttcctgcagaagtacctggactacgtggagaagtactaccacgccagcctggagcccgtggacttcgtgaacgccgccgacgagagcagaaagaagatcaacagctgggtggagagcaagaccaacgagaagatcaaggacctgttccccgacggcagcatcagcagcagcaccaagctggtgctggtgaacatggtgtacttcaagggccagtgggacagagagttcaagaaggagaacaccaaggaggagaagttctggatgaacaagagcaccagcaagagcgtgcagatgatgacccagagccacagcttcagcttcaccttcctggaggacctgcaggccaagatcctgggcatcccctacaagaacaacgacctgagcatgttcgtgctgctgcccaacgacatcgacggcctggagaagatcatcgacaagatcagccccgagaagctggtggagtggaccagccccggccacatggaggagagaaaggtgaacctgcacctgcccagattcgaggtggaggacggctacgacctggaggccgtgctggccgccatgggcatgggcgacgccttcagcgagcacaaggccgactacagcggcatgagcagcggcagcggcctgtacgcccagaagttcctgcacagcagcttcgtggccgtgaccgaggagggcaccgaggccgccgccgccaccggcatcggcttcaccgtgaccagcgcccccggccacgagaacgtgcactgcaaccaccccttcctgttcttcatcagacacaacgagagcaacagcatcctgttcttcggcagattcagcagcccctag

SEQ ID NO: 98590 - DNA, 930 bp, synthetic construct
  misc_feature 1..930: note = Description of Artificial Sequence: Synthetic coding sequence
  source 1..930: mol_type = other DNA
atggacagcctgggcgccgtgagcaccagactgggcttcgacctgttcaaggagctgaagaagaccaacgacggcaacatcttcttcagccccgtgggcatcctgaccgccatcggcatggtgctgctgggcaccagaggcgccaccgccagccagctggaggaggtgttccacagcgagaaggagaccaagagcagcagaatcaaggccgaggagaaggaggtggagaagatcaaggacctgttccccgacggcagcatcagcagcagcaccaagctggtgctggtgaacatggtgtacttcaagggccagtgggacagagagttcaagaaggagaacaccaaggaggagaagttctggatgaacaagagcaccagcaagagcgtgcagatgatgacccagagccacagcttcagcttcaccttcctggaggacctgcaggccaagatcctgggcatcccctacaagaacaacgacctgagcatgttcgtgctgctgcccaacgacatcgacggcctggagaagatcatcgacaagatcagccccgagaagctggtggagtggaccagccccggccacatggaggagagaaaggtgaacctgcacctgcccagattcgaggtggaggacggctacgacctggaggccgtgctggccgccatgggcatgggcgacgccttcagcgagcacaaggccgactacagcggcatgagcagcggcagcggcctgtacgcccagaagttcctgcacagcagcttcgtggccgtgaccgaggagggcaccgaggccgccgccgccaccggcatcggcttcaccgtgaccagcgcccccggccacgagaacgtgcactgcaaccaccccttcctgttcttcatcagacacaacgagagcaacagcatcctgttcttcggcagattcagcagcccctag

SEQ ID NO: 98591 - DNA, 1173 bp, synthetic construct
  misc_feature 1..1173: note = Description of Artificial Sequence: Synthetic coding sequence
  source 1..1173: mol_type = other DNA
atgaacagcctgagcgaggccaacaccaagttcatgttcgacctgttccagcagttcagaaagagcaaggagaacaacatcttctacagccccatcagcatcaccagcgccctgggcatggtgctgctgggcgccaaggacaacaccgcccagcagatcaagaaggtgctgcacttcgaccaggtgaccgagaacaccaccggcaaggccgccacctaccacgtggacagaagcggcaacgtgcaccaccagttccagaagctgctgaccgagttcaacaagagcaccgacgcctacgagctgaagatcgccaacaagctgttcggcgagaagacctacctgttcctgcaggagtacctggacgccatcaagaagttctaccagaccagcgtggagagcgtggacttcgccaacgcccccgaggagagcagaaagaagatcaacagctgggtggagagccagaccaacgagaagatcaagaacctgatccccgagggcaacatcggcagcaacaccaccctggtgctggtgaacgccatctacttcaagggccagtgggagaagaagttcaacaaggaggacaccaaggaggagaagttctggcccaacaagaacacctacaagagcatccagatgatgagacagtacaccagcttccacttcgccagcctggaggacgtgcaggccaaggtgctggagatcccctacaagggcaaggacctgagcatgatcgtgctgctgcccaacgagatcgacggcctgcagaagctggaggagaagctgaccgccgagaagctgatggagtggaccagcctgcagaacatgagagagaccagagtggacctgcacctgcccagattcaaggtggaggagagctacgacctgaaggacaccctgagaaccatgggcatggtggacatcttcaacggcgacgccgacctgagcggcatgaccggcagcagaggcctggtgctgagcggcgtgctgcacaaggccttcgtggaggtgaccgaggagggcgccgaggccgccgccgccaccgccgtggtgggcttcggcagcagccccaccagcaccaacgaggagttccactgcaaccaccccttcctgttcttcatcagacagaacaagaccaacagcatcctgttctacggcagattcagcagcccctag

SEQ ID NO: 98592 - DNA, 1173 bp, synthetic construct
  misc_feature 1..1173: note = Description of Artificial Sequence: Synthetic coding sequence
  source 1..1173: mol_type = other DNA
atgaacagcctgagcgaggccaacaccaagttcatgttcgacctgttccagcagttcagaaagagcaaggagaacaacatcttctacagccccatcagcatcaccagcgccctgggcatggtgctgctgggcgccaaggacaacaccgcccagcagatcagcaaggtgctgcacttcgaccaggtgaccgagaacaccaccgagaaggccgccacctaccacgtggacagaagcggcaacgtgcaccaccagttccagaagctgctgaccgagttcaacaagagcaccgacgcctacgagctgaagatcgccaacaagctgttcggcgagaagacctaccagttcctgcaggagtacctggacgccatcaagaagttctaccagaccagcgtggagagcaccgacttcgccaacgcccccgaggagagcagaaagaagatcaacagctgggtggagagccagaccaacgagaagatcaagaacctgttccccgacggcaccatcggcaacgacaccaccctggtgctggtgaacgccatctacttcaagggccagtgggagaacaagttcaagaaggagaacaccaaggaggagaagttctggcccaacaagaacacctacaagagcgtgcagatgatgagacagtacaacagcttcaacttcgccctgctggaggacgtgcaggccaaggtgctggagatcccctacaagggcaaggacctgagcatgatcgtgctgctgcccaacgagatcgacggcctgcagaagctggaggagaagctgaccgccgagaagctgatggagtggaccagcctgcagaacatgagagagacctgcgtggacctgcacctgcccagattcaagatggaggagagctacgacctgaaggacaccctgagaaccatgggcatggtgaacatcttcaacggcgacgccgacctgagcggcatgacctggagccacggcctgagcgtgagcaaggtgctgcacaaggccttcgtggaggtgaccgaggagggcgtggaggccgccgccgccaccgccgtggtggtggtggagctgagcagccccagcaccaacgaggagttctgctgcaaccaccccttcctgttcttcatcagacagaacaagaccaacagcatcctgttctacggcagattcagcagcccctag

SEQ ID NO: 98593 - DNA, 1017 bp, synthetic construct
  misc_feature 1..1017: note = Description of Artificial Sequence: Synthetic coding sequence
  source 1..1017: mol_type = other DNA
atgaacagcctgagcgaggccaacaccaagttcatgttcgacctgttccagcagttcagaaagagcaaggagaacaacatcttctacagccccatcagcatcaccagcgccctgggcatggtgctgctgggcgccaaggacaacaccgcccagcagatcagcaaggtgctgcacttcgaccaggtgaccgagaacaccaccgagaaggccgccacctaccacgtggacagaagcggcaacgtgcaccaccagttccagaagctgctgaccgagttcaacaagagcaccgacgcctacgagctgaagatcgccaacaagctgttcggcgagaagacctaccagttcctgcaggagtacctggacgccatcaagaagttctaccagaccagcgtggagagcaccgacttcgccaacgcccccgaggagagcagaaagaagatcaacagctgggtggagagccagaccaacgagaagatcaagaacctgttccccgacggcaccatcggcaacgacaccaccctggtgctggtgaacgccatctacttcaagggccagtgggagaacaagttcaagaaggagaacaccaaggaggagaagttctggcccaacaagctggaggagaagctgaccgccgagaagctgatggagtggaccagcctgcagaacatgagagagacctgcgtggacctgcacctgcccagattcaagatggaggagagctacgacctgaaggacaccctgagaaccatgggcatggtgaacatcttcaacggcgacgccgacctgagcggcatgacctggagccacggcctgagcgtgagcaaggtgctgcacaaggccttcgtggaggtgaccgaggagggcgtggaggccgccgccgccaccgccgtggtggtggtggagctgagcagccccagcaccaacgaggagttctgctgcaaccaccccttcctgttcttcatcagacagaacaagaccaacagcatcctgttctacggcagattcagcagcccctag

SEQ ID NO: 98594 - DNA, 1128 bp, synthetic construct
  misc_feature 1..1128: note = Description of Artificial Sequence: Synthetic coding sequence
  source 1..1128: mol_type = other DNA
atggacgccctgcagctggccaacagcgccttcgccgtggacctgttcaagcagctgtgcgagaaggagcccctgggcaacgtgctgttcagccccatctgcctgagcaccagcctgagcctggcccaggtgggcgccaagggcgacaccgccaacgagatcggccaggtgctgcacttcgagaacgtgaaggacgtgcccttcggcttccagaccgtgaccagcgacgtgaacaagctgagcagcttctacagcctgaagctgatcaagagactgtacgtggacaagagcctgaacctgagcaccgagttcatcagcagcaccaagagaccctacgccaaggagctggagaccgtggacttcaaggacaagctggaggagaccaagggccagatcaacaacagcatcaaggacctgaccgacggccacttcgagaacatcctggccgacaacagcgtgaacgaccagaccaagatcctggtggtgaacgccgcctacttcgtgggcaagtggatgaagaagttcagcgagagcgagaccaaggagtgccccttcagagtgaacaagaccgacaccaagcccgtgcagatgatgaacatggaggccaccttctgcatgggcaacatcgacagcatcaactgcaagatcatcgagctgcccttccagaacaagcacctgagcatgttcatcctgctgcccaaggacgtggaggacgagagcaccggcctggagaagatcgagaagcagctgaacagcgagagcctgagccagtggaccaaccccagcaccatggccaacgccaaggtgaagctgagcatccccaagttcaaggtggagaagatgatcgaccccaaggcctgcctggagaacctgggcctgaagcacatcttcagcgaggacaccagcgacttcagcggcatgagcgagaccaagggcgtggccctgagcaacgtgatccacaaggtgtgcctggagatcaccgaggacggcggcgacagcatcgaggtgcccggcgccagaatcctgcagcacaaggacgagctgaacgccgaccaccccttcatctacatcatcagacacaacaagaccagaaacatcatcttcttcggcaagttctgcagcccctag

SEQ ID NO: 98595 - DNA, 390 bp, synthetic construct
  misc_feature 1..390: note = Description of Artificial Sequence: Synthetic coding sequence
  source 1..390: mol_type = other DNA
atggacgccctgcagctggccaacagcgccttcgccgtggacctgttcaagcagctgtgcgagaaggagcccctgggcaacgtgctgttcagccccatctgcctgagcaccagcctgagcctggcccaggtgggcgccaagggcgacaccgccaacgagatcggccaggtgctgcacttcgagaacgtgaaggacgtgcccttcggcttccagaccgtgaccagcgacgtgaacaagctgagcagcttctacagcctgaagctgatcaagagactgtacgtggacaagagcctgaacctgagcaccgagttcatcagcagcaccaagagaccctacgccaaggagctggagaccgtggacttcaaggacaagctggaggagaccaagtag

SEQ ID NO: 98596 - DNA, 1131 bp, synthetic construct
  misc_feature 1..1131: note = Description of Artificial Sequence: Synthetic coding sequence
  source 1..1131: mol_type = other DNA
atggacgtgctggccgaggccaacggcaccttcgccctgaacctgctgaagaccctgggcaaggacaacagcaagaacgtgttcttcagccccatgagcatgagctgcgccctggccatggtgtacatgggcgccaagggcaacaccgccgcccagatggcccagatcctgagcttcaacaagagcggcggcggcggcgacatccaccagggcttccagagcctgctgaccgaggtgaacaagaccggcacccagtacctgctgagaatggccaacagactgttcggcgagaagagctgcgacttcctgagcagcttcagagacagctgccagaagttctaccaggccgagatggaggagctggacttcatcagcgccgtggagaagagcagaaagcacatcaacacctgggtggccgagaagaccgagggcaagatcgccgagctgctgagccccggcagcgtggaccccctgaccagactggtgctggtgaacgccgtgtacttcagaggcaactgggacgagcagttcgacaaggagaacaccgaggagagactgttcaaggtgagcaagaacgaggagaagcccgtgcagatgatgttcaagcagagcaccttcaagaagacctacatcggcgagatcttcacccagatcctggtgctgccctacgtgggcaaggagctgaacatgatcatcatgctgcccgacgagaccaccgacctgagaaccgtggagaaggagctgacctacgagaagttcgtggagtggaccagactggacatgatggacgaggaggaggtggaggtgagcctgcccagattcaagctggaggagagctacgacatggagagcgtgctgagaaacctgggcatgaccgacgccttcgagctgggcaaggccgacttcagcggcatgagccagaccgacctgagcctgagcaaggtggtgcacaagagcttcgtggaggtgaacgaggagggcaccgaggccgccgccgccaccgccgccatcatgatgatgagatgcgccagattcgtgcccagattctgcgccgaccaccccttcctgttcttcatccagcacagcaagaccaacggcatcctgttctgcggcagattcagcagcccctag

SEQ ID NO: 98597 - DNA, 546 bp, synthetic construct
  misc_feature 1..546: note = Description of Artificial Sequence: Synthetic coding sequence
  source 1..546: mol_type = other DNA
tgactgaacctgctgaagaccctgggcaaggacaacagcaagaacgtgttcttcagccccatgagcatgagctgcgccctggccatggtgtacatgggcgccaagggcaacaccgccgcccagatggcccagatcctgagcttcaacaagagcggcggcggcggcgacatccaccagggcttccagagcctgctgaccgaggtgaacaagaccggcacccagtacctgctgagaatggccaacagagagagctacgacatggagagcgtgctgagaaacctgggcatgaccgacgccttcgagctgggcaaggccgacttcagcggcatgagccagaccgacctgagcctgagcaaggtggtgcacaagagcttcgtggaggtgaacgaggagggcaccgaggccgccgccgccaccgccgccatcatgatgatgagatgcgccagattcgtgcccagattctgcgccgaccaccccttcctgttcttcatccagcacagcaagaccaacggcatcctgttctgcggcagattcagcagcccctag

SEQ ID NO: 98598 - DNA, 1131 bp, synthetic construct; identical to SEQ ID NO: 98596
  misc_feature 1..1131: note = Description of Artificial Sequence: Synthetic coding sequence
  source 1..1131: mol_type = other DNA

SEQ ID NO: 98599 - DNA, 1131 bp, synthetic construct; identical to SEQ ID NO: 98596
  misc_feature 1..1131: note = Description of Artificial Sequence: Synthetic coding sequence
  source 1..1131: mol_type = other DNA

SEQ ID NO: 98600 - DNA, 1131 bp, synthetic construct; identical to SEQ ID NO: 98596
  misc_feature 1..1131: note = Description of Artificial Sequence: Synthetic coding sequence
  source 1..1131: mol_type = other DNA

SEQ ID NO: 98601 - DNA, 1131 bp, synthetic construct; identical to SEQ ID NO: 98596
  misc_feature 1..1131: note = Description of Artificial Sequence: Synthetic coding sequence
  source 1..1131: mol_type = other DNA

SEQ ID NO: 98602 - DNA, 1131 bp, synthetic construct; identical to SEQ ID NO: 98596
  misc_feature 1..1131: note = Description of Artificial Sequence: Synthetic coding sequence
  source 1..1131: mol_type = other DNA

SEQ ID NO: 98603 - DNA, 579 bp, synthetic construct
  misc_feature 1..579: note = Description of Artificial Sequence: Synthetic coding sequence
  source 1..579: mol_type = other DNA
atggacgtgctggccgaggccaacggcaccttcgccctgaacctgctgaagaccctgggcaaggacaacagcaagaacgtgttcttcagccccatgagcatgagctgcgccctggccatggtgtacatgggcgccaagggcaacaccgccgcccagatggcccagatcctgagcttcaacaagagcggcggcggcggcgacatccaccagggcttccagagcctgctgaccgaggtgaacaagaccggcacccagtacctgctgagaatggccaacagagagagctacgacatggagagcgtgctgagaaacctgggcatgaccgacgccttcgagctgggcaaggccgacttcagcggcatgagccagaccgacctgagcctgagcaaggtggtgcacaagagcttcgtggaggtgaacgaggagggcaccgaggccgccgccgccaccgccgccatcatgatgatgagatgcgccagattcgtgcccagattctgcgccgaccaccccttcctgttcttcatccagcacagcaagaccaacggcatcctgttctgcggcagattcagcagcccctag

SEQ ID NO: 98604 - DNA, 1143 bp, synthetic construct
  misc_feature 1..1143: note = Description of Artificial Sequence: Synthetic coding sequence
  source 1..1143: mol_type = other DNA
atggccagcctggccgccgccaacgccgagttctgcttcaacctgttcagagagatggacgacaaccagggcaacggcaacgtgttcttcagcagcctgagcctgttcgccgccctggccctggtgagactgggcgcccaggacgacagcctgagccagatcgacaagctgctgcacgtgaacaccgccagcggctacggcaacagcagcaacagccagagcggcctgcagagccagctgaagagagtgttcagcgacatcaacgccagccacaaggactacgacctgagcatcgtgaacggcctgttcgccgagaaggtgtacggcttccacaaggactacatcgagtgcgccgagaagctgtacgacgccaaggtggagagagtggacttcaccaaccacctggaggacaccagaagaaacatcaacaagtgggtggagaacgagacccacggcaagatcaagaacgtgatcggcgagggcggcatcagcagcagcgccgtgatggtgctggtgaacgccgtgtacttcaagggcaagtggcagagcgccttcaccaagagcgagaccatcaactgccacttcaagagccccaagtgcagcggcaaggccgtggccatgatgcaccaggagagaaagttcaacctgagcgtgatcgaggaccccagcatgaagatcctggagctgagatacaacggcggcatcaacatgtacgtgctgctgcccgagaacgacctgagcgagatcgagaacaagctgaccttccagaacctgatggagtggaccaaccccagaagaatgaccagcaagtacgtggaggtgttcttcccccagttcaagatcgagaagaactacgagatgaagcagtacctgagagccctgggcctgaaggacatcttcgacgagagcaaggccgacctgagcggcatcgccagcggcggcagactgtacatcagcagaatgatgcacaagagctacatcgaggtgaccgaggagggcaccgaggccaccgccgccaccggcagcaacatcgtggagaagcagctgccccagagcaccctgttcagagccgaccaccccttcctgttcgtgatcagaaaggacgacatcatcctgttcagcggcaaggtgagctgcccctag

SEQ ID NO: 98605 - DNA, 1143 bp, synthetic construct; identical to SEQ ID NO: 98604
  misc_feature 1..1143: note = Description of Artificial Sequence: Synthetic coding sequence
  source 1..1143: mol_type = other DNA

SEQ ID NO: 98606 - DNA, 387 bp, synthetic construct
  misc_feature 1..387: note = Description of Artificial Sequence: Synthetic coding sequence
  source 1..387: mol_type = other DNA
atggccagcctggccgccgccaacgccgagttctgcttcaacctgttcagagagatggacgacaaccagggcaacggcaacgtgttcttcagcagcctgagcctgttcgccgccctggccctggtgagactgggcgcccaggacgacagcctgagccagatcgacaagctgctgcacgtgaacaccgccagcggctacggcaacagcagcaacagccagagcggcctgcagagccagctgaagagagtgttcagcgacatcaacgccagccacaaggactacgacctgagcatcgtgaacggcctgttcgccgagaaggtgtacggcttccacaaggactacatcgagtgcgccgagaagctgtacgacgccaaggtggagagatag

SEQ ID NO: 98607 - DNA, 387 bp, synthetic construct; identical to SEQ ID NO: 98606
  misc_feature 1..387: note = Description of Artificial Sequence: Synthetic coding sequence
  source 1..387: mol_type = other DNA

SEQ ID NO: 98608 - DNA, 498 bp, synthetic construct
  misc_feature 1..498: note = Description of Artificial Sequence: Synthetic coding sequence
  source 1..498: mol_type = other DNA
atggccagcctggccgccgccaacgccgagttctgcttcaacctgttcagagagatggacgacaaccagggcaacggcaacgtgttcttcagcagcctgagcctgttcgccgccctggccctggtgagactgggcgcccaggacgacagcctgagccagatcgacaagctgctgcacgtgaacaccgccagcggctacggcaacagcagcaacagccagagcggcctgcagagccagctgaagagagtgttcagcgacatcaacgccagccacaaggactacgacctgagcatcgtgaacggcctgttcgccgagaaggtgtacggcttccacaaggactacatcgagtgcgccgagaagctgtacgacgccaaggtggagagagtggacttcaccaaccacctggaggacaccagaagaaacatcaacaagtgggtggagaacgagacccacggcaagatcaagaacgtgatcggcgagggcggcatcagcagctag

SEQ ID NO: 98609 - DNA, 1092 bp, synthetic construct
  misc_feature 1..1092: note = Description of Artificial Sequence: Synthetic coding sequence
  source 1..1092: mol_type = other DNA
atggccagcctggccgccgccaacgccgagttctgcttcaacctgttcagagagatggacgacaaccagggcaacggcaacgtgttcttcagcagcctgagcctgttcgccgccctggccctggtgagactgggcgcccaggacgacagcctgagccagatcgacaagagcggcctgcagagccagctgaagagagtgttcagcgacatcaacgccagccacaaggactacgacctgagcatcgtgaacggcctgttcgccgagaaggtgtacggcttccacaaggactacatcgagtgcgccgagaagctgtacgacgccaaggtggagagagtggacttcaccaaccacctggaggacaccagaagaaacatcaacaagtgggtggagaacgagacccacggcaagatcaagaacgtgatcggcgagggcggcatcagcagcagcgccgtgatggtgctggtgaacgccgtgtacttcaagggcaagtggcagagcgccttcaccaagagcgagaccatcaactgccacttcaagagccccaagtgcagcggcaaggccgtggccatgatgcaccaggagagaaagttcaacctgagcgtgatcgaggaccccagcatgaagatcctggagctgagatacaacggcggcatcaacatgtacgtgctgctgcccgagaacgacctgagcgagatcgagaacaagctgaccttccagaacctgatggagtggaccaaccccagaagaatgaccagcaagtacgtggaggtgttcttcccccagttcaagatcgagaagaactacgagatgaagcagtacctgagagccctgggcctgaaggacatcttcgacgagagcaaggccgacctgagcggcatcgccagcggcggcagactgtacatcagcagaatgatgcacaagagctacatcgaggtgaccgaggagggcaccgaggccaccgccgccaccggcagcaacatcgtggagaagcagctgccccagagcaccctgttcagagccgaccaccccttcctgttcgtgatcagaaaggacgacatcatcctgttcagcggcaaggtgagctgcccctag

SEQ ID NO: 98610 - DNA, 1143 bp, synthetic construct; identical to SEQ ID NO: 98604
  misc_feature 1..1143: note = Description of Artificial Sequence: Synthetic coding sequence
  source 1..1143: mol_type = other DNA

SEQ ID NO: 98611 - DNA, 1125 bp, synthetic construct
  misc_feature 1..1125: note = Description of Artificial Sequence: Synthetic coding sequence
  source 1..1125: mol_type = other DNA
atggacgacctgtgcgaggccaacggcaccttcgccatcagcctgttcaagatcctgggcgaggaggacaacagcagaaacgtgttcttcagccccatgagcatcagcagcgccctggccatggtgttcatgggcgccaagggcagcaccgccgcccagatgagccaggccctgtgcctgtacaaggacggcgacatccacagaggcttccagagcctgctgagcgaggtgaacagaaccggcacccagtacctgctgagaaccgccaacagactgttcggcgagaagacctgcgacttcctgcccgacttcaaggagtactgccagaagttctaccaggccgagctggaggagctgagcttcgccgaggacaccgaggagtgcagaaagcacatcaacgactgggtggccgagaagaccgagggcaagatcagcgaggtgctggacgccggcaccgtggaccccctgaccaagctggtgctggtgaacgccatctacttcaagggcaagtggaacgagcagttcgacagaaagtacaccagaggcatgctgttcaagaccaacgaggagaagaagaccgtgcagatgatgttcaaggaggccaagttcaagatgggctacgccgacgaggtgcacacccaggtgctggagctgccctacgtggaggaggagctgagcatggtgatcctgctgcccgacgacaacaccgacctggccgtggtggagaaggccctgacctacgagaagttcaaggcctggaccaacagcgagaagctgaccaagagcaaggtgcaggtgttcctgcccagactgaagctggaggagagctacgacctggagcccttcctgagaagactgggcatgatcgacgccttcgacgaggccaaggccgacttcagcggcatgagcaccgagaagaacgtgcccctgagcaaggtggcccacaagtgcttcgtggaggtgaacgaggagggcaccgaggccgccgccgccaccgccgtggtgagaaacagcagatgcagcagaatggagcccagattctgcgccgaccaccccttcctgttcttcatcagacaccacaagaccaactgcatcctgttctgcggcagattcagcagcccctag

SEQ ID NO: 98612 - DNA, 1125 bp, synthetic construct; identical to SEQ ID NO: 98611
  misc_feature 1..1125: note = Description of Artificial Sequence: Synthetic coding sequence
  source 1..1125: mol_type = other DNA

SEQ ID NO: 98613 - DNA, 495 bp, synthetic construct
  misc_feature 1..495: note = Description of Artificial Sequence: Synthetic coding sequence
  source 1..495: mol_type = other DNA
atggacgacctgtgcgaggccaacggcaccttcgccatcagcctgttcaagatcctgggcgaggaggacaacagcagaaacgtgttcttcagccccatgagcatcagcagcgccctggccatggtgttcatgggcgccaagggcagcaccgccgcccagatgagccaggccctgtgcctgtacaaggacggcgacatccacagaggcttccagagcctgctgagcgaggtgaacagaaccggcacccagtacctgctgagaaccgccaacagactgttcggcgagaagacctgcgacttcctgcccgacttcaaggagtactgccagaagttctaccaggccgagctggaggagctgagcttcgccgaggacaccgaggagtgcagaaagcacatcaacgactgggtggccgagaagaccgagggcaagatcagcgaggtgctggacgccggcaccgtggaccccctgaccaagctggtgctggtgaacgcctag

SEQ ID NO: 98614 - DNA, 375 bp, synthetic construct
  misc_feature 1..375: note = Description of Artificial Sequence: Synthetic coding sequence
  source 1..375: mol_type = other DNA
atggacgacctgtgcgaggccaacggcaccttcgccatcagcctgttcaagatcctgggcgaggaggacaacagcagaaacgtgttcttcagccccatgagcatcagcagcgccctggccatggtgttcatgggcgccaagggcagcaccgccgcccagatgagccaggccctgtgcctgtacaaggacggcgacatccacagaggcttccagagcctgctgagcgaggtgaacagaaccggcacccagtacctgctgagaaccgccaacagactgttcggcgagaagacctgcgacttcctgcccgacttcaaggagtactgccagaagttctaccaggccgagctggaggagctgagcttcgccgaggactag

SEQ ID NO: 98615 - DNA, 579 bp, synthetic construct
  misc_feature 1..579: note = Description of Artificial Sequence: Synthetic coding sequence
  source 1..579: mol_type = other DNA
atgctgttcaagaccaacgaggagaagaagaccgtgcagatgatgttcaaggaggccaagttcaagatgggctacgccgacgaggtgcacacccaggtgctggagctgccctacgtggaggaggagctgagcatggtgatcctgctgcccgacgacaacaccgacctggccgtggtggagaaggccctgacctacgagaagttcaaggcctggaccaacagcgagaagctgaccaagagcaaggtgcaggtgttcctgcccagactgaagctggaggagagctacgacctggagcccttcctgagaagactgggcatgatcgacgccttcgacgaggccaaggccgacttcagcggcatgagcaccgagaagaacgtgcccctgagcaaggtggcccacaagtgcttcgtggaggtgaacgaggagggcaccgaggccgccgccgccaccgccgtggtgagaaacagcagatgcagcagaatggagcccagattctgcgccgaccaccccttcctgttcttcatcagacaccacaagaccaactgcatcctgttctgcggcagattcagcagcccctag

SEQ ID NO: 98616 - DNA, 1131 bp, synthetic construct
  misc_feature 1..1131: note = Description of Artificial Sequence: Synthetic coding sequence
  source 1..1131: mol_type = other DNA
atggagaccctgagcaacgccagcggcaccttcgccatcagactgctgaagatcctgtgccaggacaaccccagccacaacgtgttctgcagccccgtgagcatcagcagcgccctggccatggtgctgctgggcgccaagggcaacaccgccacccagatggcccaggccctgagcctgaacaccgaggaggacatccacagagccttccagagcctgctgaccgaggtgaacaaggccggcacccagtacctgctgagaaccgccaacagactgttcggcgagaagacctgccagttcctgagcaccttcaaggagagctgcctgcagttctaccacgccgagctgaaggagctgagcttcatcagagccgccgaggagagcagaaagcacatcaacacctgggtgagcaagaagaccgagggcaagatcgaggagctgctgcccggcagcagcatcgacgccgagaccagactggtgctggtgaacgccatctacttcaagggcaagtggaacgagcccttcgacgagacctacaccagagagatgcccttcaagatcaaccaggaggagcagagacccgtgcagatgatgtaccaggaggccaccttcaagctggcccacgtgggcgaggtgagagcccagctgctggagctgccctacgccagaaaggagctgagcctgctggtgctgctgcccgacgacggcgtggagctgagcaccgtggagaagagcctgaccttcgagaagctgaccgcctggaccaagcccgactgcatgaagagcaccgaggtggaggtgctgctgcccaagttcaagctgcaggaggactacgacatggagagcgtgctgagacacctgggcatcgtggacgccttccagcagggcaaggccgacctgagcgccatgagcgccgagagagacctgtgcctgagcaagttcgtgcacaagagcttcgtggaggtgaacgaggagggcaccgaggccgccgccgccagcagctgcttcgtggtggccgagtgctgcatggagagcggccccagattctgcgccgaccaccccttcctgttcttcatcagacacaacagagccaacagcatcctgttctgcggcagattcagcagcccctag

SEQ ID NO: 98617 - DNA, 1104 bp, synthetic construct
  misc_feature 1..1104: note = Description of Artificial Sequence: Synthetic coding sequence
  source 1..1104: mol_type = other DNA
atgagcagccccccccccgccagaagcggcttctacagacaggaggtgaccaagaccgcctgggaggtgagagccgtgtacagagacctgcagcccgtgggcagcggcgcctacggcgccgtgtgcagcgccgtggacggcagaaccggcgccaaggtggccatcaagaagctgtacagacccttccagagcgagctgttcgccaagagagcctacagagagctgagactgctgaagcacatgagacacgagaacgtgatcggcctgctggacgtgttcacccccgacgagaccctggacgacttcaccgacttctacctggtgatgcccttcatgggcaccgacctgggcaagctgatgaagcacgagaagctgggcgaggacagaatccagttcctggtgtaccagatgctgaagggcctgagatacatccacgccgccggcatcatccacagagacctgaagcccggcaacctggccgtgaacgaggactgcgagctgaagatcctggacttcggcctggccagacaggccgacagcgagatgaccggctacgtggtgaccagatggtacagagcccccgaggtgatcctgaactggatgagatacacccagaccgtggacatctggagcgtgggctgcatcatggccgagatgatcaccggcaagaccctgttcaagggcagcgaccacctggaccagctgaaggagatcatgaaggtgaccggcaccccccccgccgagttcgtgcagagactgcagagcgacgaggccaagaactacatgaagggcctgcccgagctggagaagaaggacttcgccagcatcctgaccaacgccagccccctggccgtgaacctgctggagaagatgctggtgctggacgccgagcagagagtgaccgccggcgaggccctggcccacccctacttcgagagcctgcacgacaccgaggacgagccccaggtgcagaagtacgacgacagcttcgacgacgtggacagaaccctggacgagtggaagagagtgacctacaaggaggtgctgagcttcaagccccccagacagctgggcgccagagtgagcaaggagacccccctgtag

SEQ ID NO: 98618 - DNA, 1500 bp, synthetic construct
  misc_feature 1..1500: note = Description of Artificial Sequence: Synthetic coding sequence
  source 1..1500: mol_type = other DNA
atgaagcacagcctgaacgccctgctgatcttcctgatcatcaccagcgcctggggcggcagcaagggccccctggaccagctggagaagggcggcgagaccgcccagagcgccgacccccagtgggagcagctgaacaacaagaacctgagcatgcccctgctgcccgccgacttccacaaggagaacaccgtgaccaacgactggatccccgagggcgaggaggacgacgactacctggacctggagaagatcttcagcgaggacgacgactacatcgacatcgtggacagcctgagcgtgagccccaccgacagcgacgtgagcgccggcaacatcctgcagctgttccacggcaagagcagaatccagagactgaacatcctgaacgccaagttcgccttcaacctgtacagagtgctgaaggaccaggtgaacaccttcgacaacatcttcatcgcccccgtgggcatcagcaccgccatgggcatgatcagcctgggcctgaagggcgagacccacgagcaggtgcacagcatcctgcacttcaaggacttcgtgaacgccagcagcaagtacgagatcaccaccatccacaacctgttcagaaagctgacccacagactgttcagaagaaacttcggctacaccctgagaagcgtgaacgacctgtacatccagaagcagttccccatcctgctggacttcaagaccaaggtgagagagtactacttcgccgaggcccagatcgccgacttcagcgaccccgccttcatcagcaagaccaacaaccacatcatgaagctgaccaagggcctgatcaaggacgccctggagaacatcgaccccgccacccagatgatgatcctgaactgcatctacttcaagggcagctgggtgaacaagttccccgtggagatgacccacaaccacaacttcagactgaacgagagagaggtggtgaaggtgagcatgatgcagaccaagggcaacttcctggccgccaacgaccaggagctggactgcgacatcctgcagctggagtacgtgggcggcatcagcatgctgatcgtggtgccccacaagatgagcggcatgaagaccctggaggcccagctgacccccagagtggtggagagatggcagaagagcatgaccaacagaaccagagaggtgctgctgcccaagttcaagctggagaagaactacaacctggtggagagcctgaagctgatgggcatcagaatgctgttcgacaagaacggcaacatggccggcatcagcgaccagagaatcgccatcgacctgttcaagcaccagggcaccatcaccgtgaacgaggagggcacccaggccaccaccgtgaccaccgtgggcttcatgcccctgagcacccaggtgagattcaccgtggacagacccttcctgttcctgatctacgagcacagaaccagctgcctgctgttcatgggcagagtggccaaccccagcagaagctag

SEQ ID NO: 98619 - DNA, 1197 bp, synthetic construct
  misc_feature 1..1197: note = Description of Artificial Sequence: Synthetic coding sequence
  source 1..1197: mol_type = other DNA
atgaactggcacctgcccctgttcctgctggccagcgtgaccctgcccagcatctgcagccacttcaaccccctgagcctggaggagctgggcagcaacaccggcatccaggtgttcaaccagatcgtgaagagcagaccccacgacaacatcgtgatcagcccccacggcatcgccagcgtgctgggcatgctgcagctgggcgccgacggcagaaccaagaagcagctggccatggtgatgagatacggcgtgaacggcgtgggcaagatcctgaagaagatcaacaaggccatcgtgagcaagaagaacaaggacatcgtgaccgtggccaacgccgtgttcgtgaagaacgccagcgagatcgaggtgcccttcgtgaccagaaacaaggacgtgttccagtgcgaggtgagaaacgtgaacttcgaggaccccgccagcgcctgcgacagcatcaacgcctgggtgaagaacgagaccagagacatgatcgacaacctgctgagccccgacctgatcgacggcgtgctgaccagactggtgctggtgaacgccgtgtacttcaagggcctgtggaagagcagattccagcccgagaacaccaagaagagaaccttcgtggccgccgacggcaagagctaccaggtgcccatgctggcccagctgagcgtgttcagatgcggcagcaccagcgcccccaacgacctgtggtacaacttcatcgagctgccctaccacggcgagagcatcagcatgctgatcgccctgcccaccgagagcagcacccccctgagcgccatcatcccccacatcagcaccaagaccatcgacagctggatgagcatcatggtgcccaagagagtgcaggtgatcctgcccaagttcaccgccgtggcccagaccgacctgaaggagcccctgaaggtgctgggcatcaccgacatgttcgacagcagcaaggccaacttcgccaagatcaccaccggcagcgagaacctgcacgtgagccacatcctgcagaaggccaagatcgaggtgagcgaggacggcaccaaggccagcgccgccaccaccgccatcctgatcgccagaagcagccccccctggttcatcgtggacagacccttcctgttcttcatcagacacaaccccaccggcgccgtgctgttcatgggccagatcaacaagccctag

SEQ ID NO: 98620 - DNA, 1194 bp, synthetic construct
  misc_feature 1..1194: note = Description of Artificial Sequence: Synthetic coding sequence
  source 1..1194: mol_type = other DNA
atgaactggcacctgcccctgttcctgctggccagcgtgaccctgcccagcatctgcagccacttcaaccccctgagcctggaggagctgggcagcaacaccggcatccaggtgttcaaccagatcgtgaagagcagaccccacgacaacatcgtgatcagcccccacggcatcgccagcgtgctgggcatgctgcagctgggcgccgacggcagaaccaagaagcagctggccatggtgatgagatacggcgtgaacggcgtgggcaagatcctgaagaagatcaacaaggccatcgtgagcaagaagaacaaggacatcgtgaccgtggccaacgccgtgttcgtgaagaacgccagcgagatcgaggtgcccttcgtgaccagaaacaaggacgtgttccagtgcgaggtgagaaacgtgaacttcgaggaccccgccagcgcctgcgacagcatcaacgcctgggtgaagaacgagaccagagacatgatcgacaacctgctgagccccgacctgatcgacggcgtgctgaccagactggtgctggtgaacgccgtgtacttcaagggcctgtggaagagcagattccagcccgagaacaccaagaagagaaccttcgtggccgccgacggcaagagctaccaggtgcccatgctggcccagctgagcgtgttcagatgcggcagcaccagcgcccccaacgacctgtggtacaacttcatcgagctgccctaccacggcgagagcatcagcatgctgatcgccctgcccaccgagagcagcacccccctgagcgccatcatcccccacatcagcaccaagaccatcgacagctggatgagcatcatggtgcccaagagagtgcaggtgatcctgcccaagttcaccgccgtggcccagaccgacctgaaggagcccctgaaggtgctgggcatcaccgacatgttcgacagcagcaaggccaacttcgccaagatcaccagaagcgagaacctgcacgtgagccacatcctgcagaaggccaagatcgaggtgagcgaggacggcaccaaggccagcgccgccaccaccgccatcctgatcgccagaagcagccccccctggttcatcgtggacagacccttcctgttcttcatcagacacaaccccaccggcgccgtgctgttcatgggccagatcaacaagccctag

SEQ ID NO: 98621 - DNA, 1194 bp, synthetic construct; identical to SEQ ID NO: 98620
  misc_feature 1..1194: note = Description of Artificial Sequence: Synthetic coding sequence
  source 1..1194: mol_type = other DNA

SEQ ID NO: 98622 - DNA, 129 bp, synthetic construct
  misc_feature 1..129: note = Description of Artificial Sequence: Synthetic coding sequence
  source 1..129: mol_type = other DNA
atgaactggcacctgcccctgttcctgctggccagcgtgaccctgcccagcatctgcagccacttcaaccccctgagcctggaggagctgggcagcaacaccggcatccaggtgttcaaccagatctag

SEQ ID NO: 98623 - DNA, 831 bp, synthetic construct
  misc_feature 1..831: note = Description of Artificial Sequence: Synthetic coding sequence
  source 1..831: mol_type = other DNA
atgaactggcacctgcccctgttcctgctggccagcgtgaccctgcccagcatctgcagccacttcaaccccctgagcctggaggagctgggcagcaacaccggcatccaggtgttcaaccagatcgtgaagagcagaccccacgacaacatcgtgatcagcccccacggcatcgccagcgtgctgggcatgctgcagctgggcgccgacggcagaaccaagaagcagctggccatggtgatgagatacggcgtgaacggcgtgggcaagatcctgaagaagatcaacaaggccatcgtgagcaagaagaacaaggacatcgtgaccgtggccaacgccgtgttcgtgaagaacgccagcgagatcgaggtgcccttcgtgaccagaaacaaggacgtgttccagtgcgaggtgagaaacgtgaacttcgaggaccccgccagcgcctgcgacagcatcaacgcctgggtgaagaacgagaccagagacatgatcgacaacctgctgagccccgacctgatcgacggcgtgctgaccagactggtgctggtgaacgccgtgtacttcaagggcctgtggaagagcagattccagcccgagaacaccaagaagagaaccttcgtggccgccgacggcaagagctaccaggtgcccatgctggcccagctgagcgtgttcagatgcggcagcaccagcgcccccaacgacctgtggtacaacttcatcgagctgccctaccacggcgagagcatcagcatgctgatcgccctgcccaccgagagcagcacccccctgagcgccatcatcccccacatcagcaccaagacctag

SEQ ID NO: 98624 - DNA, 1230 bp, synthetic construct
  misc_feature 1..1230: note = Description of Artificial Sequence: Synthetic coding sequence
  source 1..1230: mol_type = other DNA
atgagcgactgcagaagcagcctggtggagggcaccatgaactggcacctgcccctgttcctgctggccagcgtgaccctgcccagcatctgcagccacttcaaccccctgagcctggaggagctgggcagcaacaccggcatccaggtgttcaaccagatcgtgaagagcagaccccacgacaacatcgtgatcagcccccacggcatcgccagcgtgctgggcatgctgcagctgggcgccgacggcagaaccaagaagcagctggccatggtgatgagatacggcgtgaacggcgtgggcaagatcctgaagaagatcaacaaggccatcgtgagcaagaagaacaaggacatcgtgaccgtggccaacgccgtgttcgtgaagaacgccagcgagatcgaggtgcccttcgtgaccagaaacaaggacgtgttccagtgcgaggtgagaaacgtgaacttcgaggaccccgccagcgcctgcgacagcatcaacgcctgggtgaagaacgagaccagagacatgatcgacaacctgctgagccccgacctgatcgacggcgtgctgaccagactggtgctggtgaacgccgtgtacttcaagggcctgtggaagagcagattccagcccgagaacaccaagaagagaaccttcgtggccgccgacggcaagagctaccaggtgcccatgctggcccagctgagcgtgttcagatgcggcagcaccagcgcccccaacgacctgtggtacaacttcatcgagctgccctaccacggcgagagcatcagcatgctgatcgccctgcccaccgagagcagcacccccctgagcgccatcatcccccacatcagcaccaagaccatcgacagctggatgagcatcatggtgcccaagagagtgcaggtgatcctgcccaagttcaccgccgtggcccagaccgacctgaaggagcccctgaaggtgctgggcatcaccgacatgttcgacagcagcaaggccaacttcgccaagatcaccagaagcgagaacctgcacgtgagccacatcctgcagaaggccaagatcgaggtgagcgaggacggcaccaaggccagcgccgccaccaccgccatcctgatcgccagaagcagccccccctggttcatcgtggacagacccttcctgttcttcatcagacacaaccccaccggcgccgtgctgttcatgggccagatcaacaagccctag

SEQ ID NO: 98625 - DNA, 264 bp, synthetic construct
  misc_feature 1..264: note = Description of Artificial Sequence: Synthetic coding sequence
  source 1..264: mol_type = other DNA
atgaactggcacctgcccctgttcctgctggccagcgtgaccctgcccagcatctgcagccacttcaaccccctgagcctggaggagctgggcagcaacaccggcatccaggtgttcaaccagatcgtgaagagcagaccccacgacaacatcgtgatcagcccccacggcatcgccagcgtgctgggcatgctgcagctgggcgccgacggcagaaccaagaagcagctggccatggtgatgagatacggcgtgaacggctag

SEQ ID NO: 98626 - DNA, 1257 bp, synthetic construct
  misc_feature 1..1257: note = Description of Artificial Sequence: Synthetic coding sequence
  source 1..1257: mol_type = other DNA
atgcaggccctggtgctgctgctgtgcatcggcgccctgctgggccacagcagctgccagaaccccgccagcccccccgaggagggcagccccgaccccgacagcaccggcgccctggtggaggaggaggaccccttcttcaaggtgcccgtgaacaagctggccgccgccgtgagcaacttcggctacgacctgtacagagtgagaagcagcaccagccccaccaccaacgtgctgctgagccccctgagcgtggccaccgccctgagcgccctgagcctgggcgccgagcagagaaccgagagcatcatccacagagccctgtactacgacctgatcagcagccccgacatccacggcacctacaaggagctgctggacaccgtgaccgccccccagaagaacctgaagagcgccagcagaatcgtgttcgagaagaagctgagaatcaagagcagcttcgtggcccccctggagaagagctacggcaccagacccagagtgctgaccggcaaccccagactggacctgcaggagatcaacaactgggtgcaggcccagatgaagggcaagctggccagaagcaccaaggagatccccgacgagatcagcatcctgctgctgggcgtggcccacttcaagggccagtgggtgaccaagttcgacagcagaaagaccagcctggaggacttctacctggacgaggagagaaccgtgagagtgcccatgatgagcgaccccaaggccgtgctgagatacggcctggacagcgacctgagctgcaagatcgcccagctgcccctgaccggcagcatgagcatcatcttcttcctgcccctgaaggtgacccagaacctgaccctgatcgaggagagcctgaccagcgagttcatccacgacatcgacagagagctgaagaccgtgcaggccgtgctgaccgtgcccaagctgaagctgagctacgagggcgaggtgaccaagagcctgcaggagatgaagctgcagagcctgttcgacagccccgacttcagcaagatcaccggcaagcccatcaagctgacccaggtggagcacagagccggcttcgagtggaacgaggacggcgccggcaccacccccagccccggcctgcagcccgcccacctgaccttccccctggactaccacctgaaccagcccttcatcttcgtgctgagagacaccgacaccggcgccctgctgttcatcggcaagatcctggaccccagaggcccctag

SEQ ID NO: 98627 - DNA, 1233 bp, synthetic construct
  misc_feature 1..1233: note = Description of Artificial Sequence: Synthetic coding sequence
  source 1..1233: mol_type = other DNA
atggccttcctgggcctgttcagcctgctggtgctgcagagcatggccaccggcgccaccttccccgaggaggccatcgccgacctgagcgtgaacatgtacaacagactgagagccaccggcgaggacgagaacatcctgttcagccccctgagcatcgccctggccatgggcatgatggagctgggcgcccagggcagcacccagaaggagatcagacacagcatgggctacgacagcctgaagaacggcgaggagttcagcttcctgaaggagttcagcaacatggtgaccgccaaggagagccagtacgtgatgaagatcgccaacagcctgttcgtgcagaacggcttccacgtgaacgaggagttcctgcagatgatgaagaagtacttcaacgccgccgtgaaccacgtggacttcagccagaacgtggccgtggccaactacatcaacaagtgggtggagaacaacaccaacaacctggtgaaggacctggtgagccccagagacttcgacgccgccacctacctggccctgatcaacgccgtgtacttcaagggcaactggaagagccagttcagacccgagaacaccagaaccttcagcttcaccaaggacgacgagagcgaggtgcagatccccatgatgtaccagcagggcgagttctactacggcgagttcagcgacggcagcaacgaggccggcggcatctaccaggtgctggagatcccctacgagggcgacgagatcagcatgatgctggtgctgagcagacaggaggtgcccctggccaccctggagcccctggtgaaggcccagctggtggaggagtgggccaacagcgtgaagaagcagaaggtggaggtgtacctgcccagattcaccgtggagcaggagatcgacctgaaggacgtgctgaaggccctgggcatcaccgagatcttcatcaaggacgccaacctgaccggcctgagcgacaacaaggagatcttcctgagcaaggccatccacaagagcttcctggaggtgaacgaggagggcagcgaggccgccgccgtgagcggcatgatcgccatcagcagaatggccgtgctgtacccccaggtgatcgtggaccaccccttcttcttcctgatcagaaacagaagaaccggcaccatcctgttcatgggcagagtgatgcaccccgagaccatgaacaccagcggccacgacttcgaggagctgtag

SEQ ID NO: 98628 - DNA, 1233 bp, synthetic construct; identical to SEQ ID NO: 98627
  misc_feature 1..1233: note = Description of Artificial Sequence: Synthetic coding sequence
  source 1..1233: mol_type = other DNA

SEQ ID NO: 98629 - DNA, 738 bp, synthetic construct
  misc_feature 1..738: note = Description of Artificial Sequence: Synthetic coding sequence
  source 1..738: mol_type = other DNA
atggccttcctgggcctgttcagcctgctggtgctgcagagcatggccaccggcgccaccttccccgaggaggccatcgccgacctgagcgtgaacatgtacaacagactgagagccaccggcgaggacgagaacatcctgttcagccccctgagcatcgccctggccatgggcatgatggagctgggcgcccagggcagcacccagaaggagatcagacacagcatgggctacgacagcctgaagaacggcgaggagttcagcttcctgaaggagttcagcaacatggtgaccgccaaggagagccagtacgtgatgaagatcgccaacagcctgttcgtgcagaacggcttccacgtgaacgaggagttcctgcagatgatgaagaagtacttcaacgccgccgtgaaccacgtggacttcagccagaacgtggccgtggccaactacatcaacaagtgggtggagaacaacaccaacaacctggtgaaggacctggtgagccccagagacttcgacgccgccacctacctggccctgatcaacgccgtgtacttcaagggcaactggaagagccagttcagacccgagaacaccagaaccttcagcttcaccaaggacgacgagagcgaggtgcagatccccatgatgtaccagcagggcgagttctactacggcgagttcagcgacggcagcaacgaggccggcggcatctaccaggtgctggagatcccctag

SEQ ID NO: 98630 - DNA, 483 bp, synthetic construct
  misc_feature 1..483: note = Description of Artificial Sequence: Synthetic coding sequence
  source 1..483: mol_type = other DNA
atggccttcctgggcctgttcagcctgctggtgctgcagagcatggccaccggcgccaccttccccgaggaggccatcgccgacctgagcgtgaacatgtacaacagactgagagccaccggcgaggacgagaacatcctgttcagccccctgagcatcgccctggccatgggcatgatggagctgggcgcccagggcagcacccagaaggagatcagacacagcatgggctacgacagcctgaagaacggcgaggagttcagcttcctgaaggagttcagcaacatggtgaccgccaaggagagccagtacgtgatgaagatcgccaacagcctgttcgtgcagaacggcttccacgtgaacgaggagttcctgcagatgatgaagaagtacttcaacgccgccgtgaaccacgtggacttcagccagaacgtggccgtggccaactacatcaacaagtgggtggagaacaacaccaactag

SEQ ID NO: 98631 - DNA, 591 bp, synthetic construct
  misc_feature 1..591: note = Description of Artificial Sequence: Synthetic coding sequence
  source 1..591: mol_type = other DNA
atggtgggcggcctgaagagaaagcacagcgacctggaggaggaggaggagagatgggagtggagccccgccggcctgcagagctaccagcaggccctgctgagaatcagcctggacaaggtgcagagaagcctgggccccagagcccccagcctgagaagacacgtgctgatccacaacaccctgcagcagctgcaggccgccctgagactggcccccgcccccgccctgccccccgagcccctgttcctgggcgaggaggacttcagcctgagcgccaccatcggcagcatcctgagagagctggacaccagcatggacggcaccgagcccccccagaaccccgtgacccccctgggcctgcagaacgaggtgcccccccagcccgaccccgtgttcctggaggccctgagcagcagatacctgggcgacagcggcctggacgacttcttcctggacatcgacaccagcgccgtggagaaggagcccgccagagccccccccgagcccccccacaacctgttctgcgcccccggcagctgggagtggaacgagctggaccacatcatggagatcatcctgggcagctag

SEQ ID NO: 98632 - DNA, 591 bp, synthetic construct; identical to SEQ ID NO: 98631
  misc_feature 1..591: note = Description of Artificial Sequence: Synthetic coding sequence
  source 1..591: mol_type = other DNA

SEQ ID NO: 98633 - DNA, 369 bp, synthetic construct
  misc_feature 1..369: note = Description of Artificial Sequence: Synthetic coding sequence
  source 1..369: mol_type = other DNA
atgaagctgctgaccggcctggtgttctgcagcctggtgctgggcgtgagcagcagaagcttcttcagcttcctgggcgaggccttcgacggcgccagagacatgtggagagcctacagcgacatgagagaggccaactacatcggcagcgacaagtacttccacgccagaggcaactacgacgccgccaagagaggccccggcggcgcctgggccgccgaggtgatcaccgacgccagagagaacatccagagattcttcggccacggcgccgaggacagcctggccgaccaggccgccaacgagtggggcagaagcggcaaggaccccaaccacttcagacccgccggcctgcccgagaagtactag

SEQ ID NO: 98634 - DNA, 369 bp, synthetic construct; identical to SEQ ID NO: 98633
  misc_feature 1..369: note = Description of Artificial Sequence: Synthetic coding sequence
  source 1..369: mol_type = other DNA

SEQ ID NO: 98635 - DNA, 369 bp, synthetic construct; identical to SEQ ID NO: 98633
  misc_feature 1..369: note = Description of Artificial Sequence: Synthetic coding sequence
  source 1..369: mol_type = other DNA

SEQ ID NO: 98636 - DNA, 369 bp, synthetic construct
  misc_feature 1..369: note = Description of Artificial Sequence: Synthetic coding sequence
  source 1..369: mol_type = other DNA
atgaagctgctgaccggcctggtgttctgcagcctggtgctgagcgtgagcagcagaagcttcttcagcttcctgggcgaggccttcgacggcgccagagacatgtggagagcctacagcgacatgagagaggccaactacatcggcagcgacaagtacttccacgccagaggcaactacgacgccgccaagagaggccccggcggcgcctgggccgccgaggtgatcagcaacgccagagagaacatccagagactgaccggcagaggcgccgaggacagcctggccgaccaggccgccaacaagtggggcagaagcggcagagaccccaaccacttcagacccgccggcctgcccgagaagtactag

SEQ ID NO: 98637 - DNA, 252 bp, synthetic construct
  misc_feature 1..252: note = Description of Artificial Sequence: Synthetic coding sequence
  source 1..252: mol_type = other DNA
atgaagctgctgaccggcctggtgttctgcagcctggtgctgagcgtgagcagcagaagcttcttcagcttcctgggcgaggccttcgacggcgccagagacatgtggagagcctacagcgacatgagagaggccaactacatcggcagcgacaagtacttccacgccagaggcaactacgacgccgccaagagaggccccggcggcgcctgggccgccgaggtgatcagcctgttcagcgccgagctgtag

SEQ ID NO: 98638 - DNA, 369 bp, synthetic construct; identical to SEQ ID NO: 98636
  misc_feature 1..369: note = Description of Artificial Sequence: Synthetic coding sequence
  source 1..369: mol_type = other DNA

SEQ ID NO: 98639 - DNA, 369 bp, synthetic construct; identical to SEQ ID NO: 98636
  misc_feature 1..369: note = Description of Artificial Sequence: Synthetic coding sequence
  source 1..369: mol_type = other DNA

SEQ ID NO: 98640 - DNA, 393 bp, synthetic construct
  misc_feature 1..393: note = Description of Artificial Sequence: Synthetic coding sequence
  source 1..393: mol_type = other DNA
atgagactgttcaccggcatcgtgttctgcagcctggtgatgggcgtgaccagcgagagctggagaagcttcttcaaggaggccctgcagggcgtgggcgacatgggcagagcctactgggacatcatgatcagcaaccaccagaacagcaacagatacctgtacgccagaggcaactacgacgccgcccagagaggccccggcggcgtgtgggccgccaagctgatcagcagaagcagagtgtacctgcagggcctgatcgactgctacctgttcggcaacagcagcaccgtgctggaggacagcaagagcaacgagaaggccgaggagtggggcagaagcggcaaggaccccgacagattcagacccgacggcctgcccaagaagtactag

SEQ ID NO: 98641 - DNA, 1278 bp, synthetic construct
  misc_feature 1..1278: note = Description of Artificial Sequence: Synthetic coding sequence
  source 1..1278: mol_type = other DNA
atgggcgaggacgccgcccaggccgagaagttccagcaccccggcagcgacatgagacaggagaagcccagcagccccagccccatgcccagcagcacccccagccccagcctgaacctgggcaacaccgaggaggccatcagagacaacagccaggtgaacgccgtgaccgtgctgaccctgctggacaagctggtgaacatgctggacgccgtgcaggagaaccagcacaagatggagcagagacagatcagcctggagggcagcgtgaagggcatccagaacgacctgaccaagctgagcaagtaccaggccagcaccagcaacaccgtgagcaagctgctggagaagagcagaaaggtgagcgcccacaccagagccgtgaaggagagaatggacagacagtgcgcccaggtgaagagactggagaacaaccacgcccagctgctgagaagaaaccacttcaaggtgctgatcttccaggaggagaacgagatccccgccagcgtgttcgtgaagcagcccgtgagcggcgccgtggagggcaaggaggagctgcccgacgagaacaagagcctggaggagaccctgcacaccgtggacctgagcagcgacgacgacctgccccacgacgaggaggccctggaggacagcgccgaggagaaggtggaggagagcagagccgagaagatcaagagaagcagcctgaagaaggtggacagcctgaagaaggccttcagcagacagaacatcgagaagaagatgaacaagctgggcaccaagatcgtgagcgtggagagaagagagaagatcaagaagagcctgaccagcaaccaccagaagatcagcagcggcaagagcagccccttcaaggtgagccccctgaccttcggcagaaagaaggtgagagagggcgagagccacgccgagaacgagaccaagagcgaggacctgcccagcagcgagcagatgcccaacgaccaggaggaggagagcttcgccgagggccacagcgaggccagcctggccagcgccctggtggagggcgagatcgccgaggaggccgccgagaaggccaccagcagaggcagcaacagcggcatggacagcaacatcgacctgaccatcgtggaggacgaggaggaggagagcgtggccctggagcaggcccagaaggtgagatacgagggcagctacgccctgaccagcgaggaggccgagagaagcgacggcgaccccgtgcagcccgccgtgctgcaggtgcaccagaccagctag

SEQ ID NO: 98642 - DNA, 1290 bp, synthetic construct
  misc_feature 1..1290: note = Description of Artificial Sequence: Synthetic coding sequence
  source 1..1290: mol_type = other DNA
atggcccagcccggcaccctgaacctgaacaacgaggtggtgaagatgagaaaggaggtgaagagaatcagagtgctggtgatcagaaagctggtgagaagcgtgggcagactgaagagcaagaagggcaccgaggacgccctgctgaagaaccagagaagagcccagagactgctggaggagatccacgccatgaaggagctgaagcccgacatcgtgaccaagagcgccctgggcgacgacatcaacttcgagaagatcttcaagaagcccgacagcaccgccaccgagagagccatcgccagactggccgtgcaccccctgctgaagaagaagatcgacgtgctgaaggccgccgtgcaggccttcaaggaggccagacagaacgtggccgaggtggagagcagcaagaacgccagcgaggacaaccacagcgagaacaccctgtacagcaacgacaacggcagcaacctgcagagagaggccaccgtgatcagcgagcagaaggtgaaggagaccaagatcctggccaagaagcccatccacaacagcaaggagaagatcgccaagatggagcacggccccaaggccgtgaccatcgccaacagccccagcaagcccagcgagaaggacagcgtggtgagcctggagagccagaagacccccgccgaccccaagctgaagaccctgagccagaccaagaagaacaagggcagcgacagcagcctgagcggcaacagcgacggcggcgaggagttctgcgaggaggagaaggagtacttcgacgacagcaccgaggagagattctacaagcagagcagcatgagcgaggacagcgacagcggcgacgacttcttcatcggcaaggtgagaagaaccagaaagaaggagagcagctgccacagcagcgtgaaggagcagaagcccctggagaaggtgttcctgaaggaggacaccggcgagacccacggcgacaccagaaacgacaagatcaagcccagcaccgagaccagaaagctggagagcgtgttcttccacagcctgagcggcagcaagagcagcagaagaaacttcaaggagcaggcccccaagaccagaagcctggacttcccccagaacgagccccagatcaagaaccagttcaacaagaagctgagcggcagactggagaacaccaagcagcagctgcagctgcccctgcaccccagctgggaggccagcagaagaagaaaggagcagcagagcaacatcgccgtgttccagggcaagaagatcaccttcgacgactag

SEQ ID NO: 98643 - DNA, 1296 bp, synthetic construct
  misc_feature 1..1296: note = Description of Artificial Sequence: Synthetic coding sequence
  source 1..1296: mol_type = other DNA
atgaccgtgaagaccgaggccgccaagggcaccctgacctacagcagaatgagaggcatggtggccatcctgatcgccttcatgaagcagagaagaatgggcctgaacgacttcatccagaagatcgccaacaacagctacgcctgcaagcaccccgaggtgcagagcatcctgaagatcagccagccccaggagcccgagctgatgaacgccaaccccagccccccccccagccccagccagcagatcaacctgggccccagcagcaacccccacgccaagcccagcgacttccacttcctgaaggtgatcggcaagggcagcttcggcaaggtgctgctggccagacacaaggccgaggaggtgttctacgccgtgaaggtgctgcagaagaaggccatcctgaagaagaaggaggagaagcacatcatgagcgagagaaacgtgctgctgaagaacgtgaagcaccccttcctggtgggcctgcacttcagcttccagaccgccgacaagctgtacttcgtgctggactacatcaacggcggcgagctgttctaccacctgcagagagagagatgcttcctggagcccagagccagattctacgccgccgagatcgccagcgccctgggctacctgcacagcctgaacatcgtgtacagagacctgaagcccgagaacatcctgctggacagccagggccacatcgtgctgaccgacttcggcctgtgcaaggagaacatcgagcacaacagcaccaccagcaccttctgcggcacccccgagtacctggcccccgaggtgctgcacaagcagccctacgacagaaccgtggactggtggtgcctgggcgccgtgctgtacgagatgctgtacggcctgccccccttctacagcagaaacaccgccgagatgtacgacaacatcctgaacaagcccctgcagctgaagcccaacatcaccaacagcgccagacacctgctggagggcctgctgcagaaggacagaaccaagagactgggcgccaaggacgacttcatggagatcaagagccacgtgttcttcagcctgatcaactgggacgacctgatcaacaagaagatcaccccccccttcaaccccaacgtgagcggccccaacgacctgagacacttcgaccccgagttcaccgaggagcccgtgcccaacagcatcggcaagagccccgacagcgtgctggtgaccgccagcgtgaaggaggccgccgaggccttcctgggcttcagctacgccccccccaccgacagcttcctgtag

SEQ ID NO: 98644 - DNA, 1266 bp, synthetic construct
  misc_feature 1..1266: note = Description of Artificial Sequence: Synthetic coding sequence
  source 1..1266: mol_type = other DNA
atgaagcccagcaagagattcttcatcagcccccccagcagcaccgccttcatgaagcagagaagaatgggcctgaacgacttcatccagaagatcgccaacaacagctacgcctgcaagcaccccgaggtgcagagcatcctgaagatcagccagccccaggagcccgagctgatgaacgccaaccccagccccccccccagccccagccagcagatcaacctgggccccagcagcaacccccacgccaagcccagcgacttccacttcctgaaggtgatcggcaagggcagcttcggcaaggtgctgctggccagacacaaggccgaggaggtgttctacgccgtgaaggtgctgcagaagaaggccatcctgaagaagaaggaggagaagcacatcatgagcgagagaaacgtgctgctgaagaacgtgaagcaccccttcctggtgggcctgcacttcagcttccagaccgccgacaagctgtacttcgtgctggactacatcaacggcggcgagctgttctaccacctgcagagagagagatgcttcctggagcccagagccagattctacgccgccgagatcgccagcgccctgggctacctgcacagcctgaacatcgtgtacagagacctgaagcccgagaacatcctgctggacagccagggccacatcgtgctgaccgacttcggcctgtgcaaggagaacatcgagcacaacagcaccaccagcaccttctgcggcacccccgagtacctggcccccgaggtgctgcacaagcagccctacgacagaaccgtggactggtggtgcctgggcgccgtgctgtacgagatgctgtacggcctgccccccttctacagcagaaacaccgccgagatgtacgacaacatcctgaacaagcccctgcagctgaagcccaacatcaccaacagcgccagacacctgctggagggcctgctgcagaaggacagaaccaagagactgggcgccaaggacgacttcatggagatcaagagccacgtgttcttcagcctgatcaactgggacgacctgatcaacaagaagatcaccccccccttcaaccccaacgtgagcggccccaacgacctgagacacttcgaccccgagttcaccgaggagcccgtgcccaacagcatcggcaagagccccgacagcgtgctggtgaccgccagcgtgaaggaggccgccgaggccttcctgggcttcagctacgccccccccaccgacagcttcctgtag

SEQ ID NO: 98645 - DNA, 1581 bp, synthetic construct
  misc_feature 1..1581: note = Description of Artificial Sequence: Synthetic coding sequence
  source 1..1581: mol_type = other DNA
atggtgaacaaggacatgaacggcttccccgtgaagaagtgcagcgccttccagttcttcaagaagagagtgagaagatggatcaagagccccatggtgagcgtggacaagcaccagagccccagcctgaagtacaccggcagcagcatggtgcacatcccccccggcgagcccgacttcgagagcagcctgtgccagacctgcctgggcgagcacgccttccagagaggcgtgctgccccaggagaacgagagctgcagctgggagacccagagcggctgcgaggtgagagagccctgcaaccacgccaacatcctgaccaagcccgaccccagaaccttctggaccaacgacgaccccgccttcatgaagcagagaagaatgggcctgaacgacttcatccagaagatcgccaacaacagctacgcctgcaagcaccccgaggtgcagagcatcctgaagatcagccagccccaggagcccgagctgatgaacgccaaccccagccccccccccagccccagccagcagatcaacctgggccccagcagcaacccccacgccaagcccagcgacttccacttcctgaaggtgatcggcaagggcagcttcggcaaggtgctgctggccagacacaaggccgaggaggtgttctacgccgtgaaggtgctgcagaagaaggccatcctgaagaagaaggaggagaagcacatcatgagcgagagaaacgtgctgctgaagaacgtgaagcaccccttcctggtgggcctgcacttcagcttccagaccgccgacaagctgtacttcgtgctggactacatcaacggcggcgagctgttctaccacctgcagagagagagatgcttcctggagcccagagccagattctacgccgccgagatcgccagcgccctgggctacctgcacagcctgaacatcgtgtacagagacctgaagcccgagaacatcctgctggacagccagggccacatcgtgctgaccgacttcggcctgtgcaaggagaacatcgagcacaacagcaccaccagcaccttctgcggcacccccgagtacctggcccccgaggtgctgcacaagcagccctacgacagaaccgtggactggtggtgcctgggcgccgtgctgtacgagatgctgtacggcctgccccccttctacagcagaaacaccgccgagatgtacgacaacatcctgaacaagcccctgcagctgaagcccaacatcaccaacagcgccagacacctgctggagggcctgctgcagaaggacagaaccaagagactgggcgccaaggacgacttcatggagatcaagagccacgtgttcttcagcctgatcaactgggacgacctgatcaacaagaagatcaccccccccttcaaccccaacgtgagcggccccaacgacctgagacacttcgaccccgagttcaccgaggagcccgtgcccaacagcatcggcaagagccccgacagcgtgctggtgaccgccagcgtgaaggaggccgccgaggccttcctgggcttcagctacgccccccccaccgacagcttcctgtag

SEQ ID NO: 98646 - DNA, 1338 bp, synthetic construct
  misc_feature 1..1338: note = Description of Artificial Sequence: Synthetic coding sequence
  source 1..1338: mol_type = other DNA
atgggcgagatgcagggcgccctggccagagccagactggagagcctgctgagacccagacacaagaagagagccgaggcccagaagagaagcgagagcttcctgctgagcggcctggccttcatgaagcagagaagaatgggcctgaacgacttcatccagaagatcgccaacaacagctacgcctgcaagcaccccgaggtgcagagcatcctgaagatcagccagccccaggagcccgagctgatgaacgccaaccccagccccccccccagccccagccagcagatcaacctgggccccagcagcaacccccacgccaagcccagcgacttccacttcctgaaggtgatcggcaagggcagcttcggcaaggtgctgctggccagacacaaggccgaggaggtgttctacgccgtgaaggtgctgcagaagaaggccatcctgaagaagaaggaggagaagcacatcatgagcgagagaaacgtgctgctgaagaacgtgaagcaccccttcctggtgggcctgcacttcagcttccagaccgccgacaagctgtacttcgtgctggactacatcaacggcggcgagctgttctaccacctgcagagagagagatgcttcctggagcccagagccagattctacgccgccgagatcgccagcgccctgggctacctgcacagcctgaacatcgtgtacagagacctgaagcccgagaacatcctgctggacagccagggccacatcgtgctgaccgacttcggcctgtgcaaggagaacatcgagcacaacagcaccaccagcaccttctgcggcacccccgagtacctggcccccgaggtgctgcacaagcagccctacgacagaaccgtggactggtggtgcctgggcgccgtgctgtacgagatgctgtacggcctgccccccttctacagcagaaacaccgccgagatgtacgacaacatcctgaacaagcccctgcagctgaagcccaacatcaccaacagcgccagacacctgctggagggcctgctgcagaaggacagaaccaagagactgggcgccaaggacgacttcatggagatcaagagccacgtgttcttcagcctgatcaactgggacgacctgatcaacaagaagatcaccccccccttcaaccccaacgtgagcggccccaacgacctgagacacttcgaccccgagttcaccgaggagcccgtgcccaacagcatcggcaagagccccgacagcgtgctggtgaccgccagcgtgaaggaggccgccgaggccttcctgggcttcagctacgccccccccaccgacagcttcctgtag

SEQ ID NO: 98647 - DNA, 435 bp, synthetic construct
  misc_feature 1..435: note = Description of Artificial Sequence: Synthetic coding sequence
  source 1..435: mol_type = other DNA
atggtgagcgtggacaagcaccagagccccagcctgaagtacaccggcagcagcatggtgcacatcccccccggcgagcccgacttcgagagcagcctgtgccagacctgcctgggcgagcacgccttccagagaggcgtgctgccccaggagaacgagagctgcagctgggagacccagagcggctgcgaggtgagagagccctgcaaccacgccaacatcctgaccaagcccgaccccagaaccttctggaccaacgacgaccccgccttcatgaagcagagaagaatgggcctgaacgacttcatccagaagatcgccaacaacagctacgcctgcaagcaccccgaggtgcagagcatcctgaagatcagccagccccaggagcccgagctgatgaacgccaaccccagccccccccccagccccagctag

SEQ ID NO: 98648 - DNA, 1380 bp, synthetic construct
  misc_feature 1..1380: note = Description of Artificial Sequence: Synthetic coding sequence
  source 1..1380: mol_type = other DNA
atgagcagccagagcagcagcctgagcgaggcctgcagcagagaggcctacagcagccacaactgggccctgccccccgccagcagaagcaacccccagcccgcctacccctgggccaccagaagaatgaaggaggaggccatcaagccccccctgaaggccttcatgaagcagagaagaatgggcctgaacgacttcatccagaagatcgccaacaacagctacgcctgcaagcaccccgaggtgcagagcatcctgaagatcagccagccccaggagcccgagctgatgaacgccaaccccagccccccccccagccccagccagcagatcaacctgggccccagcagcaacccccacgccaagcccagcgacttccacttcctgaaggtgatcggcaagggcagcttcggcaaggtgctgctggccagacacaaggccgaggaggtgttctacgccgtgaaggtgctgcagaagaaggccatcctgaagaagaaggaggagaagcacatcatgagcgagagaaacgtgctgctgaagaacgtgaagcaccccttcctggtgggcctgcacttcagcttccagaccgccgacaagctgtacttcgtgctggactacatcaacggcggcgagctgttctaccacctgcagagagagagatgcttcctggagcccagagccagattctacgccgccgagatcgccagcgccctgggctacctgcacagcctgaacatcgtgtacagagacctgaagcccgagaacatcctgctggacagccagggccacatcgtgctgaccgacttcggcctgtgcaaggagaacatcgagcacaacagcaccaccagcaccttctgcggcacccccgagtacctggcccccgaggtgctgcacaagcagccctacgacagaaccgtggactggtggtgcctgggcgccgtgctgtacgagatgctgtacggcctgccccccttctacagcagaaacaccgccgagatgtacgacaacatcctgaacaagcccctgcagctgaagcccaacatcaccaacagcgccagacacctgctggagggcctgctgcagaaggacagaaccaagagactgggcgccaaggacgacttcatggagatcaagagccacgtgttcttcagcctgatcaactgggacgacctgatcaacaagaagatcaccccccccttcaaccccaacgtgagcggccccaacgacctgagacacttcgaccccgagttcaccgaggagcccgtgcccaacagcatcggcaagagccccgacagcgtgctggtgaccgccagcgtgaaggaggccgccgaggccttcctgggcttcagctacgccccccccaccgacagcttcctgtag

SEQ ID NO: 98649 - DNA, 183 bp, synthetic construct
  misc_feature 1..183: note = Description of Artificial Sequence: Synthetic coding sequence
  source 1..183: mol_type = other DNA
atggtgaacaaggacatgaacggcttccccgtgaagaagtgcagcgccttccagttcttcaagaagagagtgagaagatggatcaagagccccatggtgagcgtggacaagcaccagagccccagcctgaagtacaccggcagcagcatggtgcacatcccccccggcgagcccgacttctag

SEQ ID NO: 98650 - DNA, 1284 bp, synthetic construct
  misc_feature 1..1284: note = Description of Artificial Sequence: Synthetic coding sequence
  source 1..1284: mol_type = other DNA
atgcagggcctgctgaccagcggcagaaagcccagcggcggcggcagatgcaccggcagaggcggctggagaggccagtggtgcctgaagccctggatgggcggcgccgacccccccacccccaccctgagctgcctgctgctgcccgtgccccccgagctgcccgaccactgctacagaatgaacagcagccccgccggcacccccagcccccagcccagcagagccaacggcaacatcaacctgggccccagcgccaaccccaacgcccagcccaccgacttcgacttcctgaaggtgatcggcaagggcaactacggcaaggtgctgctggccaagagaaagagcgacggcgccttctacgccgtgaaggtgctgcagaagaagagcatcctgaagaagaaggagcagagccacatcatggccgagagaagcgtgctgctgaagaacgtgagacaccccttcctggtgggcctgagatacagcttccagacccccgagaagctgtacttcgtgctggactacgtgaacggcggcgagctgttcttccacctgcagagagagagaagattcctggagcccagagccagattctacgccgccgaggtggccagcgccatcggctacctgcacagcctgaacatcatctacagagacctgaagcccgagaacatcctgctggactgccagggccacgtggtgctgaccgacttcggcctgtgcaaggagggcgtggagcccgaggacaccaccagcaccttctgcggcacccccgagtacctggcccccgaggtgctgagaaaggagccctacgacagagccgtggactggtggtgcctgggcgccgtgctgtacgagatgctgcacggcctgccccccttctacagccaggacgtgagccagatgtacgagaacatcctgcaccagcccctgcagatccccggcggcagaaccgtggccgcctgcgacctgctgcagagcctgctgcacaaggaccagagacagagactgggcagcaaggccgacttcctggagatcaagaaccacgtgttcttcagccccatcaactgggacgacctgtaccacaagagactgaccccccccttcaaccccaacgtgaccggccccgccgacctgaagcacttcgaccccgagttcacccaggaggccgtgagcaagagcatcggctgcacccccgacaccgtggccagcagcagcggcgccagcagcgccttcctgggcttcagctacgcccccgaggacgacgacatcctggactgctag

SEQ ID NO: 98651 - DNA, 1101 bp, synthetic construct
  misc_feature 1..1101: note = Description of Artificial Sequence: Synthetic coding sequence
  source 1..1101: mol_type = other DNA
atgaacagcagccccgccggcacccccagcccccagcccagcagagccaacggcaacatcaacctgggccccagcgccaaccccaacgcccagcccaccgacttcgacttcctgaaggtgatcggcaagggcaactacggcaaggtgctgctggccaagagaaagagcgacggcgccttctacgccgtgaaggtgctgcagaagaagagcatcctgaagaagaaggagagccacatcatggccgagagaagcgtgctgctgaagaacgtgagacaccccttcctggtgggcctgagatacagcttccagacccccgagaagctgtacttcgtgctggactacgtgaacggcggcgagctgttcttccacctgcagagagagagaagattcctggagcccagagccagattctacgccgccgaggtggccagcgccatcggctacctgcacagcctgaacatcatctacagagacctgaagcccgagaacatcctgctggactgccagggccacgtggtgctgaccgacttcggcctgtgcaaggagggcgtggagcccgaggacaccaccagcaccttctgcggcacccccgagtacctggcccccgaggtgctgagaaaggagccctacgacagagccgtggactggtggtgcctgggcgccgtgctgtacgagatgctgcacggcctgccccccttctacagccaggacgtgagccagatgtacgagaacatcctgcaccagcccctgcagatccccggcggcagaaccgtggccgcctgcgacctgctgcagagcctgctgcacaaggaccagagacagagactgggcagcaaggccgacttcctggagatcaagaaccacgtgttcttcagccccatcaactgggacgacctgtaccacaagagactgaccccccccttcaaccccaacgtgaccggccccgccgacctgaagcacttcgaccccgagttcacccaggaggccgtgagcaagagcatcggctgcacccccgacaccgtggccagcagcagcggcgccagcagcgccttcctgggcttcagctacgcccccgaggacgacgacatcctggactgctag

SEQ ID NO: 98652 - DNA, 1104 bp, synthetic construct
  misc_feature 1..1104: note = Description of Artificial Sequence: Synthetic coding sequence
  source 1..1104: mol_type = other DNA
atgaacagcagccccgccggcacccccagcccccagcccagcagagccaacggcaacatcaacctgggccccagcgccaaccccaacgcccagcccaccgacttcgacttcctgaaggtgatcggcaagggcaactacggcaaggtgctgctggccaagagaaagagcgacggcgccttctacgccgtgaaggtgctgcagaagaagagcatcctgaagaagaaggagcagagccacatcatggccgagagaagcgtgctgctgaagaacgtgagacaccccttcctggtgggcctgagatacagcttccagacccccgagaagctgtacttcgtgctggactacgtgaacggcggcgagctgttcttccacctgcagagagagagaagattcctggagcccagagccagattctacgccgccgaggtggccagcgccatcggctacctgcacagcctgaacatcatctacagagacctgaagcccgagaacatcctgctggactgccagggccacgtggtgctgaccgacttcggcctgtgcaaggagggcgtggagcccgaggacaccaccagcaccttctgcggcacccccgagtacctggcccccgaggtgctgagaaaggagccctacgacagagccgtggactggtggtgcctgggcgccgtgctgtacgagatgctgcacggcctgccccccttctacagccaggacgtgagccagatgtacgagaacatcctgcaccagcccctgcagatccccggcggcagaaccgtggccgcctgcgacctgctgcagagcctgctgcacaaggaccagagacagagactgggcagcaaggccgacttcctggagatcaagaaccacgtgttcttcagccccatcaactgggacgacctgtaccacaagagactgaccccccccttcaaccccaacgtgaccggccccgccgacctgaagcacttcgaccccgagttcacccaggaggccgtgagcaagagcatcggctgcacccccgacaccgtggccagcagcagcggcgccagcagcgccttcctgggcttcagctacgcccccgaggacgacgacatcctggactgctag

SEQ ID NO: 98653 - DNA, 1104 bp, synthetic construct; identical to SEQ ID NO: 98652
  misc_feature 1..1104: note = Description of Artificial Sequence: Synthetic coding sequence
  source 1..1104: mol_type = other DNA

SEQ ID NO: 98654 - DNA, 597 bp, synthetic construct
  misc_feature 1..597: note = Description of Artificial Sequence: Synthetic coding sequence
  source 1..597: mol_type = other DNA
atgaacagcagccccgccggcacccccagcccccagcccagcagagccaacggcaacatcaacctgggccccagcgccaaccccaacgcccagcccaccgacttcgacttcctgaaggtgatcggcaagggcaactacggcaaggtgctgctggccaagagaaagagcgacggcgccttctacgccgtgaaggtgctgcagaagaagagcatcctgaagaagaaggagagccacatcatggccgagagaagcgtgctgctgaagaacgtgagacaccccttcctggtgggcctgagatacagcttccagacccccgagaagctgtacttcgtgctggactacgtgaacggcggcgagctgttcttccacctgcagagagagagaagattcctggagcccagagccagattctacgccgccgaggtggccagcgccatcggctacctgcacagcctgaacatcatctacagagacctgaagcccgagaacatcctgctggactgccagggccacgtggtgctgaccgacttcggcctgtgcaaggagggcgtggagcccgaggacaccaccagcaccttctgcggcacccccgagtag

SEQ ID NO: 98655 - DNA, 1104 bp, synthetic construct; identical to SEQ ID NO: 98652
  misc_feature 1..1104: note = Description of Artificial Sequence: Synthetic coding sequence
  source 1..1104: mol_type = other DNA

SEQ ID NO: 98656 - DNA, 1182 bp, synthetic construct
  misc_feature 1..1182: note = Description of Artificial Sequence: Synthetic coding sequence
  source 1..1182: mol_type = other DNA
atgcagggcctgctgaccagcggcagaaagcccagcggcggcggcagatgcaccgagctgcccgaccactgctacagaatgaacagcagccccgccggcacccccagcccccagcccagcagagccaacggcaacatcaacctgggccccagcgccaaccccaacgcccagcccaccgacttcgacttcctgaaggtgatcggcaagggcaactacggcaaggtgctgctggccaagagaaagagcgacggcgccttctacgccgtgaaggtgctgcagaagaagagcatcctgaagaagaaggagcagagccacatcatggccgagagaagcgtgctgctgaagaacgtgagacaccccttcctggtgggcctgagatacagcttccagacccccgagaagctgtacttcgtgctggactacgtgaacggcggcgagctgttcttccacctgcagagagagagaagattcctggagcccagagccagattctacgccgccgaggtggccagcgccatcggctacctgcacagcctgaacatcatctacagagacctgaagcccgagaacatcctgctggactgccagggccacgtggtgctgaccgacttcggcctgtgcaaggagggcgtggagcccgaggacaccaccagcaccttctgcggcacccccgagtacctggcccccgaggtgctgagaaaggagccctacgacagagccgtggactggtggtgcctgggcgccgtgctgtacgagatgctgcacggcctgccccccttctacagccaggacgtgagccagatgtacgagaacatcctgcaccagcccctgcagatccccggcggcagaaccgtggccgcctgcgacctgctgcagagcctgctgcacaaggaccagagacagagactgggcagcaaggccgacttcctggagatcaagaaccacgtgttcttcagccccatcaactgggacgacctgtaccacaagagactgaccccccccttcaaccccaacgtgaccggccccgccgacctgaagcacttcgaccccgagttcacccaggaggccgtgagcaagagcatcggctgcacccccgacaccgtggccagcagcagcggcgccagcagcgccttcctgggcttcagctacgcccccgaggacgacgacatcctggactgctag

SEQ ID NO: 98657 - DNA, 1491 bp, synthetic construct
  misc_feature 1..1491: note = Description of Artificial Sequence: Synthetic coding sequence
  source 1..1491: mol_type = other DNA
atgcagagagaccacaccatggactacaaggagagctgccccagcgtgagcatccccagcagcgacgagcacagagagaagaagaagagattcaccgtgtacaaggtgctggtgagcgtgggcagaagcgagtggttcgtgttcagaagatacgccgagttcgacaagctgtacaacaccctgaagaagcagttccccgccatggccctgaagatccccgccaagagaatcttcggcgacaacttcgaccccgacttcatcaagcagagaagagccggcctgaacgagttcatccagaacctggtgagataccccgagctgtacaaccaccccgacgtgagagccttcctgcagatggacagccccaagcaccagagcgaccccagcgaggacgaggacgagagaagcagccagaagctgcacagcaccagccagaacatcaacctgggccccagcggcaacccccacgccaagcccaccgacttcgacttcctgaaggtgatcggcaagggcagcttcggcaaggtgctgctggccaagagaaagctggacggcaagttctacgccgtgaaggtgctgcagaagaagatcgtgctgaacagaaaggagcagaagcacatcatggccgagagaaacgtgctgctgaagaacgtgaagcaccccttcctggtgggcctgcactacagcttccagaccaccgagaagctgtacttcgtgctggacttcgtgaacggcggcgagctgttcttccacctgcagagagagagaagcttccccgagcacagagccagattctacgccgccgagatcgccagcgccctgggctacctgcacagcatcaagatcgtgtacagagacctgaagcccgagaacatcctgctggacagcgtgggccacgtggtgctgaccgacttcggcctgtgcaaggagggcatcgccatcagcgacaccaccaccaccttctgcggcacccccgagtacctggcccccgaggtgatcagaaagcagccctacgacaacaccgtggactggtggtgcctgggcgccgtgctgtacgagatgctgtacggcctgccccccttctactgcagagacgtggccgagatgtacgacaacatcctgcacaagcccctgagcctgagacccggcgtgagcctgaccgcctggagcatcctggaggagctgctggagaaggacagacagaacagactgggcgccaaggaggacttcctggagatccagaaccaccccttcttcgagagcctgagctgggccgacctggtgcagaagaagatccccccccccttcaaccccaacgtggccggccccgacgacatcagaaacttcgacaccgccttcaccgaggagaccgtgccctacagcgtgtgcgtgagcagcgactacagcatcgtgaacgccagcgtgctggaggccgacgacgccttcgtgggcttcagctacgccccccccagcgaggacctgttcctgtag

SEQ ID NO: 98658 - DNA, 1491 bp, synthetic construct; identical to SEQ ID NO: 98657
  misc_feature 1..1491: note = Description of Artificial Sequence: Synthetic coding sequence
  source 1..1491: mol_type = other DNA

SEQ ID NO: 98659 - DNA, 1491 bp, synthetic construct; identical to SEQ ID NO: 98657
  misc_feature 1..1491: note = Description of Artificial Sequence: Synthetic coding sequence
  source 1..1491: mol_type = other DNA

SEQ ID NO: 98660 - DNA, 1491 bp, synthetic construct; identical to SEQ ID NO: 98657
  misc_feature 1..1491: note = Description of Artificial Sequence: Synthetic coding sequence
  source 1..1491: mol_type = other DNA

SEQ ID NO: 98661 - DNA, 1395 bp, synthetic construct
  misc_feature 1..1395: note = Description of Artificial Sequence: Synthetic coding sequence
  source 1..1395: mol_type = other DNA
atgcagagagaccacaccatggactacaaggagagctgccccagcgtgagcatccccagcagcgacgagcacagagagaagaagaagagattcaccgtgtacaaggtgctggtgagcgtgggcagaagcgagtggttcgtgttcagaagatacgccgagttcgacaagctgtacaacaccctgaagaagcagttccccgccatggccctgaagatccccgccaagagaatcttcggcgacaacttcgaccccgacttcatcaagcagagaagagccggcctgaacgagttcatccagaacctggtgagataccccgagctgtacaaccaccccgacgtgagagccttcctgcagatggacagccccaagcaccagagcgaccccagcgaggacgaggacgagagaagcagccagaagctgcacagcaccagccagaacatcaacctgggccccagcggcaacccccacgccaagcccaccgacttcgacttcctgaaggtgatcggcaagggcagcttcggcaaggtgctgctggccaagagaaagctggacggcaagttctacgccgtgaaggtgctgcagaagaagatcgtgctgaacagaaaggagcagaagcacatcatggccgagagaaacgtgctgctgaagaacgtgaagcaccccttcctggtgggcctgcactacagcttccagaccaccgagaagctgtacttcgtgctggacttcgtgaacggcggcgagctgttcttccacctgcagagagagagaagcttccccgagcacagagccagattctacgccgccgagatcgccagcgccctgggctacctgcacagcatcaagatcgtgtacagagacctgaagcccgagaacatcctgctggacagcgtgggccacgtggtgctgaccgacttcggcctgtgcaaggagggcatcgccatcagcgacaccaccaccaccttctgcggcacccccgagccccccttctactgcagagacgtggccgagatgtacgacaacatcctgcacaagcccctgagcctgagacccggcgtgagcctgaccgcctggagcatcctggaggagctgctggagaaggacagacagaacagactgggcgccaaggaggacttcctggagatccagaaccaccccttcttcgagagcctgagctgggccgacctggtgcagaagaagatccccccccccttcaaccccaacgtggccggccccgacgacatcagaaacttcgacaccgccttcaccgaggagaccgtgccctacagcgtgtgcgtgagcagcgactacagcatcgtgaacgccagcgtgctggaggccgacgacgccttcgtgggcttcagctacgccccccccagcgaggacctgttcctgtag

SEQ ID NO: 98662 - DNA, 1491 bp, synthetic construct; identical to SEQ ID NO: 98657
  misc_feature 1..1491: note = Description of Artificial Sequence: Synthetic coding sequence
  source 1..1491: mol_type = other DNA

SEQ ID NO: 98663 - DNA, 1491 bp, synthetic construct; identical to SEQ ID NO: 98657
  misc_feature 1..1491: note = Description of Artificial Sequence: Synthetic coding sequence
  source 1..1491: mol_type = other DNA

SEQ ID NO: 98664 - DNA, 1725 bp, synthetic construct; identical to SEQ ID NO: 76188
  misc_feature 1..1725: note = Description of Artificial Sequence: Synthetic coding sequence
  source 1..1725: mol_type = other DNA

SEQ ID NO: 98665 - DNA, 1611 bp, synthetic construct
  misc_feature 1..1611: note = Description of Artificial Sequence: Synthetic coding sequence
  source 1..1611: mol_type = other DNA
atggtgctggacctggacctgttcagagtggacaagggcggcgaccccgccctgatcagagagacccaggagaagagattcaaggaccccggcctggtggaccagctggtgaaggccgacagcgagtggagaagatgcagattcagagccgacaacctgaacaagctgaagaacctgtgcagcaagaccatcggcgagaagatgaagaagaaggagcccgtgggcgacgacgagagcgtgcccgagaacgtgctgagcttcgacgacctgaccgccgacgccctggccaacctgaaggtgagccagatcaagaaggtgagactgctgatcgacgaggccatcctgaagtgcgacgccgagagaatcaagctggaggccgagagattcgagaacctgagagagatcggcaacctgctgcaccccagcgtgcccatcagcaacgacgaggacgtggacaacaaggtggagagaatctggggcgactgcaccgtgagaaagaagtacagccacgtggacctggtggtgatggtggacggcttcgagggcgagaagggcgccgtggtggccggcagcagaggctacttcctgaagggcgtgctggtgttcctggagcaggccctgatccagtacgccctgagaaccctgggcagcagaggctacatccccatctacacccccttcttcatgagaaaggaggtgatgcaggaggtggcccagctgagccagttcgacgaggagctgtacaaggtgatcggcaagggcagcgagaagagcgacgacaacagctacgacgagaagtacctgatcgccaccagcgagcagcccatcgccgccctgcacagagacgagtggctgagacccgaggacctgcccatcaagtacgccggcctgagcacctgcttcagacaggaggtgggcagccacggcagagacaccagaggcatcttcagagtgcaccagttcgagaagatcgagcagttcgtgtacagcagcccccacgacaacaagagctgggagatgttcgaggagatgatcaccaccgccgaggagttctaccagagcctgggcatcccctaccacatcgtgaacatcgtgagcggcagcctgaaccacgccgccagcaagaagctggacctggaggcctggttccccggcagcggcgccttcagagagctggtgagctgcagcaactgcaccgactaccaggccagaagactgagaatcagatacggccagaccaagaagatgatggacaagagaaagaacaacctgcacctgagcacccagaacaagctggaggccagcctgttcagccccaagaaggtggagttcgtgcacatgctgaacgccaccatgtgcgccaccaccagaaccatctgcgccatcctggagaactaccagaccgagaagggcatcaccgtgcccgagaagctgaaggagttcatgccccccggcctgcaggagctgatccccttcgtgaagcccgcccccatcgagcaggagcccagcaagaagcagaagaagcagcacgagggcagcaagaagaaggccgccgccagagacgtgaccctggagaacagactgcagaacatggaggtgaccgacgcctag

SEQ ID NO: 98666 - DNA, 1563 bp, synthetic construct
  misc_feature 1..1563: note = Description of Artificial Sequence: Synthetic coding sequence
  source 1..1563: mol_type = other DNA
atggccgccagcatggccagaagactgtggcccctgctgaccagaagaggcttcagacccagaggcggctgcatcagcaacgacagccccagaagaagcttcaccaccgagaagagaaacagaaacctgctgtacgagtacgccagagagggctacagcgccctgccccagctggacatcgagagattctgcgcctgccccgaggaggccgcccacgccctggagctgagaaagggcgagctgagaagcgccgacctgcccgccatcatcagcacctggcaggagctgagacagctgcaggagcagatcagaagcctggaggaggagaaggccgccgtgaccgaggccgtgagagccctgctggccaaccaggacagcggcgaggtgcagcaggtgagactggaccccggcgccggcagcatcttcggccccaccttcctgcccttccccggccagctgagcctgctggtggaggcccagctggaggagcagttctacctgcaggccctgaagctgcccaaccagacccaccccgacgtgcccgtgggcgacgagagccaggccagagtgctgcacatggtgggcgacaagcccgtgttcagcttccagcccagaggccacctggagatcggcgagaagctggacatcatcagacagaagagactgagccacgtgagcggccacagaagctactacctgagaggcgccggcgccctgctgcagcacggcctggtgaacttcaccttcaacaagctgctgagaagaggcttcacccccatgaccgtgcccgacctgctgagaggcgccgtgttcgagggctgcggcatgacccccaacgccaaccccagccagatctacaacatcgaccccgccagattcaaggacctgaacctggccggcaccgccgaggtgggcctggccggctacttcatggaccacaccgtggccttcagagacctgcccgtgagaatggtgtgcagcagcacctgctacagagccgagaccaacaccggccaggagcccagaggcctgtacagagtgcaccacttcaccaaggtggagatgttcggcgtgaccggccccggcctggagcagagcagccagctgctggaggagttcctgagcctgcagatggagatcctgaccgagctgggcctgcacttcagagtgctggacatgcccacccaggagctgggcctgcccgcctacagaaagttcgacatcgaggcctggatgcccggcagaggcagattcggcgaggtgaccagcgccagcaactgcaccgacttccagagcagaagactgcacatcatgttccagaccgaggccggcgagctgcagttcgcccacaccgtgaacgccaccgcctgcgccgtgcccagactgctgatcgccctgctggagagcaaccagcagaaggacggcagcgtgctggtgccccccgccctgcagagctacctgggcaccgacagaatcaccgcccccacccacgtgcccctgcagtacatcggccccaaccagcccagaaagcccggcctgcccggccagcccgccgtgagctag

SEQ ID NO: 98667 - DNA, 426 bp, synthetic construct
  misc_feature 1..426: note = Description of Artificial Sequence: Synthetic coding sequence
  source 1..426: mol_type = other DNA
atggagatgctgcagggcctgctgctgctgctgctgctgagcatgggcggcgcctgggccagcagagagcccctgagaccctggtgccaccccatcaacgccatcctggccgtggagaaggagggctgccccgtgtgcatcaccgtgaacaccaccatctgcgccggctactgccccaccatgatgagagtgctgcaggccgtgctgccccccctgccccaggtggtgtgcacctacagagacgtgagattcgagagcatcagactgcccggctgccccagaggcgtggaccccgtggtgagcttccccgtggccctgagctgcagatgcggcccctgcagaagaagcaccagcgactgcggcggccccaaggaccaccccctgacctgcgaccacccccagctgagcggcctgctgttcctgtag

SEQ ID NO: 98668 - DNA, 837 bp, synthetic construct
  misc_feature 1..837: note = Description of Artificial Sequence: Synthetic coding sequence
  source 1..837: mol_type = other DNA
atgggcgccagactgagcagaagaagactgcccgccgaccccagcctggccctggacgccctgccccccgagctgctggtgcaggtgctgagccacgtgccccccagaagcctggtgaccagatgcagacccgtgtgcagagcctggagagacatcgtggacggccccaccgtgtggctgctgcagctggccagagacagaagcgccgagggcagagccctgtacgccgtggcccagagatgcctgcccagcaacgaggacaaggaggagttccccctgtgcgccctggccagatactgcctgagagcccccttcggcagaaacctgatcttcaacagctgcggcgagcagggcttcagaggctgggaggtggagcacggcggcaacggctgggccatcgagaagaacctgacccccgtgcccggcgcccccagccagacctgcttcgtgaccagcttcgagtggtgcagcaagagacagctggtggacctggtgatggagggcgtgtggcaggagctgctggacagcgcccagatcgagatctgcgtggccgactggtggggcgccagagagaactgcggctgcgtgtaccagctgagagtgagactgctggacgtgtacgagaaggaggtggtgaagttcagcgccagccccgaccccgtgctgcagtggaccgagagaggctgcagacaggtgagccacgtgttcaccaacttcggcaagggcatcagatacgtgagcttcgagcagtacggcagagacgtgagcagctgggtgggccactacggcgccctggtgacccacagcagcgtgagagtgagaatcagactgagctag

SEQ ID NO: 98669 - DNA, 864 bp, synthetic construct
  misc_feature 1..864: note = Description of Artificial Sequence: Synthetic coding sequence
  source 1..864: mol_type = other DNA
ttcaagcagggcctgtggctgctggagatgggcgccagactgagcagaagaagactgcccgccgaccccagcctggccctggacgccctgccccccgagctgctggtgcaggtgctgagccacgtgccccccagaagcctggtgaccagatgcagacccgtgtgcagagcctggagagacatcgtggacggccccaccgtgtggctgctgcagctggccagagacagaagcgccgagggcagagccctgtacgccgtggcccagagatgcctgcccagcaacgaggacaaggaggagttccccctgtgcgccctggccagatactgcctgagagcccccttcggcagaaacctgatcttcaacagctgcggcgagcagggcttcagaggctgggaggtggagcacggcggcaacggctgggccatcgagaagaacctgacccccgtgcccggcgcccccagccagacctgcttcgtgaccagcttcgagtggtgcagcaagagacagctggtggacctggtgatggagggcgtgtggcaggagctgctggacagcgcccagatcgagatctgcgtggccgactggtggggcgccagagagaactgcggctgcgtgtaccagctgagagtgagactgctggacgtgtacgagaaggaggtggtgaagttcagcgccagccccgaccccgtgctgcagtggaccgagagaggctgcagacaggtgagccacgtgttcaccaacttcggcaagggcatcagatacgtgagcttcgagcagtacggcagagacgtgagcagctgggtgggccactacggcgccctggtgacccacagcagcgtgagagtgagaatcagactgagctag

SEQ ID NO: 98670 - DNA, 1563 bp, synthetic construct; identical to SEQ ID NO: 98666
  misc_feature 1..1563: note = Description of Artificial Sequence: Synthetic coding sequence
  source 1..1563: mol_type = other DNA

SEQ ID NO: 98671 - DNA, 1557 bp, synthetic construct
  misc_feature 1..1557: note = Description of Artificial Sequence: Synthetic coding sequence
  source 1..1557: mol_type = other DNA
atggagggcgtgtggcaggagctgctggacagcgcccagatcgagatctgcgtggccgactggtggggcgccagagagaactgcggctgcgtgtaccagctgagagtgagactgctggacgtgtacgagaaggaggtggtgaagttcagcgccagccccgaccccgtgctgcagtggaccgagagaggctgcagacaggtgagccacgtgttcaccaacttcggcaagggcatcagatacgtgagcttcgagcagtacggcagagacatcagcacctggcaggagctgagacagctgcaggagcagatcagaagcctggaggaggagaaggccgccgtgaccgaggccgtgagagccctgctggccaaccaggacagcggcgaggtgcagcaggaccccaagtaccagggcctgagagccagaggcagagagatcagaaaggagctggtgcacctgtaccccagagaggcccagctggaggagcagttctacctgcaggccctgaagctgcccaaccagacccaccccgacgtgcccgtgggcgacgagagccaggccagagtgctgcacatggtgggcgacaagcccgtgttcagcttccagcccagaggccacctggagatcggcgagaagctggacatcatcagacagaagagactgagccacgtgagcggccacagaagctactacctgagaggcgccggcgccctgctgcagcacggcctggtgaacttcaccttcaacaagctgctgagaagaggcttcacccccatgaccgtgcccgacctgctgagaggcgccgtgttcgagggctgcggcatgacccccaacgccaaccccagccagatctacaacatcgaccccgccagattcaaggacctgaacctggccggcaccgccgaggtgggcctggccggctacttcatggaccacaccgtggccttcagagacctgcccgtgagaatggtgtgcagcagcacctgctacagagccgagaccaacaccggccaggagcccagaggcctgtacagagtgcaccacttcaccaaggtggagatgttcggcgtgaccggccccggcctggagcagagcagccagctgctggaggagttcctgagcctgcagatggagatcctgaccgagctgggcctgcacttcagagtgctggacatgcccacccaggagctgggcctgcccgcctacagaaagttcgacatcgaggcctggatgcccggcagaggcagattcggcgaggtgaccagcgccagcaactgcaccgacttccagagcagaagactgcacatcatgttccagaccgaggccggcgagctgcagttcgcccacaccgtgaacgccaccgcctgcgccgtgcccagactgctgatcgccctgctggagagcaaccagcagaaggacggcagcgtgctggtgccccccgccctgcagagctacctgggcaccgacagaatcaccgcccccacccacgtgcccctgcagtacatcggccccaaccagcccagaaagcccggcctgcccggccagcccgccgtgagctag

SEQ ID NO: 98672 - DNA, 711 bp, synthetic construct
  misc_feature 1..711: note = Description of Artificial Sequence: Synthetic coding sequence
  source 1..711: mol_type = other DNA
atggccgccagcatggccagaagactgtggcccctgctgaccagaagaggcttcagacccagaggcggctgcatcagcaacgacagccccagaagaagcttcaccaccgagaagagaaacagaaacctgctgtacgagtacgccagagagggctacagcgccctgccccagctggacatcgagagattctgcgcctgccccgaggaggccgcccacgccctggagctgagaaagggcgagctgagaagcgccgacctgcccgccatcatcagcacctggcaggagctgagacagctgcaggagcagatcagaagcctggaggaggagaaggccgccgtgaccgaggccgtgagagccctgctggccaaccaggacagcggcgaggtgcagcaggaccccaagtaccagggcctgagagccagaggcagagagatcagaaaggagctggtgcacctgtaccccagagaggcccagctggaggagcagttctacctgcaggccctgaagctgcccaaccagacccaccccgacgtgcccgtgggcgacgagagccaggccagagtgctgcacatggtgggcgacaagcccggcgcctgccccacctgcctggccaccggccccatcacctgcgccggcctggagcccagctgcagcaccgcctggagcaccagccacagcaccagcttcagcgccggcgccagccccccctag

SEQ ID NO: 98673 - DNA, 1281 bp, synthetic construct
  misc_feature 1..1281: note = Description of Artificial Sequence: Synthetic coding sequence
  source 1..1281: mol_type = other DNA
atgcacgccctgttcgccgacagcttcgccgccctgggcagactggacaacatcaccctggtgatggtgttccacccccagtacctggagagcttcctgaagacccagcactacctgctgcagatggacggccccctgcccctgcactacagacactacatcggcatcatggccgccgccagacaccagtgcagctacctggtgaacctgcacgtgaacgacttcctgcacgtgggcggcgaccccaagtggctgaacggcctggagaacgccccccagaagctgcagaacctgggcgagctgaacaaggtgctggcccacagaccctggctgatcaccaaggagcacatcgagggcctgctgaaggccgaggagcacagctggagcctggccgagctggtgcacgccgtggtgctgctgacccactaccacagcctggccagcttcaccttcggctgcggcatcagccccgagatccactgcgacggcggccacaccttcagaccccccagcgtgagcaactactgcatctgcgacatcaccaacggcaaccacagcgtggacgagatgcccgtgaacagcgccgagaacgtgagcgtgagcgacagcttcttcgaggtggaggccctgatggagaagatgagacagctgcaggagtgcagagacgaggaggaggccagccaggaggagatggccagcagattcgagatcgagaagagagagagcatgttcgtgttcagcagcgacgacgaggaggtgacccccgccagagccgtgagcagacacttcgaggacaccagctacggctacaaggacttcagcagacacggcatgcacgtgcccaccttcagagtgcaggactactgctgggaggaccacggctacagcctggtgaacagactgtaccccgacgtgggccagctgatcgacgagaagttccacatcgcctacaacctgacctacaacaccatggccatgcacaaggacgtggacaccagcatgctgagaagagccatctggaactacatccactgcatgttcggcatcagatacgacgactacgactacggcgagatcaaccagctgctggacagaagcttcaaggtgtacatcaagaccgtggtgtgcacccccgagaaggtgaccaagagaatgtacgacagcttctggagacagttcaagcacagcgagaaggtgcacgtgaacctgctgctgatcgaggccagaatgcaggccgagctgctgtacgccctgagagccatcaccagatacatgacctag

SEQ ID NO: 98674 - DNA, 1479 bp, synthetic construct
  misc_feature 1..1479: note = Description of Artificial Sequence: Synthetic coding sequence
  source 1..1479: mol_type = other DNA
atgagactggccgccgccgccaacgaggcctacaccgcccccctggccgtgagcggcctgctgggctgcaagcagtgcggcggcggcagagaccaggacgaggagctgggcatcagaatccccagacccctgggccagggccccagcagattcatccccgagaaggagatcctgcaggtgggcagcgaggacgcccagatgcacgccctgttcgccgacagcttcgccgccctgggcagactggacaacatcaccctggtgatggtgttccacccccagtacctggagagcttcctgaagacccagcactacctgctgcagatggacggccccctgcccctgcactacagacactacatcggcatcatggccgccgccagacaccagtgcagctacctggtgaacctgcacgtgaacgacttcctgcacgtgggcggcgaccccaagtggctgaacggcctggagaacgccccccagaagctgcagaacctgggcgagctgaacaaggtgctggcccacagaccctggctgatcaccaaggagcacatcgagggcctgctgaaggccgaggagcacagctggagcctggccgagctggtgcacgccgtggtgctgctgacccactaccacagcctggccagcttcaccttcggctgcggcatcagccccgagatccactgcgacggcggccacaccttcagaccccccagcgtgagcaactactgcatctgcgacatcaccaacggcaaccacagcgtggacgagatgcccgtgaacagcgccgagaacgtgagcgtgagcgacagcttcttcgaggtggaggccctgatggagaagatgagacagctgcaggagtgcagagacgaggaggaggccagccaggaggagatggccagcagattcgagatcgagaagagagagagcatgttcgtgttcagcagcgacgacgaggaggtgacccccgccagagccgtgagcagacacttcgaggacaccagctacggctacaaggacttcagcagacacggcatgcacgtgcccaccttcagagtgcaggactactgctgggaggaccacggctacagcctggtgaacagactgtaccccgacgtgggccagctgatcgacgagaagttccacatcgcctacaacctgacctacaacaccatggccatgcacaaggacgtggacaccagcatgctgagaagagccatctggaactacatccactgcatgttcggcatcagatacgacgactacgactacggcgagatcaaccagctgctggacagaagcttcaaggtgtacatcaagaccgtggtgtgcacccccgagaaggtgaccaagagaatgtacgacagcttctggagacagttcaagcacagcgagaaggtgcacgtgaacctgctgctgatcgaggccagaatgcaggccgagctgctgtacgccctgagagccatcaccagatacatgacctag

SEQ ID NO: 98675 - DNA, 1656 bp, synthetic construct
  misc_feature 1..1656: note = Description of Artificial Sequence: Synthetic coding sequence
  source 1..1656: mol_type = other DNA
atggccgagggcgagaacgaggtgagatgggacggcctgtgcagcagagacagcaccaccagagagaccgccctggagaacatcagacagaccatcctgagaaagaccgagtacctgagaagcgtgaaggagaccccccacagacccagcgacggcctgagcaacaccgagagcagcgacggcctgaacaagctgctggcccacctgctgatgctgagcaagagatgccccttcaaggacgtgagagagaagagcgagttcatcctgaagagcatccaggagctgggcatcagaatccccagacccctgggccagggccccagcagattcatccccgagaaggagatcctgcaggtgggcagcgaggacgcccagatgcacgccctgttcgccgacagcttcgccgccctgggcagactggacaacatcaccctggtgatggtgttccacccccagtacctggagagcttcctgaagacccagcactacctgctgcagatggacggccccctgcccctgcactacagacactacatcggcatcatggccgccgccagacaccagtgcagctacctggtgaacctgcacgtgaacgacttcctgcacgtgggcggcgaccccaagtggctgaacggcctggagaacgccccccagaagctgcagaacctgggcgagctgaacaaggtgctggcccacagaccctggctgatcaccaaggagcacatcgagggcctgctgaaggccgaggagcacagctggagcctggccgagctggtgcacgccgtggtgctgctgacccactaccacagcctggccagcttcaccttcggctgcggcatcagccccgagatccactgcgacggcggccacaccttcagaccccccagcgtgagcaactactgcatctgcgacatcaccaacggcaaccacagcgtggacgagatgcccgtgaacagcgccgagaacgtgagcgtgagcgacagcttcttcgaggtggaggccctgatggagaagatgagacagctgcaggagtgcagagacgaggaggaggccagccaggaggagatggccagcagattcgagatcgagaagagagagagcatgttcgtgttcagcagcgacgacgaggaggtgacccccgccagagccgtgagcagacacttcgaggacaccagctacggctacaaggacttcagcagacacggcatgcacgtgcccaccttcagagtgcaggactactgctgggaggaccacggctacagcctggtgaacagactgtaccccgacgtgggccagctgatcgacgagaagttccacatcgcctacaacctgacctacaacaccatggccatgcacaaggacgtggacaccagcatgctgagaagagccatctggaactacatccactgcatgttcggcatcagatacgacgactacgactacggcgagatcaaccagctgctggacagaagcttcaaggtgtacatcaagaccgtggtgtgcacccccgagaaggtgaccaagagaatgtacgacagcttctggagacagttcaagcacagcgagaaggtgcacgtgaacctgctgctgatcgaggccagaatgcaggccgagctgctgtacgccctgagagccatcaccagatacatgacctag

SEQ ID NO: 98676 - DNA, 1302 bp, synthetic construct
  misc_feature 1..1302: note = Description of Artificial Sequence: Synthetic coding sequence
  source 1..1302: mol_type = other DNA
atgagagccgagggcctgggcggcctggagagattctgcagccccggcaagggcagaggcctgagagccctgcagcccttccaggtgggcgacctgctgttcagctgccccgcctacgcctacgtgctgaccgtgaacgagagaggcaaccactgcgagtactgcttcaccagaaaggagggcctgagcaagtgcggcagatgcaagcaggccttctactgcaacgtggagtgccagaaggaggactggcccatgcacaagctggagtgcagccccatggtggtgttcggcgagaactggaaccccagcgagaccgtgagactgaccgccagaatcctggccaagcagaagatccaccccgagagaacccccagcgagaagctgctggccgtgaaggagttcgagagccacctggacaagctggacaacgagaagaaggacctgatccagagcgacatcgccgccctgcaccacttctacagcaagcacctgggcttccccgacaacgacagcctggtggtgctgttcgcccaggtgaactgcaacggcttcaccatcgaggacgaggagctgagccacctgggcagcgccatcttccccgacgtggccctgatgaaccacagctgctgccccaacgtgatcgtgacctacaagggcaccctggccgaggtgagagccgtgcaggagatcaagcccggcgaggaggtgttcaccagctacatcgacctgctgtaccccaccgaggacagaaacgacagactgagagacagctacttcttcacctgcgagtgccaggagtgcaccaccaaggacaaggacaaggccaaggtggagatcagaaagctgagcgacccccccaaggccgaggccatcagagacatggtgagatacgccagaaacgtgatcgaggagttcagaagagccaagcactacaagagccccagcgagctgctggagatctgcgagctgagccaggagaagatgagcagcgtgttcgaggacagcaacgtgtacatgctgcacatgatgtaccaggccatgggcgtgtgcctgtacatgcaggactgggagggcgccctgcagtacggccagaagatcatcaagccctacagcaagcactaccccctgtacagcctgaacgtggccagcatgtggctgaagctgggcagactgtacatgggcctggagcacaaggccgccggcgagaaggccctgaagaaggccatcgccatcatggaggtggcccacggcaaggaccacccctacatcagcgagatcaagcaggagatcgagagccactag

SEQ ID NO: 98677 - DNA, 819 bp, synthetic construct
  misc_feature 1..819: note = Description of Artificial Sequence: Synthetic coding sequence
  source 1..819: mol_type = other DNA
atgagagccgagggcctgggcggcctggagagattctgcagccccggcaagggcagaggcctgagagccctgcagcccttccaggtgggcgacctgctgttcagctgccccgcctacgcctacgtgctgaccgtgaacgagagaggcaaccactgcgagtactgcttcaccagaaaggagggcctgagcaagtgcggcagatgcaagcaggccttctactgcaacgtggagtgccagaaggaggactggcccatgcacaagctggagtgcagccccatggtggtgttcggcgagaactggaaccccagcgagaccgtgagactgaccgccagaatcctggccaagcagaagatccaccccgagagaacccccagcgagaagctgctggccgtgaaggagttcgagagccacctggacaagctggacaacgagaagaaggacctgatccagagcgacatcgccgccctgcaccacttctacagcaagcacctgggcttccccgacaacgacagcctggtggtgctgttcgcccaggtgaactgcaacggcttcaccatcgaggacgaggagctgagccacctgggcagcgccatcttccccgacgtggccctgatgaaccacagctgctgccccaacgtgatcgtgacctacaagggcaccctggccgaggtgagagccgtgcaggagatcaagcccggcgaggaggtgttcaccagctacatcgacctgctgtaccccaccgaggacagaaacgacagactgagagacagctacttcttcacctgcgagtgccaggagtgcaccaccaaggacaagtag

SEQ ID NO: 98678 - DNA, 5712 bp, synthetic construct
  misc_feature 1..5712: note = Description of Artificial Sequence: Synthetic coding sequence
  source 1..5712: mol_type = other DNA
atggccgccggcacctgggccgccgccgccgccgccgccgccgccgactacttcgtgctggtggccttcggcccccaccccagaggcagcggcgagggccagggccagatcctgcagagattccccgagaaggactgggaggacaaccccttcccccagggcatcgagctgttctgccagcccagcggctggcagctgtgccccgagagaaacccccccaccttcttcgtggccgtgctgaccgacatcaacagcgagagacactactgcgcctgcctgaccttctgggagcccgccgagcccagccaggagaccaccagagtggaggacgccaccgagagagaggaggagggcgacgagggcggccagacccacctgagccccaccgcccccgcccccagcgcccagctgttcgcccccaagaccctggtgctggtgagcagactggaccacaccgaggtgttcagaaacagcctgggcctgatctacgccatccacgtggagggcctgaacgtgtgcctggagaacgtgatcggcaacctgctgacctgcaccgtgcccctggccggcggcagccagagaaccatcagcctgggcgccggcgacagacaggtgatccagacccccctggccgacagcctgcccgtgagcagatgcagcgtggccctgctgttcagacagctgggcatcaccaacgtgctgagcctgttctgcgccgccctgaccgagcacaaggtgctgttcctgagcagaagctaccagagactggccgacgcctgcagaggcctgctggccctgctgttccccctgagatacagcttcacctacgtgcccatcctgcccgcccagctgctggaggtgctgagcacccccacccccttcatcatcggcgtgaacgccgccttccaggccgagacccaggagctgctggacgtgatcgtggccgacctggacggcggcaccgtgaccatccccgagtgcgtgcacatcccccccctgcccgagcccctgcagagccagacccacagcgtgctgagcatggtgctggaccccgagctggagctggccgacctggccttccccccccccaccaccagcaccagcagcctgaagatgcaggacaaggagctgagagccgtgttcctgagactgttcgcccagctgctgcagggctacagatggtgcctgcacgtggtgagaatccaccccgagcccgtgatcagattccacaaggccgccttcctgggccagagaggcctggtggaggacgacttcctgatgaaggtgctggagggcatggccttcgccggcttcgtgagcgagagaggcgtgccctacagacccaccgacctgttcgacgagctggtggcccacgaggtggccagaatgagagccgacgagaaccacccccagagagtgctgagacacgtgcaggagctggccgagcagctgtacaagaacgagaacccctaccccgccgtggccatgcacaaggtgcagagacccggcgagagcagccacctgagaagagtgcccagacccttccccagactggacgagggcaccgtgcagtggatcgtggaccaggccgccgccaagatgcagggcgccccccccgccgtgaaggccgagagaagaaccaccgtgcccagcggcccccccatgaccgccatcctggagagatgcagcggcctgcacgtgaacagcgccagaagactggaggtggtgagaaactgcatcagctacgtgttcgagggcaagatgctggaggccaagaagctgctgcccgccgtgctgagagccctgaagggcagagccgccagaagatgcctggcccaggagctgcacctgcacgtgcagcagaacagagccgtgctggaccaccagcagttcgacttcgtggtgagaatgatgaactgctgcctgcaggactgcaccagcctggacgagcacggcatcgccgccgccctgctgcccctggtgaccgccttctgcagaaagctgagccccggcgtgacccagttcgcctacagctgcgtgcaggagcacgtggtgtggagcaccccccagttctgggaggccatgttctacggcgacgtgcagacccacatcagagccctgtacctggagcccaccgaggacctggcccccgcccaggaggtgggcgaggcccccagccaggaggacgagagaagcgccctggacgtggccagcgagcagagaagactgtggcccaccctgagcagagagaagcagcaggagctggtgcagaaggaggagagcaccgtgttcagccaggccatccactacgccaacagaatgagctacctgctgctgcccctggacagcagcaagagcagactgctgagagagagagccggcctgggcgacctggagagcgccagcaacagcctggtgaccaacagcatggccggcagcgtggccgagagctacgacaccgagagcggcttcgaggacgccgagacctgcgacgtggccggcgccgtggtgagattcatcaacagattcgtggacaaggtgtgcaccgagagcggcgtgaccagcgaccacctgaagggcctgcacgtgatggtgcccgacatcgtgcagatgcacatcgagaccctggaggccgtgcagagagagagcagaagactgccccccatccagaagcccaagctgctgagacccagactgctgcccggcgaggagtgcgtgctggacggcctgagagtgtacctgctgcccgacggcagagaggagggcgccggcggcagcgccggcggccccgccctgctgcccgccgagggcgccgtgttcctgaccacctacagagtgatcttcaccggcatgcccaccgaccccctggtgggcgagcaggtggtggtgagaagcttccccgtggccgccctgaccaaggagaagagaatcagcgtgcagacccccgtggaccagctgctgcaggacggcctgcagctgagaagctgcaccttccagctgctgaagatggccttcgacgaggaggtgggcagcgacagcgccgagctgttcagaaagcagctgcacaagctgagatacccccccgacatcagagccaccttcgccttcaccctgggcagcgcccacacccccggcagaccccccagagtgaccaaggacaagggccccagcctgagaaccctgagcagaaacctggtgaagaacgccaagaagaccatcggcagacagcacgtgaccagaaagaagtacaacccccccagctgggagcacagaggccagcccccccccgaggaccaggaggacgagatcagcgtgagcgaggagctggagcccagcaccctgacccccagcagcgccctgaagcccagcgacagaatgaccatgagcagcctggtggagagagcctgctgcagagactaccagagactgggcctgggcaccctgagcagcagcctgagcagagccaagagcgagcccttcagaatcagccccgtgaacagaatgtacgccatctgcagaagctaccccggcctgctgatcgtgccccagagcgtgcaggacaacgccctgcagagagtgagcagatgctacagacagaacagattccccgtggtgtgctggagaagcggcagaagcaaggccgtgctgctgagaagcggcggcctgcacggcaagggcgtggtgggcctgttcaaggcccagaacgcccccagccccggccagagccaggccgacagcagcagcctggagcaggagaagtacctgcaggccgtggtgagcagcatgcccagatacgccgacgccagcggcagaaacaccctgagcggcttcagcagcgcccacatgggcagccacgtgcccagccccagagccagagtgaccaccctgagcaaccccatggccgccagcgccagcagaagaaccgcccccagaggcaagtggggcagcgtgagaaccagcggcagaagcagcggcctgggcaccgacgtgggcagcagactggccggcagagacgccctggcccccccccaggccaacggcggcccccccgaccccggcttcctgagaccccagagagccgccctgtacatcctgggcgacaaggcccagctgaagggcgtgagaagcgaccccctgcagcagtgggagctggtgcccatcgaggtgttcgaggccagacaggtgaaggccagcttcaagaagctgctgaaggcctgcgtgcccggctgccccgccgccgagcccagccccgccagcttcctgagaagcctggaggacagcgagtggctgatccagatccacaagctgctgcaggtgagcgtgctggtggtggagctgctggacagcggcagcagcgtgctggtgggcctggaggacggctgggacatcaccacccaggtggtgagcctggtgcagctgctgagcgaccccttctacagaaccctggagggcttcagactgctggtggagaaggagtggctgagcttcggccacagattcagccacagaggcgcccacaccctggccggccagagcagcggcttcacccccgtgttcctgcagttcctggactgcgtgcaccaggtgcacctgcagttccccatggagttcgagttcagccagttctacctgaagttcctgggctaccaccacgtgagcagaagattcagaaccttcctgctggacagcgactacgagagaatcgagctgggcctgctgtacgaggagaagggcgagagaagaggccaggtgccctgcagaagcgtgtgggagtacgtggacagactgagcaagagaacccccgtgttccacaactacatgtacgcccccgaggacgccgaggtgctgagaccctacagcaacgtgagcaacctgaaggtgtgggacttctacaccgaggagaccctggccgagggccccccctacgactgggagctggcccagggcccccccgagccccccgaggaggagagaagcgacggcggcgccccccagagcagaagaagagtggtgtggccctgctacgacagctgccccagagcccagcccgacgccatcagcagactgctggaggagctgcagagactggagaccgagctgggccagcccgccgagagatggaaggacacctgggacagagtgaaggccgcccagagactggagggcagacccgacggcagaggcacccccagcagcctgctggtgagcaccgccccccaccacagaagaagcctgggcgtgtacctgcaggagggccccgtgggcagcaccctgagcctgagcctggacagcgaccagagcagcggcagcaccaccagcggcagcagacaggccgccagaagaagcaccagcaccctgtacagccagttccagaccgccgagagcgagaacagaagctacgagggcaccctgtacaagaagggcgccttcatgaagccctggaaggccagatggttcgtgctggacaagaccaagcaccagctgagatactacgaccacagagtggacaccgagtgcaagggcgtgatcgacctggccgaggtggaggccgtggcccccggcacccccaccatgggcgcccccaagaccgtggacgagaaggccttcttcgacgtgaagaccaccagaagagtgtacaacttctgcgcccaggacgtgcccagcgcccagcagtgggtggacagaatccagagctgcctgagcgacgcctag

SEQ ID NO: 98679 - DNA, 2697 bp, synthetic construct
  misc_feature 1..2697: note = Description of Artificial Sequence: Synthetic coding sequence
  source 1..2697: mol_type = other DNA
atggccgccggcacctgggccgccgccgccgccgccgccgccgccgactacttcgtgctggtggccttcggcccccaccccagaggcagcggcgagggccagggccagatcctgcagagattccccgagaaggactgggaggacaaccccttcccccagggcatcgagctgttctgccagcccagcggctggcagctgtgccccgagagaaacccccccaccttcttcgtggccgtgctgaccgacatcaacagcgagagacactactgcgcctgcctgaccttctgggagcccgccgagcccagccagcaggagaccaccagagtggaggacgccaccgagagagaggaggagggcgacgagggcggccagacccacctgagccccaccgcccccgcccccagcgcccagctgttcgcccccaagaccctggtgctggtgagcagactggaccacaccgaggtgttcagaaacagcctgggcctgatctacgccatccacgtggagggcctgaacgtgtgcctggagaacgtgatcggcaacctgctgacctgcaccgtgcccctggccggcggcagccagagaaccatcagcctgggcgccggcgacagacaggtgatccagacccccctggccgacagcctgcccgtgagcagatgcagcgtggccctgctgttcagacagctgggcatcaccaacgtgctgagcctgttctgcgccgccctgaccgagcacaaggtgctgttcctgagcagaagctaccagagactggccgacgcctgcagaggcctgctggccctgctgttccccctgagatacagcttcacctacgtgcccatcctgcccgcccagctgctggaggtgctgagcacccccacccccttcatcatcggcgtgaacgccgccttccaggccgagacccaggagctgctggacgtgatcgtggccgacctggacggcggcaccgtgaccatccccgagtgcgtgcacatcccccccctgcccgagcccctgcagagccagacccacagcgtgctgagcatggtgctggaccccgagctggagctggccgacctggccttccccccccccaccaccagcaccagcagcctgaagatgcaggacaaggagctgagagccgtgttcctgagactgttcgcccagctgctgcagggctacagatggtgcctgcacgtggtgagaatccaccccgagcccgtgatcagattccacaaggccgccttcctgggccagagaggcctggtggaggacgacttcctgatgaaggtgctggagggcatggccttcgccggcttcgtgagcgagagaggcgtgccctacagacccaccgacctgttcgacgagctggtggcccacgaggtggccagaatgagagccgacgagaaccacccccagagagtgctgagacacgtgcaggagctggccgagcagctgtacaagaacgagaacccctaccccgccgtggccatgcacaaggtgcagagacccggcgagagcagccacctgagaagagtgcccagacccttccccagactggacgagggcaccgtgcagtggatcgtggaccaggccgccgccaagatgcagggcgccccccccgccgtgaaggccgagagaagaaccaccgtgcccagcggcccccccatgaccgccatcctggagagatgcagcggcctgcacgtgaacagcgccagaagactggaggtggtgagaaactgcatcagctacgtgttcgagggcaagatgctggaggccaagaagctgctgcccgccgtgctgagagccctgaagggcagagccgccagaagatgcctggcccaggagctgcacctgcacgtgcagcagaacagagccgtgctggaccaccagcagttcgacttcgtggtgagaatgatgaactgctgcctgcaggactgcaccagcctggacgagcacggcatcgccgccgccctgctgcccctggtgaccgccttctgcagaaagctgagccccggcgtgacccagttcgcctacagctgcgtgcaggagcacgtggtgtggagcaccccccagttctgggaggccatgttctacggcgacgtgcagacccacatcagagccctgtacctggagcccaccgaggacctggcccccgcccaggaggtgggcgaggcccccagccaggaggacgagagaagcgccctggacgtggccagcgagcagagaagactgtggcccaccctgagcagagagaagcagcaggagctggtgcagaaggaggagagcaccgtgttcagccaggccatccactacgccaacagaatgagctacctgctgctgcccctggacagcagcaagagcagactgctgagagagagagccggcctgggcgacctggagagcgccagcaacagcctggtgaccaacagcatggccggcagcgtggccgagagctacgacaccgagagcggcttcgaggacgccgagacctgcgacgtggccggcgccgtggtgagattcatcaacagattcgtggacaaggtgtgcaccgagagcggcgtgaccagcgaccacctgaagggcctgcacgtgatggtgcccgacatcgtgcagatgcacatcgagaccctggaggccgtgcagagagagagcagaagactgccccccatccagaagcccaagctgctgagaccctag

SEQ ID NO: 98680 - DNA, 5682 bp, synthetic construct
  misc_feature 1..5682: note = Description of Artificial Sequence: Synthetic coding sequence
  source 1..5682: mol_type = other DNA
atggccagactggccgactacttcgtgctggtggccttcggcccccaccccagaggcagcggcgagggccagggccagatcctgcagagattccccgagaaggactgggaggacaaccccttcccccagggcatcgagctgttctgccagcccagcggctggcagctgtgccccgagagaaacccccccaccttcttcgtggccgtgctgaccgacatcaacagcgagagacactactgcgcctgcctgaccttctgggagcccgccgagcccagccaggagaccaccagagtggaggacgccaccgagagagaggaggagggcgacgagggcggccagacccacctgagccccaccgcccccgcccccagcgcccagctgttcgcccccaagaccctggtgctggtgagcagactggaccacaccgaggtgttcagaaacagcctgggcctgatctacgccatccacgtggagggcctgaacgtgtgcctggagaacgtgatcggcaacctgctgacctgcaccgtgcccctggccggcggcagccagagaaccatcagcctgggcgccggcgacagacaggtgatccagacccccctggccgacagcctgcccgtgagcagatgcagcgtggccctgctgttcagacagctgggcatcaccaacgtgctgagcctgttctgcgccgccctgaccgagcacaaggtgctgttcctgagcagaagctaccagagactggccgacgcctgcagaggcctgctggccctgctgttccccctgagatacagcttcacctacgtgcccatcctgcccgcccagctgctggaggtgctgagcacccccacccccttcatcatcggcgtgaacgccgccttccaggccgagacccaggagctgctggacgtgatcgtggccgacctggacggcggcaccgtgaccatccccgagtgcgtgcacatcccccccctgcccgagcccctgcagagccagacccacagcgtgctgagcatggtgctggaccccgagctggagctggccgacctggccttccccccccccaccaccagcaccagcagcctgaagatgcaggacaaggagctgagagccgtgttcctgagactgttcgcccagctgctgcagggctacagatggtgcctgcacgtggtgagaatccaccccgagcccgtgatcagattccacaaggccgccttcctgggccagagaggcctggtggaggacgacttcctgatgaaggtgctggagggcatggccttcgccggcttcgtgagcgagagaggcgtgccctacagacccaccgacctgttcgacgagctggtggcccacgaggtggccagaatgagagccgacgagaaccacccccagagagtgctgagacacgtgcaggagctggccgagcagctgtacaagaacgagaacccctaccccgccgtggccatgcacaaggtgcagagacccggcgagagcagccacctgagaagagtgcccagacccttccccagactggacgagggcaccgtgcagtggatcgtggaccaggccgccgccaagatgcagggcgccccccccgccgtgaaggccgagagaagaaccaccgtgcccagcggcccccccatgaccgccatcctggagagatgcagcggcctgcacgtgaacagcgccagaagactggaggtggtgagaaactgcatcagctacgtgttcgagggcaagatgctggaggccaagaagctgctgcccgccgtgctgagagccctgaagggcagagccgccagaagatgcctggcccaggagctgcacctgcacgtgcagcagaacagagccgtgctggaccaccagcagttcgacttcgtggtgagaatgatgaactgctgcctgcaggactgcaccagcctggacgagcacggcatcgccgccgccctgctgcccctggtgaccgccttctgcagaaagctgagccccggcgtgacccagttcgcctacagctgcgtgcaggagcacgtggtgtggagcaccccccagttctgggaggccatgttctacggcgacgtgcagacccacatcagagccctgtacctggagcccaccgaggacctggcccccgcccaggaggtgggcgaggcccccagccaggaggacgagagaagcgccctggacgtggccagcgagcagagaagactgtggcccaccctgagcagagagaagcagcaggagctggtgcagaaggaggagagcaccgtgttcagccaggccatccactacgccaacagaatgagctacctgctgctgcccctggacagcagcaagagcagactgctgagagagagagccggcctgggcgacctggagagcgccagcaacagcctggtgaccaacagcatggccggcagcgtggccgagagctacgacaccgagagcggcttcgaggacgccgagacctgcgacgtggccggcgccgtggtgagattcatcaacagattcgtggacaaggtgtgcaccgagagcggcgtgaccagcgaccacctgaagggcctgcacgtgatggtgcccgacatcgtgcagatgcacatcgagaccctggaggccgtgcagagagagagcagaagactgccccccatccagaagcccaagctgctgagacccagactgctgcccggcgaggagtgcgtgctggacggcctgagagtgtacctgctgcccgacggcagagaggagggcgccggcggcagcgccggcggccccgccctgctgcccgccgagggcgccgtgttcctgaccacctacagagtgatcttcaccggcatgcccaccgaccccctggtgggcgagcaggtggtggtgagaagcttccccgtggccgccctgaccaaggagaagagaatcagcgtgcagacccccgtggaccagctgctgcaggacggcctgcagctgagaagctgcaccttccagctgctgaagatggccttcgacgaggaggtgggcagcgacagcgccgagctgttcagaaagcagctgcacaagctgagatacccccccgacatcagagccaccttcgccttcaccctgggcagcgcccacacccccggcagaccccccagagtgaccaaggacaagggccccagcctgagaaccctgagcagaaacctggtgaagaacgccaagaagaccatcggcagacagcacgtgaccagaaagaagtacaacccccccagctgggagcacagaggccagcccccccccgaggaccaggaggacgagatcagcgtgagcgaggagctggagcccagcaccctgacccccagcagcgccctgaagcccagcgacagaatgaccatgagcagcctggtggagagagcctgctgcagagactaccagagactgggcctgggcaccctgagcagcagcctgagcagagccaagagcgagcccttcagaatcagccccgtgaacagaatgtacgccatctgcagaagctaccccggcctgctgatcgtgccccagagcgtgcaggacaacgccctgcagagagtgagcagatgctacagacagaacagattccccgtggtgtgctggagaagcggcagaagcaaggccgtgctgctgagaagcggcggcctgcacggcaagggcgtggtgggcctgttcaaggcccagaacgcccccagccccggccagagccaggccgacagcagcagcctggagcaggagaagtacctgcaggccgtggtgagcagcatgcccagatacgccgacgccagcggcagaaacaccctgagcggcttcagcagcgcccacatgggcagccacgtgcccagccccagagccagagtgaccaccctgagcaaccccatggccgccagcgccagcagaagaaccgcccccagaggcaagtggggcagcgtgagaaccagcggcagaagcagcggcctgggcaccgacgtgggcagcagactggccggcagagacgccctggcccccccccaggccaacggcggcccccccgaccccggcttcctgagaccccagagagccgccctgtacatcctgggcgacaaggcccagctgaagggcgtgagaagcgaccccctgcagcagtgggagctggtgcccatcgaggtgttcgaggccagacaggtgaaggccagcttcaagaagctgctgaaggcctgcgtgcccggctgccccgccgccgagcccagccccgccagcttcctgagaagcctggaggacagcgagtggctgatccagatccacaagctgctgcaggtgagcgtgctggtggtggagctgctggacagcggcagcagcgtgctggtgggcctggaggacggctgggacatcaccacccaggtggtgagcctggtgcagctgctgagcgaccccttctacagaaccctggagggcttcagactgctggtggagaaggagtggctgagcttcggccacagattcagccacagaggcgcccacaccctggccggccagagcagcggcttcacccccgtgttcctgcagttcctggactgcgtgcaccaggtgcacctgcagttccccatggagttcgagttcagccagttctacctgaagttcctgggctaccaccacgtgagcagaagattcagaaccttcctgctggacagcgactacgagagaatcgagctgggcctgctgtacgaggagaagggcgagagaagaggccaggtgccctgcagaagcgtgtgggagtacgtggacagactgagcaagagaacccccgtgttccacaactacatgtacgcccccgaggacgccgaggtgctgagaccctacagcaacgtgagcaacctgaaggtgtgggacttctacaccgaggagaccctggccgagggccccccctacgactgggagctggcccagggcccccccgagccccccgaggaggagagaagcgacggcggcgccccccagagcagaagaagagtggtgtggccctgctacgacagctgccccagagcccagcccgacgccatcagcagactgctggaggagctgcagagactggagaccgagctgggccagcccgccgagagatggaaggacacctgggacagagtgaaggccgcccagagactggagggcagacccgacggcagaggcacccccagcagcctgctggtgagcaccgccccccaccacagaagaagcctgggcgtgtacctgcaggagggccccgtgggcagcaccctgagcctgagcctggacagcgaccagagcagcggcagcaccaccagcggcagcagacaggccgccagaagaagcaccagcaccctgtacagccagttccagaccgccgagagcgagaacagaagctacgagggcaccctgtacaagaagggcgccttcatgaagccctggaaggccagatggttcgtgctggacaagaccaagcaccagctgagatactacgaccacagagtggacaccgagtgcaagggcgtgatcgacctggccgaggtggaggccgtggcccccggcacccccaccatgggcgcccccaagaccgtggacgagaaggccttcttcgacgtgaagaccaccagaagagtgtacaacttctgcgcccaggacgtgcccagcgcccagcagtgggtggacagaatccagagctgcctgagcgacgcctag

SEQ ID NO: 98681 - DNA, 5604 bp, synthetic construct
  misc_feature 1..5604: note = Description of Artificial Sequence: Synthetic coding sequence
  source 1..5604: mol_type = other DNA
atggccagactggccgactacttcgtgctggtggccttcggcccccaccccagaggcagcggcgagggccagggccagatcctgcagagattccccgagaaggactgggaggacaaccccttcccccagggcatcgagctgttctgccagcccagcggctggcagctgtgccccgagagaaacccccccaccttcttcgtggccgtgctgaccgacatcaacagcgagagacactactgcgcctgcctgaccttctgggagcccgccgagcccagccaggagaccaccagagtggaggacgccaccgagagagaggaggagggcgacgagggcggccagacccacctgagccccaccgcccccgcccccagcgcccagctgttcgcccccaagaccctggtgctggtgagcagactggaccacaccgaggtgttcagaaacagcctgggcctgatctacgccatccacgtggagggcctgaacgtgtgcctggagaacgtgatcggcaacctgctgacctgcaccgtgcccctggccggcggcagccagagaaccatcagcctgggcgccggcgacagacaggtgatccagacccccctggccgacagcctgcccgtgagcagatgcagcgtggccctgctgttcagacagctgggcatcaccaacgtgctgagcctgttctgcgccgccctgaccgagcacaaggtgctgttcctgagcagaagctaccagagactggccgacgcctgcagaggcctgctggccctgctgttccccctgagatacagcttcacctacgtgcccatcctgcccgcccagctgctggaggtgctgagcacccccacccccttcatcatcggcgtgaacgccgccttccaggccgagacccaggagctgctggacgtgatcgtggccgacctggacggcggcaccgtgaccatccccgagtgcgtgcacatcccccccctgcccgagcccctgcagagccagacccacagcgtgctgagcatggtgctggaccccgagctggagctggccgacctggccttccccccccccaccaccagcaccagcagcctgaagatgcaggacaaggagctgagagccgtgttcctgagactgttcgcccagctgctgcagggctacagatggtgcctgcacgtggtgagaatccaccccgagcccgtgatcagattccacaaggccgccttcctgggccagagaggcctggtggaggacgacttcctgatgaaggtgctggagggcatggccttcgccggcttcgtgagcgagagaggcgtgccctacagacccaccgacctgttcgacgagctggtggcccacgaggtggccagaatgagagccgacgagaaccacccccagagagtgctgagacacgtgcaggagctggccgagcagctgtacaagaacgagaacccctaccccgccgtggccatgcacaaggtgcagagacccggcgagagcagccacctgagaagagtgcccagacccttccccagactggacgagggcaccgtgcagtggatcgtggaccaggccgccgccaagatgcagggcgccccccccgccgtgaaggccgagagaagaaccaccgtgcccagcggcccccccatgaccgccatcctggagagatgcagcggcctgcacgtgaacagcgccagaagactggaggtggtgagaaactgcatcagctacgtgttcgagggcaagatgctggaggccaagaagctgctgcccgccgtgctgagagccctgaagggcagagccgccagaagatgcctggcccaggagctgcacctgcacgtgcagcagaacagagccgtgctggaccaccagcagttcgacttcgtggtgagaatgatgaactgctgcctgcaggactgcaccagcctggacgagcacggcatcgccgccgccctgctgcccctggtgaccgccttctgcagaaagctgagccccggcgtgacccagttcgcctacagctgcgtgcaggagcacgtggtgtggagcaccccccagttctgggaggccatgttctacggcgacgtgcagacccacatcagagccctgtacctggagcccaccgaggacctggcccccgcccaggaggtgggcgaggcccccagccaggaggacgagagaagcgccctggacgtggccagcgagcagagaagactgtggcccaccctgagcagagagaagcagcaggagctggtgcagaaggaggagagcaccgtgttcagccaggccatccactacgccaacagaatgagctacctgctgctgcccctggacagcagcaagagcagactgctgagagagagagccggcctgggcgacctggagagcgccagcaacagcctggtgaccaacagcatggccggcagcgtggccgagagctacgacaccgagagcggcttcgaggacgccgagacctgcgacgtggccggcgccgtggtgagattcatcaacagattcgtggacaaggtgtgcaccgagagcggcgtgaccagcgaccacctgaagggcctgcacgtgatggtgcccgacatcgtgcagatgcacatcgagaccctggaggccgtgcagagagagagcagaagactgccccccatccagaagcccaagctgctgagacccagactgctgcccggcgaggagtgcgtgctggacggcctgagagtgtacctgctgcccgacggcagagaggagggcgccggcggcagcgccggcggccccgccctgctgcccgccgagggcgccgtgttcctgaccacctacagagtgatcttcaccggcatgcccaccgaccccctggtgggcgagcaggtggtggtgagaagcttccccgtggccgccctgaccaaggagaagagaatcagcgtgcagacccccgtggaccagctgctgcaggacggcctgcagctgagaagctgcaccttccagctgctgaagatggccttcgacgaggaggtgggcagcgacagcgccgagctgttcagaaagcagctgcacaagctgagatacccccccgacatcagagccaccttcgccttcaccctgggcagcgcccacacccccggcagaccccccagagtgaccaaggacaagggccccagcctgagaaccctgagcagaaacctggtgaagaacgccaagaagaccatcggcagacagcacgtgaccagaaagaagtacaacccccccagctgggagcacagaggccagcccccccccgaggaccaggaggacgagatcagcgtgagcgaggagctggagcccagcaccctgacccccagcagcgccctgaagcccagcgacagaatgaccatgagcagcctggtggagagagcctgctgcagagactaccagagactgggcctgggcaccctgagcagcagcctgagcagagccaagagcgagcccttcagaatcagccccgtgaacagaatgtacgccatctgcagaagctaccccggcctgctgatcgtgccccagagcgtgcaggacaacgccctgcagagagtgagcagatgctacagacagaacagattccccgtggtgtgctggagaagcggcagaagcaaggccgtgctgctgagaagcggcggcctgcacggcaagggcgtggtgggcctgttcaaggcccagaacgcccccagccccggccagagccaggccgacagcagcagcctggagcaggagaagtacctgcaggccgtggtgagcagcatgcccagatacgccgacgccagcggcagaaacaccctgagcggcttcagcagcgcccacatgggcagccacggcaagtggggcagcgtgagaaccagcggcagaagcagcggcctgggcaccgacgtgggcagcagactggccggcagagacgccctggcccccccccaggccaacggcggcccccccgaccccggcttcctgagaccccagagagccgccctgtacatcctgggcgacaaggcccagctgaagggcgtgagaagcgaccccctgcagcagtgggagctggtgcccatcgaggtgttcgaggccagacaggtgaaggccagcttcaagaagctgctgaaggcctgcgtgcccggctgccccgccgccgagcccagccccgccagcttcctgagaagcctggaggacagcgagtggctgatccagatccacaagctgctgcaggtgagcgtgctggtggtggagctgctggacagcggcagcagcgtgctggtgggcctggaggacggctgggacatcaccacccaggtggtgagcctggtgcagctgctgagcgaccccttctacagaaccctggagggcttcagactgctggtggagaaggagtggctgagcttcggccacagattcagccacagaggcgcccacaccctggccggccagagcagcggcttcacccccgtgttcctgcagttcctggactgcgtgcaccaggtgcacctgcagttccccatggagttcgagttcagccagttctacctgaagttcctgggctaccaccacgtgagcagaagattcagaaccttcctgctggacagcgactacgagagaatcgagctgggcctgctgtacgaggagaagggcgagagaagaggccaggtgccctgcagaagcgtgtgggagtacgtggacagactgagcaagagaacccccgtgttccacaactacatgtacgcccccgaggacgccgaggtgctgagaccctacagcaacgtgagcaacctgaaggtgtgggacttctacaccgaggagaccctggccgagggccccccctacgactgggagctggcccagggcccccccgagccccccgaggaggagagaagcgacggcggcgccccccagagcagaagaagagtggtgtggccctgctacgacagctgccccagagcccagcccgacgccatcagcagactgctggaggagctgcagagactggagaccgagctgggccagcccgccgagagatggaaggacacctgggacagagtgaaggccgcccagagactggagggcagacccgacggcagaggcacccccagcagcctgctggtgagcaccgccccccaccacagaagaagcctgggcgtgtacctgcaggagggccccgtgggcagcaccctgagcctgagcctggacagcgaccagagcagcggcagcaccaccagcggcagcagacaggccgccagaagaagcaccagcaccctgtacagccagttccagaccgccgagagcgagaacagaagctacgagggcaccctgtacaagaagggcgccttcatgaagccctggaaggccagatggttcgtgctggacaagaccaagcaccagctgagatactacgaccacagagtggacaccgagtgcaagggcgtgatcgacctggccgaggtggaggccgtggcccccggcacccccaccatgggcgcccccaagaccgtggacgagaaggccttcttcgacgtgaagaccaccagaagagtgtacaacttctgcgcccaggacgtgcccagcgcccagcagtgggtggacagaatccagagctgcctgagcgacgcctag

SEQ ID NO: 98682 - DNA, 5550 bp, synthetic construct
  misc_feature 1..5550: note = Description of Artificial Sequence: Synthetic coding sequence
  source 1..5550: mol_type = other DNA
atggccagactggccgactacttcatcgtggtgggctacgaccacgagaagcccggcagcggcgagggcctgggcaagatcatccagagattcccccagaaggactgggacgacacccccttcccccagggcatcgagctgttctgccagcccggcggctggcagctgagcagagagagaaagcagcccaccttcttcgtggtggtgctgaccgacatcgacagcgacagacactactgcagctgcctgaccttctacgaggccgagatcaacctgcagggcaccaagaaggaggagatcgagggcgaggccaaggtgagcggcctgatccagcccgccgaggtgttcgcccccaagagcctggtgctggtgagcagactgtactaccccgagatcttcagagcctgcctgggcctgatctacaccgtgtacgtggacagcctgaacgtgagcctggagagcctgatcgccaacctgtgcgcctgcctggtgcccgccgccggcggcagccagaagctgttcagcctgggcgccggcgacagacagctgatccagacccccctgcacgacagcctgcccatcaccggcaccagcgtggccctgctgttccagcagctgggcatccagaacgtgctgagcctgttctgcgccgtgctgaccgagaacaaggtgctgttccacagcgccagcttccagagactgagcgacgcctgcagagccctggagagcctgatgttccccctgaagtacagctacccctacatccccatcctgcccgcccagctgctggaggtgctgagcagccccacccccttcatcatcggcgtgcacagcgtgttcaagaccgacgtgcacgagctgctggacgtgatcatcgccgacctggacggcggcaccatcaagatccccgagtgcatccacctgagcagcctgcccgagcccctgctgcaccagacccagagcgccctgagcctgatcctgcaccccgacctggaggtggccgaccacgccttccccccccccagaaccgccctgagccacagcaagatgctggacaaggaggtgagagccgtgttcctgagactgttcgcccagctgttccagggctacagaagctgcctgcagctgatcagaatccacgccgagcccgtgatccacttccacaagaccgccttcctgggccagagaggcctggtggagaacgacttcctgaccaaggtgctgagcggcatggccttcgccggcttcgtgagcgagagaggccccccctacagaagctgcgacctgttcgacgagctggtggccttcgaggtggagagaatcaaggtggaggagaacaaccccgtgaagatgatcaagcacgtgagagagctggccgagcagctgttcaagaacgagaaccccaacccccacatggccttccagaaggtgcccagacccaccgagggcagccacctgagagtgcacatcctgcccttccccgagatcaacgaggccagagtgcaggagctgatccaggagaacgtggccaagaaccagaacgccccccccgccaccagaatcgagaagaagtgcgtggtgcccgccggcccccccgtggtgagcatcatggacaaggtgaccaccgtgttcaacagcgcccagagactggaggtggtgagaaactgcatcagcttcatcttcgagaacaagatcctggagaccgagaagaccctgcccgccgccctgagagccctgaagggcaaggccgccagacagtgcctgaccgacgagctgggcctgcacgtgcagcagaacagagccatcctggaccaccagcagttcgactacatcatcagaatgatgaactgcaccctgcaggactgcagcagcctggaggagtacaacatcgccgccgccctgctgcccctgaccagcgccttctacagaaagctggcccccggcgtgagccagttcgcctacacctgcgtgcaggaccaccccatctggaccaaccagcagttctgggagaccaccttctacaacgccgtgcaggagcaggtgagaagcctgtacctgagcgccaaggaggacaaccacgccccccacctgaagcagaaggacaagctgcccgacgaccactaccaggagaagaccgccatggacctggccgccgagcagctgagactgtggcccaccctgagcaagagcacccagcaggagctggtgcagcacgaggagagcaccgtgttcagccaggccatccacttcgccaacctgatggtgaacctgctggtgcccctggacaccagcaagaacaagctgctgagaaccagcgcccccggcgactgggagagcggcagcaacagcatcgtgaccaacagcatcgccggcagcgtggccgagagctacgacaccgagagcggcttcgaggacagcgagaacaccgacatcgccaacagcgtggtgagattcatcaccagattcatcgacaaggtgtgcaccgagagcggcgtgacccaggaccacatcaagagcctgcactgcatgatccccggcatcgtggccatgcacatcgagaccctggaggccgtgcacagagagagcagaagactgccccccatccagaagcccaagatcctgagacccgccctgctgcccggcgaggagatcgtgtgcgagggcctgagagtgctgctggaccccgacggcagagaggaggccaccggcggcctgctgggcggcccccagctgctgcccgccgagggcgccctgttcctgaccacctacagaatcctgttcagaggcaccccccacgaccagctggtgggcgagcagaccgtggtgagaagcttccccatcgccagcatcaccaaggagaagaagatcaccatgcagaaccagctgcagcagaacatgcaggagggcctgcagatcaccagcgccagcttccagctgatcaaggtggccttcgacgaggaggtgagccccgaggtggtggagatcttcaagaagcagctgatgaagttcagatacccccagagcatcttcagcaccttcgccttcgccgccggccagaccaccccccagatcatcctgcccaagcagaaggagaagaacaccagcttcagaaccttcagcaagaccatcgtgaagggcgccaagagagccggcaagatgaccatcggcagacagtacctgctgaagaagaagaccggcaccatcgtggaggagagagtgaacagacccggctggaacgaggacgacgacgtgagcgtgagcgacgagagcgagctgcccaccagcaccaccctgaaggccagcgagaagagcaccatggagcagctggtggagaaggcctgcttcagagactaccagagactgggcctgggcaccatcagcggcagcagcagcagaagcagacccgagtacttcagaatcaccgccagcaacagaatgtacagcctgtgcagaagctaccccggcctgctggtggtgccccaggccgtgcaggacagcagcctgcccagagtggccagatgctacagacacaacagactgcccgtggtgtgctggaagaacagcagaagcggcaccctgctgctgagaagcggcggcttccacggcaagggcgtggtgggcctgttcaagagccagaacagcccccaggccgcccccaccagcagcctggagagcagcagcagcatcgagcaggagaagtacctgcaggccctgctgaacgccgtgagcgtgcaccagaagctgagaggcaacagcaccctgaccgtgagacccgccttcgccctgagccccggcgtgtgggccagcctgagaagcagcaccagactgatcagcagccccaccagcttcatcgacgtgggcgccagactggccggcaaggaccacagcgccagcttcagcaacagcagctacctgcagaaccagctgctgaagagacaggccgccctgtacatcttcggcgagaagagccagctgagaaacttcaaggtggagttcgccctgaactgcgagttcgtgcccgtggagttccacgagatcagacaggtgaaggccagcttcaagaagctgatgagagcctgcatccccagcaccatccccaccgacagcgaggtgaccttcctgaaggccctgggcgacagcgagtggttcccccagctgcacagaatcatgcagctggccgtggtggtgagcgaggtgctggagaacggcagcagcgtgctggtgtgcctggaggagggctgggacatcaccgcccaggtgaccagcctggtgcagctgctgagcgaccccttctacagaaccctggagggcttccagatgctggtggagaaggagtggctgagcttcggccacaagttcagccagagaagcagcctgaccctgaactgccagggcagcggcttcgcccccgtgttcctgcagttcctggactgcgtgcaccaggtgcacaaccagtaccccaccgagttcgagttcaacctgtactacctgaagttcctggccttccactacgtgagcaacagattcaagaccttcctgctggacagcgactacgagagactggagcacggcaccctgttcgacgacaagggcgagaagcacgccaagaagggcgtgtgcatctgggagtgcatcgacagaatgcacaagagaagccccatcttcttcaactacctgtacagccccctggagatcgaggccctgaagcccaacgtgaacgtgagcagcctgaagaagtgggactactacatcgaggagaccctgagcaccggccccagctacgactggatgatgctgacccccaagcacttccccagcgaggacagcgacctggccggcgaggccggccccagaagccagagaagaaccgtgtggccctgctacgacgacgtgagctgcacccagcccgacgccctgaccagcctgttcagcgagatcgagaagctggagcacaagctgaaccaggcccccgagaagtggcagcagctgtgggagagagtgaccgtggacctgaaggaggagcccagaaccgacagaagccagagacacctgagcagaagccccggcatcgtgagcaccaacctgcccagctaccagaagagaagcctgctgcacctgcccgacagcagcatgggcgaggagcagaacagcagcatcagccccagcaacggcgtggagagaagagccgccaccctgtacagccagtacaccagcaagaacgacgagaacagaagcttcgagggcaccctgtacaagagaggcgccctgctgaagggctggaagcccagatggttcgtgctggacgtgaccaagcaccagctgagatactacgacagcggcgaggacaccagctgcaagggccacatcgacctggccgaggtggagatggtgatccccgccggccccagcatgggcgcccccaagcacaccagcgacaaggccttcttcgacctgaagaccagcaagagagtgtacaacttctgcgcccaggacggccagagcgcccagcagtggatggacaagatccagagctgcatcagcgacgcctag

SEQ ID NO: 98683 - DNA, 4791 bp, synthetic construct
  misc_feature 1..4791: note = Description of Artificial Sequence: Synthetic coding sequence
  source 1..4791: mol_type = other DNA
atggagagcagagagaccctgagcagcagcagacagagaggcggcgagagcgacttcctgcccgtgagcagcgccaagccccccgccgcccccggctgcgccggcgagcccctgctgagcacccccggccccggcaagggcatccccgtgggcggcgagagaatggagcccgaggaggaggacgagctgggcagcggcagagacgtggacagcaacagcaacgccgacagcgagaagtgggtggccggcgacggcctggaggagcaggagttcagcatcaaggaggccaacttcaccgagggcagcctgaagctgaagatccagaccaccaagagagccaagaagccccccaagaacctggagaactacatctgcccccccgagatcaagatcaccatcaagcagagcggcgaccagaaggtgagcagagccggcaagaacagcaaggccaccaaggaggaggagagaagccacagcaagaagaagctgctgaccgccagcgacctggccgccagcgacctgaagggcttccagccccaggcctacgagagaccccagaagcacagcaccctgcactacgacaccggcctgccccaggacttcaccggcgacaccctgaagcccaagcaccagcagaagagcagcagccagaaccacatggactggagcaccaacagcgacagcggccccgtgacccagaactgcttcatcagccccgagagcggcagagagaccgccagcaccagcaagatccccgccctggagcccgtggccagcttcgccaaggcccagggcaagaagggcagcgccggcaacacctggagccagctgagcaacaacaacaaggacctgctgctgggcggcgtggcccccagccccagcagccacagcagccccgccccccccagcagcagcgccgagtgcaacggcctgcagcccctggtggaccaggacggcggcggcaccaaggagccccccgagccccccaccgtgggcagcaagaagaagagcagcaagaaggacgtgatcagccagaccatccccaaccccgacctggactgggtgaagaacgcccagaaggccttcgacaacaccgagggcaagagagagggctacagcgccgacagcgcccaggaggccagccccgccagacagaacgtgagcagcgccagcaaccccgagaacgacagcagccacgtgagaatcaccatccccatcaaggcccccagcctggaccccaccaaccacaagagaaagaagagacagagcatcaaggccgtggtggagaagatcatgcccgagaaggccctggccagcggcatcaccatgagcagcgaggtggtgaacagaatcctgagcaacagcgagggcaacaagaaggaccccagagtgcccaagctgagcaagatgatcgagaacgagagccccagcgtgggcctggagaccggcggcaacgccgagaaggtgatccccggcggcgtgagcaagcccagaaagccccccatggtgatgaccccccccacctgcaccgaccacagccccagcagaaagctgcccgagatccagcaccccaagttcgccgccaagagaagatggacctgcagcaagcccaagcccagcaccatgctgagagaggccgtgatggccaccagcgacaagctgatgctggagccccccagcgcctaccccatcacccccagcagccccctgtacaccaacaccgacagcctgaccgtgatcacccccgtgaagaagaagagaggcagacccaagaagcagcccctgctgaccgtggagaccatccacgagggcaccagcaccagccccgtgagccccatcagcagagagttccccggcaccaagaagagaaagagaagaagaaacctggccaagctggcccagctggtgcccggcgaggacaagcccatgagcgagatgaagttccacaagaaggtgggcaagctgggcgtgctggacaagaagaccatcaagaccatcaacaagatgaagaccctgaagagaaagaacatcctgaaccagatcctgagctgcagcagcagcgtggccctgaaggccaaggccccccccgagaccagccccggcgccgccgccatcgagagcaagctgggcaagcagatcaacgtgagcaagagaggcaccatctacatcggcaagaagagaggcagaaagcccagagccgagctgcccccccccagcgaggagcccaagaccgccatcaagcaccccagacccgtgagcagccagcccgacgtgcccgccgtgcccagcaacttccagagcctggtggccagcagccccgccgccatgcaccccctgagcacccagctgggcggcagcaacggcaacctgagccccgccagcaccgagaccaacttcagcgagctgaagaccatgcccaacctgcagcccatcagcgccctgcccaccaagacccagaagggcatccacagcggcacctggaagctgagcccccccagactgatggccaacagccccagccacctgtgcgagatcggcagcctgaaggagatcaccctgagccccgtgagcgagagccacagcgaggagaccatccccagcgacagcggcatcggcaccgacaacaacagcaccagcgaccaggccgagaagagcagcgagagcagaagaagatacagcttcgacttctgcagcctggacaaccccgaggccatccccagcgacaccagcaccaagaacagacacggccacagacagaagcacctgatcgtggacaacttcctggcccacgagagcctgaagaagcccaagcacaagagaaagagaaagagcctgcagaacagagacgacctgcagttcctggccgacctggaggagctgatcaccaagttccaggtgttcagaatcagccacagaagctacaccttctaccacgagaacccctaccccagcatcttcagaatcaacttcgaccactactaccccgtgccctacatccagtacgaccccctgctgtacctgagaagaaccagcgacctgaagagcaagaagaagagaggcagacccgccaagaccaacgacaccatgaccaaggtgcccttcctgcagggcttcagctaccccatccccagcggcagctactacgccccctacggcatgccctacaccagcatgcccatgatgaacctgggctactacggccagtaccccgcccccctgtacctgagccacaccctgggcgccgccagccccttcatgagacccaccgtgccccccccccagttccacaccaacagccacgtgaagatgagcggcgccgccaagcacaaggccaagcacggcgtgcacctgcagggccccgtgagcatgggcctgggcgacatgcagcccagcctgaacccccccaaggtgggcagcgccagcctgagcagcggcagactgcacaagagaaagcacaagcacaagcacaagcacaaggaggacagaatcctgggcacccacgacaacctgagcggcctgttcgccggcaaggccaccggcttcagcagccacatcctgagcgagagactgagcagcgccgacaaggagctgcccctggtgagcgagaagaacaagcacaaggagaagcagaagcaccagcacagcgaggccggccacaaggccagcaagaacaacttcgaggtggacaccctgagcaccctgagcctgagcgacgcccagcactggacccaggccaaggagaagggcgacctgagcagcgagcccgtggacagctgcaccaagagatacagcggcagcggcggcgacggcggcagcaccagaagcgagaacctggacgtgttcagcgagatgaaccccagcaacgacaagtgggacagcgacgtgagcggcagcaagagaagaagctacgagggcttcggcacctacagagagaaggacatccaggccttcaagatgaacagaaaggagagaagcagctacgacagcagcatgagccccggcatgcccagcccccacctgaaggtggaccagaccgccgtgcacagcaagaacgagggcagcgtgcccaccatgatgaccagaaagaagcccgccgccgtggacagcgtgaccatcccccccgcccccgtgctgagcctgctggccgccagcgccgccaccagcgacgccgtgggcagcagcctgaagaagagattcaagagaagagagatcgaggccatccagtgcgaggtgagaaagatgtgcaactacaccaagatcctgagcaccaagaagaacctggaccacgtgaacaagatcctgaaggccaagagactgcagagacagagcaagaccggcaacaacttcgtgaagaagagaagaggcagacccagaaagcagcccacccagttcgacgaggacagcagagaccagatgcccgtgctggagaagtgcatcgacctgcccagcaagagaggccagaagcccagcctgagccccctggtgctggagcccgccgccagccaggacaccatcatggccaccatcgaggccgtgatccacatggccagagaggccccccccctgcccccccccccccccccccccctgcccccccccccccccccccccctgcccccccccccccccctgcccaagacccccagaggcggcaagagaaagcacaagccccaggcccccgcccagcccccccagcagagccccccccagcagcccctgccccaggaggaggaggtgaaggccaagagacagagaaagagcagaggcagcgagagcgaggtgctgccctag

SEQ ID NO: 98684 - DNA, 729 bp, synthetic construct
  misc_feature 1..729: note = Description of Artificial Sequence: Synthetic coding sequence
  source 1..729: mol_type = other DNA
atggagagcagagagaccctgagcagcagcagacagagaggcggcgagagcgacttcctgcccgtgagcagcgccaagccccccgccgcccccggctgcgccggcgagcccctgctgagcacccccggccccggcaagggcatccccgtgggcggcgagagaatggagcccgaggaggaggacgagctgggcagcggcagagacgtggacagcaacagcaacgccgacagcgagaagtgggtggccggcgacggcctggaggagcaggagttcagcatcaaggaggccaacttcaccgagggcagcctgaagctgaagatccagaccaccaagagagccaagaagccccccaagaacctggagaactacatctgcccccccgagatcaagatcaccatcaagcagagcggcgaccagaaggtgagcagagccggcaagaacagcaaggccaccaaggaggaggagagaagccacagcaagaagaagctgctgaccgccagcgacctggccgccagcgacctgaagggcttccagccccagatcaaggacagcagcaaggaggaggtgtggaagagaagaggcggccagggcatccccttcaagaagcagttcctgagccaggagagagccatgtgcttcagctgccccagaaaccccttccccgccaagcccggcagcctgaccctgcccttccacagcgagcccgccgtgtgggcccaggaggtgtag

SEQ ID NO: 98685 - DNA, 414 bp, synthetic construct
  misc_feature 1..414: note = Description of Artificial Sequence: Synthetic coding sequence
  source 1..414: mol_type = other DNA
atggagagcagagagaccctgagcagcagcagacagagaggcggcgagagcgacttcctgcccgtgagcagcgccaagccccccgccgcccccggctgcgccggcgagcccctgctgagcacccccggccccggcaagggcatccccgtgggcggcgagagaatggagcccgaggaggaggacgagctgggcagcggcagagacgtggacagcaacagcaacgccgacagcgagaagtgggtggccggcgacggcctggaggagcaggagttcagcatcaaggaggccaacttcaccgagggcagcctgaagctgaagatccagaccaccaagagagccaagaagccccccaagaacctggagaactacatctgcccccccgagatcaagatcaccatcaagcagagcggctag

SEQ ID NO: 98686 - DNA, 2055 bp, synthetic construct
  misc_feature 1..2055: note = Description of Artificial Sequence: Synthetic coding sequence
  source 1..2055: mol_type = other DNA
atgttcgccgaggccgccaagaccaccagaccctgcggcatggccgagttcaaggagaagcccgaggcccccaccgagcagctggacgtggcctgcggccaggagaacctgcccgtgggcgcctggccccccggcgccgcccccgcccccttccagtacacccccgaccacgtggtgggccccggcgccgacatcgaccccacccagatcaccttccccggctgcatctgcgtgaagaccccctgcctgcccggcacctgcagctgcctgagacacggcgagaactacgacgacaacagctgcctgagagacatcggcagcggcggcaagtacgccgagcccgtgttcgagtgcaacgtgctgtgcagatgcagcgaccactgcagaaacagagtggtgcagaagggcctgcagttccacttccaggtgttcaagacccacaagaagggctggggcctgagaaccctggagttcatccccaagggcagattcgtgtgcgagtacgccggcgaggtgctgggcttcagcgaggtgcagagaagaatccacctgcagaccaagagcgacagcaactacatcatcgccatcagagagcacgtgtacaacggccaggtgatggagaccttcgtggaccccacctacatcggcaacatcggcagattcctgaaccacagctgcgagcccaacctgctgatgatccccgtgagaatcgacagcatggtgcccaagctggccctgttcgccgccaaggacatcgtgcccgaggaggagctgagctacgactacagcggcagatacctgaacctgaccgtgagcgaggacaaggagagactggaccacggcaagctgagaaagccctgctactgcggcgccaagagctgcaccgccttcctgcccttcgacagcagcctgtactgccccgtggagaagagcaacatcagctgcggcaacgagaaggagcccagcatgtgcggcagcgcccccagcgtgttccccagctgcaagagactgaccctggagaccatgaagatgatgctggacaagaagcagatcagagccatcttcctgttcgagttcaagatgggcagaaaggccgccgagaccaccagaaacatcaacaacgccttcggccccggcaccgccaacgagagaaccgtgcagtggtggttcaagaagttctgcaagggcgacgagagcctggaggacgaggagagaagcggcagacccagcgaggtggacaacgaccagctgagagccatcatcgaggccgaccccctgaccaccaccagagaggtggccgaggagctgaacgtgaaccacagcaccgtggtgagacacctgaagcagatcggcaaggtgaagaagctggacaagtgggtgccccacgagctgaccgagaaccagaagaacagaagattcgaggtgagcagcagcctgatcctgagaaaccacaacgagcccttcctggacagaatcgtgacctgcgacgagaagtggatcctgtacgacaacagaagaagaagcgcccagtggctggaccaggaggaggcccccaagcacttccccaagcccatcctgcaccccaagaaggtgatggtgaccatctggtggagcgccgccggcctgatccactacagcttcctgaaccccggcgagaccatcaccagcgagaagtacgcccaggagatcgacgagatgaaccagaagctgcagagactgcagctggccctggtgaacagaaagggccccatcctgctgcacgacaacgccagaccccacgtggcccagcccaccctgcagaagctgaacgagctgggctacgaggtgctgccccaccccccctacagccccgacctgctgcccaccaactaccacgtgttcaagcacctgaacaacttcctgcagggcaagagattccacaaccagcaggacgccgagaacgccttccaggagttcgtggagagccagagcaccgacttctacgccaccggcatcaaccagctgatcagcagatggcagaagtgcgtggactgcaacggcagctacttcgactag

SEQ ID NO: 98687 - DNA, 1098 bp, synthetic construct
  misc_feature 1..1098: note = Description of Artificial Sequence: Synthetic coding sequence
  source 1..1098: mol_type = other DNA
atgttcgccgaggccgccaagaccaccagaccctgcggcatggccgagttcaaggagaagcccgaggcccccaccgagcagctggacgtggcctgcggccaggagaacctgcccgtgggcgcctggccccccggcgccgcccccgcccccttccagtacacccccgaccacgtggtgggccccggcgccgacatcgaccccacccagatcaccttccccggctgcatctgcgtgaagaccccctgcctgcccggcacctgcagctgcctgagacacggcgagaactacgacgacaacagctgcctgagagacatcggcagcggcggcaagtacgccgagcccgtgttcgagtgcaacgtgctgtgcagatgcagcgaccactgcagaaacagagtggtgcagaagggcctgcagttccacttccaggtgttcaagacccacaagaagggctggggcctgagaaccctggagttcatccccaagggcagattcgtgtgcgagtacgccggcgaggtgctgggcttcagcgaggtgcagagaagaatccacctgcagaccaagagcgacagcaactacatcatcgccatcagagagcacgtgtacaacggccaggtgatggagaccttcgtggaccccacctacatcggcaacatcggcagattcctgaaccacagctgcgagcccaacctgctgatgatccccgtgagaatcgacagcatggtgcccaagctggccctgttcgccgccaaggacatcgtgcccgaggaggagctgagctacgactacagcggcagatacctgaacctgaccgtgagcgaggacaaggagagactggaccacggcaagctgagaaagccctgctactgcggcgccaagagctgcaccgccttcctgcccttcgacagcagcctgtactgccccgtggagaagagcaacatcagctgcggcaacgagaaggagcccagcatgtgcggcagcgcccccagcgtgttccccagctgcaagagactgaccctggaggtgagcctgttcagcgacaagcagctggcccccccctacagcggcagacagtggctggccagcttcaccagcgcctag

SEQ ID NO: 98688 - DNA, 516 bp, synthetic construct
  misc_feature 1..516: note = Description of Artificial Sequence: Synthetic coding sequence
  source 1..516: mol_type = other DNA
atgttcgccgaggccgccaagaccaccagaccctgcggcatggccgagttcaaggagaagcccgaggcccccaccgagcagctggacgtggcctgcggccaggagaacctgcccgtgggcgcctggccccccggcgccgcccccgcccccttccagtacacccccgaccacgtggtgggccccggcgccgacatcgaccccacccagatcaccttccccggctgcatctgcgtgaagaccccctgcctgcccggcacctgcagctgcctgagacacggcgagaactacgacgacaacagctgcctgagagacatcggcagcggcggcaagtacgccgagcccgtgttcgagtgcaacgtgctgtgcagatgcagcgaccactgcagaaacagagtggtgcagaagggcctgcagttccacttccaggtgttcaagacccacaagaagggctggggcctgagaaccctggagttcatccccaagggcagaaaggtggagcaccagctgtggaagtag

SEQ ID NO: 98689 - DNA, 1101 bp, synthetic construct
  misc_feature 1..1101: note = Description of Artificial Sequence: Synthetic coding sequence
  source 1..1101: mol_type = other DNA
atggacagcgacgacgagatggtggaggaggccgtggagggccacctggacgacgacggcctgccccacggcttctgcaccgtgacctacagcagcaccgacagattcgagggcaacttcgtgcacggcgagaagaacggcagaggcaagttcttcttcttcgacggcagcaccctggagggctactacgtggacgacgccctgcagggccagggcgtgtacacctacgaggacggcggcgtgctgcagggcacctacgtggacggcgagctgaacggccccgcccaggagtacgacaccgacggcagactgatcttcaagggccagtacaaggacaacatcagacacggcgtgtgctggatctactaccccgacggcggcagcctggtgggcgaggtgaacgaggacggcgagatgaccggcgagaagatcgcctacgtgtaccccgacgagagaaccgccctgtacggcaagttcatcgacggcgagatgatcgagggcaagctggccaccctgatgagcaccgaggagggcagaccccacttcgagctgatgcccggcaacagcgtgtaccacttcgacaagagcaccagcagctgcatcagcaccaacgccctgctgcccgacccctacgagagcgagagagtgtacgtggccgagagcctgatcagcagcgccggcgagggcctgttcagcaaggtggccgtgggccccaacaccgtgatgagcttctacaacggcgtgagaatcacccaccaggaggtggacagcagagactgggccctgaacggcaacaccctgagcctggacgaggagaccgtgatcgacgtgcccgagccctacaaccacgtgagcaagtactgcgccagcctgggccacaaggccaaccacagcttcacccccaactgcatctacgacatgttcgtgcaccccagattcggccccatcaagtgcatcagaaccctgagagccgtggaggccgacgaggagctgaccgtggcctacggctacgaccacagcccccccggcaagagcggccccgaggcccccgagtggtaccaggtggagctgaaggccttccaggccacccagcagaagtag

SEQ ID NO: 98690 - DNA, 5124 bp, synthetic construct
  misc_feature 1..5124: note = Description of Artificial Sequence: Synthetic coding sequence
  source 1..5124: mol_type = other DNA
atggaccaggagggcggcggcgacggccagaaggcccccagcttccagtggagaaactacaagctgatcgtggaccccgccctggaccccgccctgagaagacccagccagaaggtgtacagatacgacggcgtgcacttcagcgtgaacgacagcaagtacatccccgtggaggacctgcaggaccccagatgccacgtgagaagcaagaacagagacttcagcctgcccgtgcccaagttcaagctggacgagttctacatcggccagatccccctgaaggaggtgaccttcgccagactgaacgacaacgtgagagagaccttcctgaaggacatgtgcagaaagtacggcgaggtggaggaggtggagatcctgctgcaccccagaaccagaaagcacctgggcctggccagagtgctgttcaccagcaccagaggcgccaaggagaccgtgaagaacctgcacctgaccagcgtgatgggcaacatcatccacgcccagctggacatcaagggccagcagagaatgaagtactacgagctgatcgtgaacggcagctacaccccccagaccgtgcccaccggcggcaaggccctgagcgagaagttccagggcagcggcgccgccaccgagaccgccgagagcagaagaagaagcagcagcgacaccgccgcctaccccgccggcaccaccgccgtgggcacccccggcaacggcaccccctgcagccaggacaccagcttcagcagcagcagacaggacacccccagcagcttcggccagttcaccccccagagcagccagggcaccccctacaccagcagaggcagcaccccctacagccaggacagcgcctacagcagcagcaccaccagcaccagcttcaagcccagaagaagcgagaacagctaccaggacgccttcagcagaagacacttcagcgccagcagcgccagcaccaccgccagcaccgccatcgccgccaccaccgccgccaccgccagcagcagcgccagcagcagcagcctgagcagcagcagcagcagcagcagcagcagcagcagcagccagttcagaagcagcgacgccaactaccccgcctactacgagagctggaacagataccagagacacaccagctacccccccagaagagccaccagagaggagccccccggcgcccccttcgccgagaacaccgccgagagattcccccccagctacaccagctacctgccccccgagcccagcagacccaccgaccaggactacagaccccccgccagcgaggcccccccccccgagccccccgagcccggcggcggcggcggcggcggcggccccagccccgagagagaggaggtgagaaccagccccagacccgccagccccgccagaagcggcagccccgcccccgagaccaccaacgagagcgtgcccttcgcccagcacagcagcctggacagcagaatcgagatgctgctgaaggagcagagaagcaagttcagcttcctggccagcgacaccgaggaggaggaggagaacagcagcatggtgctgggcgccagagacaccggcagcgaggtgcccagcggcagcggccacggcccctgcacccccccccccgcccccgccaacttcgaggacgtggcccccaccggcagcggcgagcccggcgccaccagagagagccccaaggccaacggccagaaccaggccagcccctgcagcagcggcgacgacatggagatcagcgacgacgacagaggcggcagccccccccccgcccccacccccccccagcagccccccccccccccccccccccccccccccccccccccctacctggccagcctgcccctgggctaccccccccaccagcccgcctacctgctgccccccagacccgacggcccccccccccccgagtaccccccccccccccccccccccccccacatctacgacttcgtgaacagcctggagctgatggacagactgggcgcccagtggggcggcatgcccatgagcttccagatgcagacccagatgctgaccagactgcaccagctgagacagggcaagggcctgatcgccgccagcgccggcccccccggcggcgccttcggcgaggccttcctgcccttcccccccccccaggaggccgcctacggcctgccctacgccctgtacgcccagggccaggagggcagaggcgcctacagcagagaggcctaccacctgcccatgcccatggccgccgagcccctgcccagcagcagcgtgagcggcgaggaggccagactgccccccagagaggaggccgagctggccgagggcaagaccctgcccaccgccggcaccgtgggcagagtgctggccatgctggtgcaggagatgaagagcatcatgcagagagacctgaacagaaagatggtggagaacgtggccttcggcgccttcgaccagtggtgggagagcaaggaggagaaggccaagcccttccagaacgccgccaagcagcaggccaaggaggaggacaaggagaagaccaagctgaaggagcccggcctgctgagcctggtggactgggccaagagcggcggcaccaccggcatcgaggccttcgccttcggcagcggcctgagaggcgccctgagactgcccagcttcaaggtgaagagaaaggagcccagcgagatcagcgaggccagcgaggagaagagacccagacccagcacccccgccgaggaggacgaggacgaccccgagcaggagaaggaggccggcgagcccggcagacccggcaccaagccccccaagagagacgaggagagaggcaagacccagggcaagcacagaaagagcttcgccctggacagcgagggcgaggaggccagccaggagagcagcagcgagaaggacgaggaggacgacgaggaggacgaggaggacgaggacagagaggaggccgtggacaccaccaagaaggagaccgaggtgagcgacggcgaggacgaggagagcgacagcagcagcaagtgcagcctgtacgccgacagcgacggcgagaacgacagcaccagcgacagcgagagcagcagcagcagcagcagcagcagcagcagcagcagcagcagcagcagcagcagcagcagcagcagcagcgagagcagcagcgaggacgaggaggaggaggagagacccgccgccctgcccagcgccagccccccccccagagaggtgcccgtgcccacccccgcccccgtggaggtgcccgtgcccgagagagtggccggcagccccgtgacccccctgcccgagcaggaggccagccccgccagacccgccggccccaccgaggagagcccccccagcgcccccctgagaccccccgagccccccgccggcccccccgcccccgcccccagacccgacgagagacccagcagccccatccccctgctgcccccccccaagaagagaagaaagaccgtgagcttcagcgccatcgaggtggtgcccgcccccgagcccccccccgccacccccccccaggccaagttccccggccccgccagcagaaaggcccccagaggcgtggagagaaccatcagaaacctgcccctggaccacgccagcctggtgaagagctggcccgaggaggtgagcagaggcggcagaagcagagccggcggcagaggcagactgaccgaggaggaggaggccgagcccggcaccgaggtggacctggccgtgctggccgacctggccctgacccccgccagaagaggcctgcccgccctgcccgccgtggaggacagcgaggccaccgagaccagcgacgaggccgagagacccagacccctgctgagccacatcctgctggagcacaactacgccctggccgtgaagcccaccccccccgcccccgccctgagaccccccgagcccgtgcccgcccccgccgccctgttcagcagccccgccgacgaggtgctggaggcccccgaggtggtggtggccgaggccgaggagcccaagccccagcagctgcagcagcagagagaggagggcgaggaggagggcgaggaggagggcgaggaggaggaggaggagagcagcgacagcagcagcagcagcgacggcgagggcgccctgagaagaagaagcctgagaagccacgccagaagaagaagaccccccccccccccccccccccccccccccagagcctacgagcccagaagcgagttcgagcagatgaccatcctgtacgacatctggaacagcggcctggacagcgaggacatgagctacctgagactgacctacgagagactgctgcagcagaccagcggcgccgactggctgaacgacacccactgggtgcaccacaccatcaccaacctgaccacccccaagagaaagagaagaccccaggacggccccagagagcaccagaccggcagcgccagaagcgagggctactaccccatcagcaagaaggagaaggacaagtacctggacgtgtgccccgtgagcgccagacagctggagggcgtggacacccagggcaccaacagagtgctgagcgagagaagaagcgagcagagaagactgctgagcgccatcggcaccagcgccatcatggacagcgacctgctgaagctgaaccagctgaagttcagaaagaagaagctgagattcggcagaagcagaatccacgagtggggcctgttcgccatggagcccatcgccgccgacgagatggtgatcgagtacgtgggccagaacatcagacagatggtggccgacatgagagagaagagatacgtgcaggagggcatcggcagcagctacctgttcagagtggaccacgacaccatcatcgacgccaccaagtgcggcaacctggccagattcatcaaccactgctgcacccccaactgctacgccaaggtgatcaccatcgagagccagaagaagatcgtgatctacagcaagcagcccatcggcgtggacgaggagatcacctacgactacaagttccccctggaggacaacaagatcccctgcctgtgcggcaccgagagctgcagaggcagcctgaactag

SEQ ID NO: 98691 - DNA, 213 bp, synthetic construct
  misc_feature 1..213: note = Description of Artificial Sequence: Synthetic coding sequence
  source 1..213: mol_type = other DNA
atggaccaggagggcggcggcgacggccagaaggcccccagcttccagtggagaaactacaagctgatcgtggaccccgccctggaccccgccctgagaagacccagccagaaggtgtacagatacgacggcgtgcacttcagcgtgaacgacagcaagtacatccccgtggaggacctgcaggaccccagatgccacgtgagaagcaagtag

SEQ ID NO: 98692 - DNA, 744 bp, synthetic construct
  misc_feature 1..744: note = Description of Artificial Sequence: Synthetic coding sequence
  source 1..744: mol_type = other DNA
atggaccaggagggcggcggcgacggccagaaggcccccagcttccagtggagaaactacaagctgatcgtggaccccgccctggaccccgccctgagaagacccagccagaaggtgtacagatacgacggcgtgcacttcagcgtgaacgacagcaagtacatccccgtggaggacctgcaggaccccagatgccacgtgagaagcaagaacagagacttcagcctgcccgtgcccaagttcaagctggacgagttctacatcggccagatccccctgaaggaggtgaccttcgccagactgaacgacaacgtgagagagaccttcctgaaggacatgtgcagaaagtacggcgaggtggaggaggtggagatcctgctgcaccccagaaccagaaagcacctgggcctggccagagtgctgttcaccagcaccagaggcgccaaggagaccgtgaagaacctgcacctgaccagcgtgatgggcaacatcatccacgcccagctggacatcaagggccagcagagaatgaagtactacgagctgatcgtgaacggcagctacaccccccagaccgtgcccaccggcggcaaggccctgagcgagaagttccagggcagcggcgccgccaccgagaccgccgagagcagaagaagaagcagcagcgacaccgccgcctaccccgccggcaccaccgccgtgggcacccccggcaacggcaccccctgcagccaggacacctag

SEQ ID NO: 98693 - DNA, 5772 bp, synthetic construct
  misc_feature 1..5772: note = Description of Artificial Sequence: Synthetic coding sequence
  source 1..5772: mol_type = other DNA
atggagaacagccaccccccccaccaccaccaccagcagccccccccccagcccggccccagcggcgagagaagaaaccaccactggagaagctacaagctgatgatcgaccccgccctgaagaagggccaccacaagctgtacagatacgacggccagcacttcagcctggccatgagcagcaacagacccgtggagatcgtggaggaccccagagtggtgggcatctggaccaagaacaaggagctggagctgagcgtgcccaagttcaagatcgacgagttctacgtgggccccgtgccccccaagcaggtgaccttcgccaagctgaacgacaacatcagagagaacttcctgagagacatgtgcaagaagtacggcgaggtggaggaggtggagatcctgtacaaccccaagaccaagaagcacctgggcatcgccaaggtggtgttcgccaccgtgagaggcgccaaggacgccgtgcagcacctgcacagcaccagcgtgatgggcaacatcatccacgtggagctggacaccaagggcgagaccagaatgagattctacgagctgctggtgaccggcagatacaccccccagaccctgcccgtgggcgagctggacgccgtgagccccatcgtgaacgagaccctgcagctgagcgacgccctgaagagactgaaggacggcggcctgagcgccggctgcggcagcggcagcagcagcgtgacccccaacagcggcggcacccccttcagccaggacaccgcctacagcagctgcagactggacacccccaacagctacggccagggcacccccctgacccccagactgggcacccccttcagccaggacagcagctacagcagcagacagcccacccccagctacctgttcagccaggaccccgccgtgaccttcaaggccagaagacacgagagcaagttcaccgacgcctacaacagaagacacgagcaccactacgtgcacaacagccccgccgtgaccgccgtggccggcgccaccgccgccttcagaggcagcagcgacctgcccttcggcgccgtgggcggcaccggcggcagcagcggcccccccttcaaggcccagccccaggacagcgccaccttcgcccacacccccccccccgcccaggccacccccgcccccggcttcaagagcgccttcagcccctaccagacccccgtggcccacttcccccccccccccgaggagcccaccgccaccgccgccttcggcgccagagacagcggcgagttcagaagagcccccgcccccccccccctgccccccgccgagcccctggccaaggagaagcccggcaccccccccggcccccccccccccgacaccaacagcatggagctgggcggcagacccaccttcggctggagccccgagccctgcgacagccccggcacccccaccctggagagcagccccgccggccccgagaagccccacgacagcctggacagcagaatcgagatgctgctgaaggagcagagaaccaagctgctgttcctgagagagcccgacagcgacaccgagctgcagatggagggcagccccatcagcagcagcagcagccagctgagccccctggcccccttcggcaccaacagccagcccggcttcagaggccccaccccccccagcagcagacccagcagcaccggcctggaggacatcagccccacccccctgcccgacagcgacgaggacgaggagctggacctgggcctgggccccagacccccccccgagcccggcccccccgaccccgccggcctgctgagccagaccgccgaggtggccctggacctggtgggcgacagaacccccaccagcgagaagatggacgagggccagcagagcagcggcgaggacatggagatcagcgacgacgagatgcccagcgcccccatcaccagcgccgactgccccaagcccatggtggtgacccccggcgccgccgccgtggccgcccccagcgtgctggcccccaccctgcccctgccccccccccccggcttcccccccctgccccccccccccccccccccccccccccagcccggcttccccatgcccccccccctgcccccccccccccccccccccccccccgcccaccccgccgtgaccgtgccccccccccccctgcccgccccccccggcgtgccccccccccccatcctgccccccctgccccccttcccccccggcctgttccccgtgatgcaggtggacatgagccacgtgctgggcggccagtggggcggcatgcccatgagcttccagatgcagacccaggtgctgagcagactgatgaccggccagggcgcctgcccctacccccccttcatggccgccgccgccgccgccgccagcgccggcctgcagttcgtgaacctgcccccctacagaggccccttcagcctgagcaacagcggccccggcagaggccagcactggccccccctgcccaagttcgaccccagcgtgcccccccccggctacatgcccagacaggaggacccccacaaggccaccgtggacggcgtgctgctggtggtgctgaaggagctgaaggccatcatgaagagagacctgaacagaaagatggtggaggtggtggccttcagagccttcgacgagtggtgggacaagaaggagagaatggccaaggccagcctgacccccgtgaagagcggcgagcacaaggacgaggacagacccaagcccaaggacagaatcgccagctgcctgctggagagctggggcaagggcgagggcctgggctacgagggcctgggcctgggcatcggcctgagaggcgccatcagactgcccagcttcaaggtgaagagaaaggagccccccgacaccaccagcagcggcgaccagaagagactgagacccagcaccagcgtggacgaggaggacgaggagagcgagagagagagagacagagacatggccgacaccccctgcgagctggccaagagagaccccaagggcgtgggcgtgagaagaagacccgccagacccctggagctggacagcggcggcgaggaggacgagaaggagagcctgagcgaggagcaggagagcaccgaggaggaggaggaggccgaggaggaggaggaggaggaggacgacgacgacgacgacagcgacgacagagacgagagcgagaacgacgacgaggacaccgccctgagcgaggccagcgagaaggacgagggcgacagcgacgaggaggagaccgtgagcatcgtgaccagcaaggccgaggccaccagcagcagcgagagcagcgagagcagcgagttcgagagcagcagcgagagcagccccagcagcagcgaggacgaggaggaggtggtggccagagaggaggaggaggaggaggaggaggaggagatggtggccgaggagagcatggccagcgccggccccgaggacttcgagcaggacggcgaggaggccgccctggcccccggcgcccccgccgtggacagcctgggcatggaggaggaggtggacatcgagaccgaggccgtggcccccgaggagagacccagcatgctggacgagccccccctgcccgtgggcgtggaggagcccgccgacagcagagagccccccgaggagcccggcctgagccaggagggcgccatgctgctgagccccgagccccccgccaaggaggtggaggccagaccccccctgagccccgagagagcccccgagcacgacctggaggtggagcccgagccccccatgatgctgcccctgcccctgcagccccccctgcccccccccagaccccccagaccccccagccccccccccgagcccgagaccaccgacgccagccaccccagcgtgccccccgagcccctggccgaggaccaccccccccacacccccggcctgtgcggcagcctggccaagagccagagcaccgagaccgtgcccgccacccccggcggcgagccccccctgagcggcggcagcagcggcctgagcctgagcagcccccaggtgcccggcagccccttcagctaccccgcccccagccccagcctgagcagcggcggcctgcccagaacccccggcagagacttcagcttcacccccaccttcagcgagcccagcggccccctgctgctgcccgtgtgccccctgcccaccggcagaagagacgagagaagcggccccctggccagccccgtgctgctggagaccggcctgcccctgcccctgcccctgcccctgcccctgcccctggccctgcccgccgtgctgagagcccaggccagagcccccacccccctgccccccctgctgcccgcccccctggccagctgccccccccccatgaagagaaagcccggcagacccagaagaagcccccccagcatgctgagcctggacggccccctggtgagaccccccgccggcgccgccctgggcagagagctgctgctgctgcccggccagccccagacccccgtgttccccagcacccacgaccccagaaccgtgaccctggacttcagaaacgccggcatccccgccccccccccccccctgcccccccagcccccccccccccccccccccccccccgtggagcccaccaagctgcccttcaaggagctggacaaccagtggcccagcgaggccatcccccccggccccagaggcagagacgaggtgaccgaggagtacatggagctggccaagagcagaggcccctggagaagaccccccaagaagagacacgaggacctggtgccccccgccggcagccccgagctgagccccccccagcccctgttcagacccagaagcgagttcgaggagatgaccatcctgtacgacatctggaacggcggcatcgacgaggaggacatcagattcctgtgcgtgacctacgagagactgctgcagcaggacaacggcatggactggctgaacgacaccctgtgggtgtaccaccccagcaccagcctgagcagcgccaagaagaagaagagagacgacggcatcagagagcacgtgaccggctgcgccagaagcgagggcttctacaccatcgacaagaaggacaagctgagatacctgaacagcagcagagccagcaccgacgagccccccgccgacacccagggcatgagcatccccgcccagccccacgccagcaccagagccggcagcgagagaagaagcgagcagagaagactgctgagcagcttcaccggcagctgcgacagcgacctgctgaagttcaaccagctgaagttcagaaagaagaagctgaagttctgcaagagccacatccacgactggggcctgttcgccatggagcccatcgccgccgacgagatggtgatcgagtacgtgggccagaacatcagacaggtgatcgccgacatgagagagaagagatacgaggacgagggcatcggcagcagctacatgttcagagtggaccacgacaccatcatcgacgccaccaagtgcggcaacttcgccagattcatcaaccacagctgcaaccccaactgctacgccaaggtgatcaccgtggagagccagaagaagatcgtgatctacagcaagcagcacatcaacgtgaacgaggagatcacctacgactacaagttccccatcgaggacgtgaagatcccctgcctgtgcggcagcgagaactgcagaggcaccctgaactag

SEQ ID NO: 98694 - DNA, 5772 bp, synthetic construct; identical to SEQ ID NO: 98693
  misc_feature 1..5772: note = Description of Artificial Sequence: Synthetic coding sequence
  source 1..5772: mol_type = other DNA

SEQ ID NO: 98695 - DNA, 7695 bp, synthetic construct
  misc_feature 1..7695: note = Description of Artificial Sequence: Synthetic coding sequence
  source 1..7695: mol_type = other DNA
atgaagcagctgcagccccagcccccccccaagatgggcgacttctacgaccccgagcaccccacccccgaggaggaggagaacgaggccaagatcgagaacgtgcagaagaccggcttcatcaagggccccatgttcaagggcgtggccagcagcagattcctgcccaagggcaccaagaccaaggtgaacctggaggagcagggcagacagaaggtgagcttcagcttcagcctgaccaagaagaccctgcagaacagattcctgaccgccctgggcaacgagaagcagagcgacacccccaacccccccgccgtgcccctgcaggtggacagcacccccaagatgaagatggagatcggcgacaccctgagcaccgccgaggagagcagcccccccaagagcagagtggagctgggcaagatccacttcaagaagcacctgctgcacgtgaccagcagacccctgctggccaccaccaccgccgtggccagcccccccacccacgccgcccccctgcccgccgtgatcgccgagagcaccaccgtggacagcccccccagcagccccccccccccccccccccccgcccaggccaccaccctgagcagccccgcccccgtgaccgagcccgtggccctgccccacacccccatcaccgtgctgatggccgcccccgtgcccctgcccgtggacgtggccgtgagaagcctgaaggagccccccatcatcatcgtgcccgagagcctggaggccgacaccaagcaggacaccatcagcaacagcctggaggagcacgtgacccagatcctgaacgagcaggccgacatcagcagcaagaaggaggacagccacatcggcaaggacgaggagatccccgacagcagcaagatcagcctgagctgcaagaagaccggcagcaagaagaagagcagccagagcgagggcatcttcctgggcagcgagagcgacgaggacagcgtgagaaccagcagcagccagagaagccacgacctgaagttcagcgccagcatcgagaaggagagagacttcaagaagagcagcgcccccctgaagagcgaggacctgggcaagcccagcagaagcaagaccgacagagacgacaagtacttcagctacagcaagctggagagagacaccagatacgtgagcagcagatgcagaagcgagagagagagaagaagaagcagaagccacagcagaagcgagagaggcagcagaaccaacctgagctacagcagaagcgagagaagccactactacgacagcgacagaagataccacagaagcagcccctacagagagagaaccagatacagcagaccctacaccgacaacagagccagagagagcagcgacagcgaggaggagtacaagaagacctacagcagaagaaccagcagccacagcagcagctacagagacctgagaaccagcagctacagcaagagcgacagagactgcaagaccgagaccagctacctggagatggagagaagaggcaagtacagcagcaagctggagagagagagcaagagaaccagcgagaacgaggccatcaagagatgctgcagcccccccaacgagctgggcttcagaagaggcagcagctacagcaagcacgacagcagcgccagcagatacaagagcaccctgagcaagcccatccccaagagcgacaagttcaagaacagcttctgctgcaccgagctgaacgaggagatcaagcagagccacagcttcagcctgcagaccccctgcagcaagggcagcgagctgagaatgatcaacaagaaccccgagagagagaaggccggcagccccgcccccagcaacagactgaacgacagccccaccctgaagaagctggacgagctgcccatcttcaagagcgagttcatcacccacgacagccacgacagcatcaaggagctggacagcctgagcaaggtgaagaacgaccagctgagaagcttctgccccatcgagctgaacatcaacggcagccccggcgccgagagcgacctggccaccttctgcaccagcaagaccgacgccgtgctgatgaccagcgacgacagcgtgaccggcagcgagctgagccccctggtgaaggcctgcatgctgagcagcaacggcttccagaacatcagcagatgcaaggagaaggacctggacgacacctgcatgctgcacaagaagagcgagagccccttcagagagaccgagcccctggtgagcccccaccaggacaagctgatgagcatgcccgtgatgaccgtggactacagcaagaccgtggtgaaggagcccgtggacaccagagtgagctgctgcaagaccaaggacagcgacatctactgcaccctgaacgacagcaaccccagcctgtgcaacagcgaggccgagaacatcgagcccagcgtgatgaagatcagcagcaacagcttcatgaacgtgcacctggagagcaagcccgtgatctgcgacagcagaaacctgaccgaccacagcaagttcgcctgcgaggagtacaagcagagcatcggcagcaccagcagcgccagcgtgaaccacttcgacgacctgtaccagcccatcggcagcagcggcatcgccagcagcctgcagagcctgccccccggcatcaaggtggacagcctgaccctgctgaagtgcggcgagaacaccagccccgtgctggacgccgtgctgaagagcaagaagagcagcgagttcctgaagcacgccggcaaggagaccatcgtggaggtgggcagcgacctgcccgacagcggcaagggcttcgccagcagagagaacagaagaaacaacggcctgagcggcaagtgcctgcaggaggcccaggaggagggcaacagcatcctgcccgagagaagaggcagacccgagatcagcctggacgagagaggcgagggcggccacgtgcacaccagcgacgacagcgaggtggtgttcagcagctgcgacctgaacctgaccatggaggacagcgacggcgtgacctacgccctgaagtgcgacagcagcggccacgcccccgagatcgtgagcaccgtgcacgaggactacagcggcagcagcgagagcagcaacgacgagagcgacagcgaggacaccgacagcgacgacagcagcatccccagaaacagactgcagagcgtggtggtggtgcccaagaacagcaccctgcccatggaggagaccagcccctgcagcagcagaagcagccagagctacagacactacagcgaccactgggaggacgagagactggagagcagaagacacctgtacgaggagaagttcgagagcatcgccagcaaggcctgcccccagaccgacaagttcttcctgcacaagggcaccgagaagaaccccgagatcagcttcacccagagcagcagaaagcagatcgacaacagactgcccgagctgagccacccccagagcgacggcgtggacagcaccagccacaccgacgtgaagagcgaccccctgggccaccccaacagcgaggagaccgtgaaggccaagatccccagcagacagcaggaggagctgcccatctacagcagcgacttcgaggacgtgcccaacaagagctggcagcagaccaccttccagaacagacccgacagcagactgggcaagaccgagctgagcttcagcagcagctgcgagatcccccacgtggacggcctgcacagcagcgaggagctgagaaacctgggctgggacttcagccaggagaagcccagcaccacctaccagcagcccgacagcagctacggcgcctgcggcggccacaagtaccagcagaacgccgagcagtacggcggcaccagagactactggcagggcaacggctactgggaccccagaagcggcagaccccccggcaccggcgtggtgtacgacagaacccagggccaggtgcccgacagcctgaccgacgacagagaggaggaggagaactgggaccagcaggacggcagccacttcagcgaccagagcgacaagttcctgctgagcctgcagaaggacaagggcagcgtgcaggcccccgagatcagcagcaacagcatcaaggacaccctggccgtgaacgagaagaaggacttcagcaagaacctggagaagaacgacatcaaggacagaggccccctgaagaagagaagacaggagatcgagagcgacagcgagagcgacggcgagctgcaggacagaaagaaggtgagagtggaggtggagcagggcgagaccagcgtgccccccggcagcgccctggtgggccccagctgcgtgatggacgacttcagagacccccagagatggaaggagtgcgccaagcagggcaagatgccctgctacttcgacctgatcgaggagaacgtgtacctgaccgagagaaagaagaacaagagccacagagacatcaagagaatgcagtgcgagtgcacccccctgagcaaggacgagagagcccagggcgagatcgcctgcggcgaggactgcctgaacagactgctgatgatcgagtgcagcagcagatgccccaacggcgactactgcagcaacagaagattccagagaaagcagcacgccgacgtggaggtgatcctgaccgagaagaagggctggggcctgagagccgccaaggacctgcccagcaacaccttcgtgctggagtactgcggcgaggtgctggaccacaaggagttcaaggccagagtgaaggagtacgccagaaacaagaacatccactactacttcatggccctgaagaacgacgagatcatcgacgccacccagaagggcaactgcagcagattcatgaaccacagctgcgagcccaactgcgagacccagaagtggaccgtgaacggccagctgagagtgggcttcttcaccaccaagctggtgcccagcggcagcgagctgaccttcgactaccagttccagagatacggcaaggaggcccagaagtgcttctgcggcagcgccaactgcagaggctacctgggcggcgagaacagagtgagcatcagagccgccggcggcaagatgaagaaggagagaagcagaaagaaggacagcgtggacggcgagctggaggccctgatggagaacggcgagggcctgagcgacaagaaccaggtgctgagcctgagcagactgatggtgagaatcgagaccctggagcagaagctgacctgcctggagctgatccagaacacccacagccagagctgcctgaagagcttcctggagagacacggcctgagcctgctgtggatctggatggccgagctgggcgacggcagagagagcaaccagaagctgcaggaggagatcatcaagaccctggagcacctgcccatccccaccaagaacatgctggaggagagcaaggtgctgcccatcatccagagatggagccagaccaagaccgccgtgccccccctgagcgagggcgacggctacagcagcgagaacaccagcagagcccacacccccctgaacacccccgaccccagcaccaagctgagcaccgaggccgacaccgacacccccaagaagctgatgttcagaagactgaagatcatcagcgagaacagcatggacagcgccatcagcgacgccaccagcgagctggagggcaaggacggcaaggaggacctggaccagctggagaacgtgcccgtggaggaggaggaggagctgcagagccagcagctgctgccccagcagctgcccgagtgcaaggtggacagcgagaccaacatcgaggccagcaagctgcccaccagcgagcccgaggccgacgccgagatcgagcccaaggagagcaacggcaccaagctggaggagcccatcaacgaggagacccccagccaggacgaggaggagggcgtgagcgacgtggagagcgagagaagccaggagcagcccgacaagaccgtggacatcagcgacctggccaccaagctgctggacagctggaaggacctgaaggaggtgtacagaatccccaagaagagccagaccgagaaggagaacaccaccaccgagagaggcagagacgccgtgggcttcagagaccagacccccgcccccaagacccccaacagaagcagagagagagaccccgacaagcagacccagaacaaggagaagagaaagagaagaagcagcctgagcccccccagcagcgcctacgagagaggcaccaagagacccgacgacagatacgacacccccaccagcaagaagaaggtgagaatcaaggacagaaacaagctgagcaccgaggagagaagaaagctgttcgagcaggaggtggcccagagagaggcccagaagcagcagcagcagatgcagaacctgggcatgaccagccccctgccctacgacagcctgggctacaacgccccccaccaccccttcgccggctacccccccggctaccccatgcaggcctacgtggaccccagcaaccccaacgccggcaaggtgctgctgcccacccccagcatggaccccgtgtgcagccccgccccctacgaccacgcccagcccctggtgggccacagcaccgagcccctgagcgcccccccccccgtgcccgtggtgccccacgtggccgcccccgtggaggtgagcagcagccagtacgtggcccagagcgacggcgtggtgcaccaggacagcagcgtggccgtgctgcccgtgcccgcccccggccccgtgcagggccagaactacagcgtgtgggacagcaaccagcagagcgtgagcgtgcagcagcagtacagccccgcccagagccaggccaccatctactaccagggccagacctgccccaccgtgtacggcgtgaccagcccctacagccagaccaccccccccatcgtgcagagctacgcccagcccagcctgcagtacatccagggccagcagatcttcaccgcccacccccagggcgtggtggtgcagcccgccgccgccgtgaccaccatcgtggcccccggccagccccagcccctgcagcccagcgagatggtggtgaccaacaacctgctggacctgcccccccccagcccccccaagcccaagaccatcgtgctgccccccaactggaagaccgccagagaccccgagggcaagatctactactaccacgtgatcaccagacagacccagtgggacccccccacctgggagagccccggcgacgacgccagcctggagcacgaggccgagatggacctgggcacccccacctacgacgagaaccccatgaaggccagcaagaagcccaagaccgccgaggccgacaccagcagcgagctggccaagaagagcaaggaggtgttcagaaaggagatgagccagttcatcgtgcagtgcctgaacccctacagaaagcccgactgcaaggtgggcagaatcaccaccaccgaggacttcaagcacctggccagaaagctgacccacggcgtgatgaacaaggagctgaagtactgcaagaaccccgaggacctggagtgcaacgagaacgtgaagcacaagaccaaggagtacatcaagaagtacatgcagaagttcggcgccgtgtacaagcccaaggaggacaccgagctggagtag

SEQ ID NO: 98696 - DNA, 7695 bp, synthetic construct
  misc_feature 1..7695: note = Description of Artificial Sequence: Synthetic coding sequence
  source 1..7695: mol_type = other DNA
atgaagcagctgcagccccagcccccccccaagatgggcgacttctacgaccccgagcaccccacccccgaggagcaggagcccgaggccaagatcgagaacgtgcagaagaccggcttcatcaagggccccatgttcaagggcgtggccagcagcagattcctgcccaagggcaccaagaccaaggtgaacctggaggagcagggcagacagaaggtgagcttcagcttcagcctgaccaagaagaccctgcagaacagattcctgaccgccctgggcaacgagaagcagagcgacacccccaacccccccgccgtgcccctgcaggtggacagcacccccaagatgaagatggagatcggcgacaccctgagcaccgccgaggagagcagcccccccaagagcagagtggagctgggcaagatccacttcaagaagcacctgctgcacgtgaccagcagacccctgctggccaccaccaccgccgtggccagcccccccacccacgccgcccccctgcccgccgtgatcgccgagagcaccaccgtggacagcccccccagcagccccccccccccccccccccccgcccaggccaccaccctgagcagccccgcccccgtgaccgagcccgtggccctgccccacacccccatcaccgtgctgatggccgcccccgtgcccctgcccgtggacgtggccgtgagaagcctgaaggagccccccatcatcatcgtgcccgagagcctggaggccgacaccaagcaggacaccatcagcaacagcctggaggagcacgtgacccagatcctgaacgagcaggccgacatcagcagcaagaaggaggacagccacatcggcaaggacgaggagatccccgacagcagcaagatcagcctgagctgcaagaagaccggcagcaagaagaagagcagccagagcgagggcatcttcctgggcagcgagagcgacgaggacagcgtgagaaccagcagcagccagagaagccacgacctgaagttcagcgccagcatcgagaaggagagagacttcaagaagagcagcgcccccctgaagagcgaggacctgggcaagcccagcagaagcaagaccgacagagacgacaagtacttcagctacagcaagctggagagagacaccagatacgtgagcagcagatgcagaagcgagagagagagaagaagaagcagaagccacagcagaagcgagagaggcagcagaaccaacctgagctacagcagaagcgagagaagccactactacgacagcgacagaagataccacagaagcagcccctacagagagagaaccagatacagcagaccctacaccgacaacagagccagagagagcagcgacagcgaggaggagtacaagaagacctacagcagaagaaccagcagccacagcagcagctacagagacctgagaaccagcagctacagcaagagcgacagagactgcaagaccgagaccagctacctggagatggagagaagaggcaagtacagcagcaagctggagagagagagcaagagaaccagcgagaacgaggccatcaagagatgctgcagcccccccaacgagctgggcttcagaagaggcagcagctacagcaagcacgacagcagcgccagcagatacaagagcaccctgagcaagcccatccccaagagcgacaagttcaagaacagcttctgctgcaccgagctgaacgaggagatcaagcagagccacagcttcagcctgcagaccccctgcagcaagggcagcgagctgagaatgatcaacaagaaccccgagagagagaaggccggcagccccgcccccagcaacagactgaacgacagccccaccctgaagaagctggacgagctgcccatcttcaagagcgagttcatcacccacgacagccacgacagcatcaaggagctggacagcctgagcaaggtgaagaacgaccagctgagaagcttctgccccatcgagctgaacatcaacggcagccccggcgccgagagcgacctggccaccttctgcaccagcaagaccgacgccgtgctgatgaccagcgacgacagcgtgaccggcagcgagctgagccccctggtgaaggcctgcatgctgagcagcaacggcttccagaacatcagcagatgcaaggagaaggacctggacgacacctgcatgctgcacaagaagagcgagagccccttcagagagaccgagcccctggtgagcccccaccaggacaagctgatgagcatgcccgtgatgaccgtggactacagcaagaccgtggtgaaggagcccgtggacaccagagtgagctgctgcaagaccaaggacagcgacatctactgcaccctgaacgacagcaaccccagcctgtgcaacagcgaggccgagaacatcgagcccagcgtgatgaagatcagcagcaacagcttcatgaacgtgcacctggagagcaagcccgtgatctgcgacagcagaaacctgaccgaccacagcaagttcgcctgcgaggagtacaagcagagcatcggcagcaccagcagcgccagcgtgaaccacttcgacgacctgtaccagcccatcggcagcagcggcatcgccagcagcctgcagagcctgccccccggcatcaaggtggacagcctgaccctgctgaagtgcggcgagaacaccagccccgtgctggacgccgtgctgaagagcaagaagagcagcgagttcctgaagcacgccggcaaggagaccatcgtggaggtgggcagcgacctgcccgacagcggcaagggcttcgccagcagagagaacagaagaaacaacggcctgagcggcaagtgcctgcaggaggcccaggaggagggcaacagcatcctgcccgagagaagaggcagacccgagatcagcctggacgagagaggcgagggcggccacgtgcacaccagcgacgacagcgaggtggtgttcagcagctgcgacctgaacctgaccatggaggacagcgacggcgtgacctacgccctgaagtgcgacagcagcggccacgcccccgagatcgtgagcaccgtgcacgaggactacagcggcagcagcgagagcagcaacgacgagagcgacagcgaggacaccgacagcgacgacagcagcatccccagaaacagactgcagagcgtggtggtggtgcccaagaacagcaccctgcccatggaggagaccagcccctgcagcagcagaagcagccagagctacagacactacagcgaccactgggaggacgagagactggagagcagaagacacctgtacgaggagaagttcgagagcatcgccagcaaggcctgcccccagaccgacaagttcttcctgcacaagggcaccgagaagaaccccgagatcagcttcacccagagcagcagaaagcagatcgacaacagactgcccgagctgagccacccccagagcgacggcgtggacagcaccagccacaccgacgtgaagagcgaccccctgggccaccccaacagcgaggagaccgtgaaggccaagatccccagcagacagcaggaggagctgcccatctacagcagcgacttcgaggacgtgcccaacaagagctggcagcagaccaccttccagaacagacccgacagcagactgggcaagaccgagctgagcttcagcagcagctgcgagatcccccacgtggacggcctgcacagcagcgaggagctgagaaacctgggctgggacttcagccaggagaagcccagcaccacctaccagcagcccgacagcagctacggcgcctgcggcggccacaagtaccagcagaacgccgagcagtacggcggcaccagagactactggcagggcaacggctactgggaccccagaagcggcagaccccccggcaccggcgtggtgtacgacagaacccagggccaggtgcccgacagcctgaccgacgacagagaggaggaggagaactgggaccagcaggacggcagccacttcagcgaccagagcgacaagttcctgctgagcctgcagaaggacaagggcagcgtgcaggcccccgagatcagcagcaacagcatcaaggacaccctggccgtgaacgagaagaaggacttcagcaagaacctggagaagaacgacatcaaggacagaggccccctgaagaagagaagacaggagatcgagagcgacagcgagagcgacggcgagctgcaggacagaaagaaggtgagagtggaggtggagcagggcgagaccagcgtgccccccggcagcgccctggtgggccccagctgcgtgatggacgacttcagagacccccagagatggaaggagtgcgccaagcagggcaagatgccctgctacttcgacctgatcgaggagaacgtgtacctgaccgagagaaagaagaacaagagccacagagacatcaagagaatgcagtgcgagtgcacccccctgagcaaggacgagagagcccagggcgagatcgcctgcggcgaggactgcctgaacagactgctgatgatcgagtgcagcagcagatgccccaacggcgactactgcagcaacagaagattccagagaaagcagcacgccgacgtggaggtgatcctgaccgagaagaagggctggggcctgagagccgccaaggacctgcccagcaacaccttcgtgctggagtactgcggcgaggtgctggaccacaaggagttcaaggccagagtgaaggagtacgccagaaacaagaacatccactactacttcatggccctgaagaacgacgagatcatcgacgccacccagaagggcaactgcagcagattcatgaaccacagctgcgagcccaactgcgagacccagaagtggaccgtgaacggccagctgagagtgggcttcttcaccaccaagctggtgcccagcggcagcgagctgaccttcgactaccagttccagagatacggcaaggaggcccagaagtgcttctgcggcagcgccaactgcagaggctacctgggcggcgagaacagagtgagcatcagagccgccggcggcaagatgaagaaggagagaagcagaaagaaggacagcgtggacggcgagctggaggccctgatggagaacggcgagggcctgagcgacaagaaccaggtgctgagcctgagcagactgatggtgagaatcgagaccctggagcagaagctgacctgcctggagctgatccagaacacccacagccagagctgcctgaagagcttcctggagagacacggcctgagcctgctgtggatctggatggccgagctgggcgacggcagagagagcaaccagaagctgcaggaggagatcatcaagaccctggagcacctgcccatccccaccaagaacatgctggaggagagcaaggtgctgcccatcatccagagatggagccagaccaagaccgccgtgccccccctgagcgagggcgacggctacagcagcgagaacaccagcagagcccacacccccctgaacacccccgaccccagcaccaagctgagcaccgaggccgacaccgacacccccaagaagctgatgttcagaagactgaagatcatcagcgagaacagcatggacagcgccatcagcgacgccaccagcgagctggagggcaaggacggcaaggaggacctggaccagctggagaacgtgcccgtggaggaggaggaggagctgcagagccagcagctgctgccccagcagctgcccgagtgcaaggtggacagcgagaccaacatcgaggccagcaagctgcccaccagcgagcccgaggccgacgccgagatcgagcccaaggagagcaacggcaccaagctggaggagcccatcaacgaggagacccccagccaggacgaggaggagggcgtgagcgacgtggagagcgagagaagccaggagcagcccgacaagaccgtggacatcagcgacctggccaccaagctgctggacagctggaaggacctgaaggaggtgtacagaatccccaagaagagccagaccgagaaggagaacaccaccaccgagagaggcagagacgccgtgggcttcagagaccagacccccgcccccaagacccccaacagaagcagagagagagaccccgacaagcagacccagaacaaggagaagagaaagagaagaagcagcctgagcccccccagcagcgcctacgagagaggcaccaagagacccgacgacagatacgacacccccaccagcaagaagaaggtgagaatcaaggacagaaacaagctgagcaccgaggagagaagaaagctgttcgagcaggaggtggcccagagagaggcccagaagcagcagcagcagatgcagaacctgggcatgaccagccccctgccctacgacagcctgggctacaacgccccccaccaccccttcgccggctacccccccggctaccccatgcaggcctacgtggaccccagcaaccccaacgccggcaaggtgctgctgcccacccccagcatggaccccgtgtgcagccccgccccctacgaccacgcccagcccctggtgggccacagcaccgagcccctgagcgcccccccccccgtgcccgtggtgccccacgtggccgcccccgtggaggtgagcagcagccagtacgtggcccagagcgacggcgtggtgcaccaggacagcagcgtggccgtgctgcccgtgcccgcccccggccccgtgcagggccagaactacagcgtgtgggacagcaaccagcagagcgtgagcgtgcagcagcagtacagccccgcccagagccaggccaccatctactaccagggccagacctgccccaccgtgtacggcgtgaccagcccctacagccagaccaccccccccatcgtgcagagctacgcccagcccagcctgcagtacatccagggccagcagatcttcaccgcccacccccagggcgtggtggtgcagcccgccgccgccgtgaccaccatcgtggcccccggccagccccagcccctgcagcccagcgagatggtggtgaccaacaacctgctggacctgcccccccccagcccccccaagcccaagaccatcgtgctgccccccaactggaagaccgccagagaccccgagggcaagatctactactaccacgtgatcaccagacagacccagtgggacccccccacctgggagagccccggcgacgacgccagcctggagcacgaggccgagatggacctgggcacccccacctacgacgagaaccccatgaaggccagcaagaagcccaagaccgccgaggccgacaccagcagcgagctggccaagaagagcaaggaggtgttcagaaaggagatgagccagttcatcgtgcagtgcctgaacccctacagaaagcccgactgcaaggtgggcagaatcaccaccaccgaggacttcaagcacctggccagaaagctgacccacggcgtgatgaacaaggagctgaagtactgcaagaaccccgaggacctggagtgcaacgagaacgtgaagcacaagaccaaggagtacatcaagaagtacatgcagaagttcggcgccgtgtacaagcccaaggaggacaccgagctggagtag

SEQ ID NO: 98697 - DNA, 5145 bp, synthetic construct
  misc_feature 1..5145: note = Description of Artificial Sequence: Synthetic coding sequence
  source 1..5145: mol_type = other DNA
atgaagcagctgcagccccagcccccccccaagatgggcgacttctacgaccccgagcaccccacccccgagaagaaggagagagaggccaagatcgagaacgtgcagaagaccggcttcatcaagggccccatgttcaagggcgtggccagcagcagattcctgcccaagggcaccaagaccaaggtgaacctggaggagcagggcagacagaaggtgagcttcagcttcagcctgaccaagaagaccctgcagaacagattcctgaccgccctgggcaacgagaagcagagcgacacccccaacccccccgccgtgcccctgcaggtggacagcacccccaagatgaagatggagatcggcgacaccctgagcaccgccgaggagagcagcccccccaagagcagagtggagctgggcaagatccacttcaagaagcacctgctgcacgtgaccagcagacccctgctggccaccaccaccgccgtggccagcccccccacccacgccgcccccctgcccgccgtgatcgccgagagcaccaccgtggacagcccccccagcagccccccccccccccccccccccgcccaggccaccaccctgagcagccccgcccccgtgaccgagcccgtggccctgccccacacccccatcaccgtgctgatggccgcccccgtgcccctgcccgtggacgtggccgtgagaagcctgaaggagccccccatcatcatcgtgcccgagagcctggaggccgacaccaagcaggacaccatcagcaacagcctggaggagcacgtgacccagatcctgaacgagcaggccgacatcagcagcaagaaggaggacagccacatcggcaaggacgaggagatccccgacagcagcaagatcagcctgagctgcaagaagaccggcagcaagaagaagagcagccagagcgagggcatcttcctgggcagcgagagcgacgaggacagcgtgagaaccagcagcagccagagaagccacgacctgaagttcagcgccagcatcgagaaggagagagacttcaagaagagcagcgcccccctgaagagcgaggacctgggcaagcccagcagaagcaagaccgacagagacgacaagtacttcagctacagcaagctggagagagacaccagatacgtgagcagcagatgcagaagcgagagagagagaagaagaagcagaagccacagcagaagcgagagaggcagcagaaccaacctgagctacagcagaagcgagagaagccactactacgacagcgacagaagataccacagaagcagcccctacagagagagaaccagatacagcagaccctacaccgacaacagagccagagagagcagcgacagcgaggaggagtacaagaagacctacagcagaagaaccagcagccacagcagcagctacagagacctgagaaccagcagctacagcaagagcgacagagactgcaagaccgagaccagctacctggagatggagagaagaggcaagtacagcagcaagctggagagagagagcaagagaaccagcgagaacgaggccatcaagagatgctgcagcccccccaacgagctgggcttcagaagaggcagcagctacagcaagcacgacagcagcgccagcagatacaagagcaccctgagcaagcccatccccaagagcgacaagttcaagaacagcttctgctgcaccgagctgaacgaggagatcaagcagagccacagcttcagcctgcagaccccctgcagcaagggcagcgagctgagaatgatcaacaagaaccccgagagagagaaggccggcagccccgcccccagcaacagactgaacgacagccccaccctgaagaagctggacgagctgcccatcttcaagagcgagttcatcacccacgacagccacgacagcatcaaggagctggacagcctgagcaaggtgaagaacgaccagctgagaagcttctgccccatcgagctgaacatcaacggcagccccggcgccgagagcgacctggccaccttctgcaccagcaagaccgacgccgtgctgatgaccagcgacgacagcgtgaccggcagcgagctgagccccctggtgaaggcctgcatgctgagcagcaacggcttccagaacatcagcagatgcaaggagaaggacctggacgacacctgcatgctgcacaagaagagcgagagccccttcagagagaccgagcccctggtgagcccccaccaggacaagctgatgagcatgcccgtgatgaccgtggactacagcaagaccgtggtgaaggagcccgtggacaccagagtgagctgctgcaagaccaaggacagcgacatctactgcaccctgaacgacagcaaccccagcctgtgcaacagcgaggccgagaacatcgagcccagcgtgatgaagatcagcagcaacagcttcatgaacgtgcacctggagagcaagcccgtgatctgcgacagcagaaacctgaccgaccacagcaagttcgcctgcgaggagtacaagcagagcatcggcagcaccagcagcgccagcgtgaaccacttcgacgacctgtaccagcccatcggcagcagcggcatcgccagcagcctgcagagcctgccccccggcatcaaggtggacagcctgaccctgctgaagtgcggcgagaacaccagccccgtgctggacgccgtgctgaagagcaagaagagcagcgagttcctgaagcacgccggcaaggagaccatcgtggaggtgggcagcgacctgcccgacagcggcaagggcttcgccagcagagagaacagaagaaacaacggcctgagcggcaagtgcctgcaggaggcccaggaggagggcaacagcatcctgcccgagagaagaggcagacccgagatcagcctggacgagagaggcgagggcggccacgtgcacaccagcgacgacagcgaggtggtgttcagcagctgcgacctgaacctgaccatggaggacagcgacggcgtgacctacgccctgaagtgcgacagcagcggccacgcccccgagatcgtgagcaccgtgcacgaggactacagcggcagcagcgagagcagcaacgacgagagcgacagcgaggacaccgacagcgacgacagcagcatccccagaaacagactgcagagcgtggtggtggtgcccaagaacagcaccctgcccatggaggagaccagcccctgcagcagcagaagcagccagagctacagacactacagcgaccactgggaggacgagagactggagagcagaagacacctgtacgaggagaagttcgagagcatcgccagcaaggcctgcccccagaccgacaagttcttcctgcacaagggcaccgagaagaaccccgagatcagcttcacccagagcagcagaaagcagatcgacaacagactgcccgagctgagccacccccagagcgacggcgtggacagcaccagccacaccgacgtgaagagcgaccccctgggccaccccaacagcgaggagaccgtgaaggccaagatccccagcagacagcaggaggagctgcccatctacagcagcgacttcgaggacgtgcccaacaagagctggcagcagaccaccttccagaacagacccgacagcagactgggcaagaccgagctgagcttcagcagcagctgcgagatcccccacgtggacggcctgcacagcagcgaggagctgagaaacctgggctgggacttcagccaggagaagcccagcaccacctaccagcagcccgacagcagctacggcgcctgcggcggccacaagtaccagcagaacgccgagcagtacggcggcaccagagactactggcagggcaacggctactgggaccccagaagcggcagaccccccggcaccggcgtggtgtacgacagaacccagggccaggtgcccgacagcctgaccgacgacagagaggaggaggagaactgggaccagcaggacggcagccacttcagcgaccagagcgacaagttcctgctgagcctgcagaaggacaagggcagcgtgcaggcccccgagatcagcagcaacagcatcaaggacaccctggccgtgaacgagaagaaggacttcagcaagaacctggagaagaacgacatcaaggacagaggccccctgaagaagagaagacaggagatcgagagcgacagcgagagcgacggcgagctgcaggacagaaagaaggtgagagtggaggtggagcagggcgagaccagcgtgccccccggcagcgccctggtgggccccagctgcgtgatggacgacttcagagacccccagagatggaaggagtgcgccaagcagggcaagatgccctgctacttcgacctgatcgaggagaacgtgtacctgaccgagagaaagaagaacaagagccacagagacatcaagagaatgcagtgcgagtgcacccccctgagcaaggacgagagagcccagggcgagatcgcctgcggcgaggactgcctgaacagactgctgatgatcgagtgcagcagcagatgccccaacggcgactactgcagcaacagaagattccagagaaagcagcacgccgacgtggaggtgatcctgaccgagaagaagggctggggcctgagagccgccaaggacctgcccagcaacaccttcgtgctggagtactgcggcgaggtgctggaccacaaggagttcaaggccagagtgaaggagtacgccagaaacaagaacatccactactacttcatggccctgaagaacgacgagatcatcgacgccacccagaagggcaactgcagcagattcatgaaccacagctgcgagcccaactgcgagacccagaagtggaccgtgaacggccagctgagagtgggcttcttcaccaccaagctggtgcccagcggcagcgagctgaccttcgactaccagttccagagatacggcaaggaggcccagaagtgcttctgcggcagcgccaactgcagaggctacctgggcggcgagaacagagtgagcatcagagccgccggcggcaagatgaagaaggagagaagcagaaagaaggacagctag

SEQ ID NO: 98698 - DNA, 3876 bp, synthetic construct
  misc_feature 1..3876: note = Description of Artificial Sequence: Synthetic coding sequence
  source 1..3876: mol_type = other DNA
atgagcagcctgcccggctgcatcggcctggacgccgccaccgccaccgtggagagcgaggagatcgccgagctgcagcaggccgtggtggaggagctgggcatcagcatggaggagctgagacacttcatcgacgaggagctggagaagatggactgcgtgcagcagagaaagaagcagctggccgagctggagacctgggtgatccagaaggagagcgaggtggcccacgtggaccagctgttcgacgacgccagcagagccgtgaccaactgcgagagcctggtgaaggacttctacagcaagctgggcctgcagtacagagacagcagcagcgaggacgagagcagcagacccaccgagatcatcgagatccccgacgaggacgacgacgtgctgagcatcgacagcggcgacgccggcagcagaacccccaaggaccagaagctgagagaggccatggccgccctgagaaagagcgcccaggacgtgcagaagttcatggacgccgtgaacaagaagagcagcagccaggacctgcacaagggcaccctgagccagatgagcggcgagctgagcaaggacggcgacctgatcgtgagcatgagaatcctgggcaagaagagaaccaagacctggcacaagggcaccctgatcgccatccagaccgtgggccccggcaagaagtacaaggtgaagttcgacaacaagggcaagagcctgctgagcggcaaccacatcgcctacgactaccacccccccgccgacaagctgtacgtgggcagcagagtggtggccaagtacaaggacggcaaccaggtgtggctgtacgccggcatcgtggccgagacccccaacgtgaagaacaagctgagattcctgatcttcttcgacgacggctacgccagctacgtgacccagagcgagctgtaccccatctgcagacccctgaagaagacctgggaggacatcgaggacatcagctgcagagacttcatcgaggagtacgtgaccgcctaccccaacagacccatggtgctgctgaagagcggccagctgatcaagaccgagtgggagggcacctggtggaagagcagagtggaggaggtggacggcagcctggtgagaatcctgttcctggacgacaagagatgcgagtggatctacagaggcagcaccagactggagcccatgttcagcatgaagaccagcagcgccagcgccctggagaagaagcagggccagctgagaaccagacccaacatgggcgccgtgagaagcaagggccccgtggtgcagtacacccaggacctgaccggcaccggcacccagttcaagcccgtggagcccccccagcccaccgccccccccgccccccccttcccccccgccccccccctgagcccccaggccggcgacagcgacctggagagccagctggcccagagcagaaagcaggtggccaagaagagcaccagcttcagacccggcagcgtgggcagcggccacagcagccccaccagccccgccctgagcgagaacgtgagcggcggcaagcccggcatcaaccagacctacagaagccccctgggcagcaccgccagcgcccccgcccccagcgccctgcccgccccccccgccccccccgtgttccacggcatgctggagagagcccccgccgagcccagctacagagcccccatggagaagctgttctacctgccccacgtgtgcagctacacctgcctgagcagagtgagacccatgagaaacgagcagtacagaggcaagaaccccctgctggtgcccctgctgtacgacttcagaagaatgaccgccagaagaagagtgaacagaaagatgggcttccacgtgatctacaagaccccctgcggcctgtgcctgagaaccatgcaggagatcgagagatacctgttcgagaccggctgcgacttcctgttcctggagatgttctgcctggacccctacgtgctggtggacagaaagttccagccctacaagcccttctactacatcctggacatcacctacggcaaggaggacgtgcccctgagctgcgtgaacgagatcgacaccaccccccccccccaggtggcctacagcaaggagagaatccccggcaagggcgtgttcatcaacaccggccccgagttcctggtgggctgcgactgcaaggacggctgcagagacaagagcaagtgcgcctgccaccagctgaccatccaggccaccgcctgcacccccggcggccagatcaaccccaacagcggctaccagtacaagagactggaggagtgcctgcccaccggcgtgtacgagtgcaacaagagatgcaagtgcgaccccaacatgtgcaccaacagactggtgcagcacggcctgcaggtgagactgcagctgttcaagacccagaacaagggctggggcatcagatgcctggacgacatcgccaagggcagcttcgtgtgcatctacgccggcaagatcctgaccgacgacttcgccgacaaggagggcctggagatgggcgacgagtacttcgccaacctggaccacatcgagagcgtggagaacttcaaggagggctacgagagcgacgccccctgcagcagcgacagcagcggcgtggacctgaaggaccaggaggacggcaacagcggcaccgaggaccccgaggagagcaacgacgacagcagcgacgacaacttctgcaaggacgaggacttcagcaccagcagcgtgtggagaagctacgccaccagaagacagaccagaggccagaaggagaacggcctgagcgagaccaccagcaaggacagccacccccccgacctgggccccccccacatccccgtgccccccagcatccccgtgggcggctgcaacccccccagcagcgaggagacccccaagaacaaggtggccagctggctgagctgcaacagcgtgagcgagggcggcttcgccgacagcgacagccacagcagcttcaagaccaacgagggcggcgagggcagagccggcggcagcagaatggaggccgagaaggccagcaccagcggcctgggcatcaaggacgagggcgacatcaagcaggccaagaaggaggacaccgacgacagaaacaagatgagcgtggtgaccgagagcagcagaaactacggctacaaccccagccccgtgaagcccgagggcctgagaagaccccccagcaagaccagcatgcaccagagcagaagactgatggccagcgcccagagcaaccccgacgacgtgctgaccctgagcagcagcaccgagagcgagggcgagagcggcaccagcagaaagcccaccgccggccagaccagcgccaccgccgtggacagcgacgacatccagaccatcagcagcggcagcgagggcgacgacttcgaggacaagaagaacatgaccggccccatgaagagacaggtggccgtgaagagcaccagaggcttcgccctgaagagcacccacggcatcgccatcaagagcaccaacatggccagcgtggacaagggcgagagcgcccccgtgagaaagaacaccagacagttctacgacggcgaggagagctgctacatcatcgacgccaagctggagggcaacctgggcagatacctgaaccacagctgcagccccaacctgttcgtgcagaacgtgttcgtggacacccacgacctgagattcccctgggtggccttcttcgccagcaagagaatcagagccggcaccgagctgacctgggactacaactacgaggtgggcagcgtggagggcaaggagctgctgtgctgctgcggcgccatcgagtgcagaggcagactgctgtag

SEQ ID NO: 98699 - DNA, 1194 bp, synthetic construct
  misc_feature 1..1194: note = Description of Artificial Sequence: Synthetic coding sequence
  source 1..1194: mol_type = other DNA
atgagcagcctgcccggctgcatcggcctggacgccgccaccgccaccgtggagagcgaggagatcgccgagctgcagcaggccgtggtggaggagctgggcatcagcatggaggagctgagacacttcatcgacgaggagctggagaagatggactgcgtgcagcagagaaagaagcagctggccgagctggagacctgggtgatccagaaggagagcgaggtggcccacgtggaccagctgttcgacgacgccagcagagccgtgaccaactgcgagagcctggtgaaggacttctacagcaagctgggcctgcagtacagagacagcagcagcgaggacgagagcagcagacccaccgagatcatcgagatccccgacgaggacgacgacgtgctgagcatcgacagcggcgacgccggcagcagaacccccaaggaccagaagctgagagaggccatggccgccctgagaaagagcgcccaggacgtgcagaagttcatggacgccgtgaacaagaagagcagcagccaggacctgcacaagggcaccctgagccagatgagcggcgagctgagcaaggacggcgacctgatcgtgagcatgagaatcctgggcaagaagagaaccaagacctggcacaagggcaccctgatcgccatccagaccgtgggccccggcaagaagtacaaggtgaagttcgacaacaagggcaagagcctgctgagcggcaaccacatcgcctacgactaccacccccccgccgacaagctgtacgtgggcagcagagtggtggccaagtacaaggacggcaaccaggtgtggctgtacgccggcatcgtggccgagacccccaacgtgaagaacaagctgagattcctgatcttcttcgacgacggctacgccagctacgtgacccagagcgagctgtaccccatctgcagacccctgaagaagacctgggaggacatcgaggacatcagctgcagagacttcatcgaggagtacgtgaccgcctaccccaacagacccatggtgctgctgaagagcggccagctgatcaagaccgagtgggagggcacctggtggaagagcagagtggaggaggtggacggcagcctggtgagaatcctgttcctggtgctgttcttcagcaccatcctggaggccgaggtgggcggcggcggcacctag

SEQ ID NO: 98700 - DNA, 750 bp, synthetic construct
  misc_feature 1..750: note = Description of Artificial Sequence: Synthetic coding sequence
  source 1..750: mol_type = other DNA
atgagcagcctgcccggctgcatcggcctggacgccgccaccgccaccgtggagagcgaggagatcgccgagctgcagcaggccgtggtggaggagctgggcatcagcatggaggagctgagacacttcatcgacgaggagctggagaagatggactgcgtgcagcagagaaagaagcagctggccgagctggagacctgggtgatccagaaggagagcgaggtggcccacgtggaccagctgttcgacgacgccagcagagccgtgaccaactgcgagagcctggtgaaggacttctacagcaagctgggcctgcagtacagagacagcagcagcgaggacgagagcagcagacccaccgagatcatcgagatccccgacgaggacgacgacgtgctgagcatcgacagcggcgacgccggcagcagaacccccaaggaccagaagctgagagaggccatggccgccctgagaaagagcgcccaggacgtgcagaagttcatggacgccgtgaacaagaagagcagcagccaggacctgcacaagggcaccctgagccagatgagcggcgagctgagcaaggacggcgacctgatcgtgagcatgagaatcctgggcaagaagagaaccaagacctggcacaagggcaccctgatcgccatccagaccgtgggcttcagcttcagcctgatgatggccatgctgcccatgagccacagcagaaactgcatccccttcgccggccactag

SEQ ID NO: 98701 - DNA, 3873 bp, synthetic construct
  misc_feature 1..3873: note = Description of Artificial Sequence: Synthetic coding sequence
  source 1..3873: mol_type = other DNA
atgagcagcctgcccggctgcatcggcctggacgccgccaccgccaccgtggagagcgaggagatcgccgagctgcagcaggccgtggtggaggagctgggcatcagcatggaggagctgagacacttcatcgacgaggagctggagaagatggactgcgtgcagcagagaaagaagcagctggccgagctggagacctgggtgatccagaaggagagcgaggtggcccacgtggaccagctgttcgacgacgccagcagagccgtgaccaactgcgagagcctggtgaaggacttctacagcaagctgggcctgcagtacagagacagcagcagcgaggacgagagcagcagacccaccgagatcatcgagatccccgacgaggacgacgacgtgctgagcatcgacagcggcgacgccggcagcagaacccccaaggaccagaagctgagagaggccatggccgccctgagaaagagcgcccaggacgtgcagaagttcatggacgccgtgaacaagaagagcagcagccaggacctgcacaagggcaccctgagccagatgagcggcgagctgagcaaggacggcgacctgatcgtgagcatgagaatcctgggcaagaagagaaccaagacctggcacaagggcaccctgatcgccatccagaccgtgggccccggcaagaagtacaaggtgaagttcgacaacaagggcaagagcctgctgagcggcaaccacatcgcctacgactaccacccccccgccgacaagctgtacgtgggcagcagagtggtggccaagtacaaggacggcaaccaggtgtggctgtacgccggcatcgtggccgagacccccaacgtgaagaacaagctgagattcctgatcttcttcgacgacggctacgccagctacgtgacccagagcgagctgtaccccatctgcagacccctgaagaagacctgggaggacatcgaggacatcagctgcagagacttcatcgaggagtacgtgaccgcctaccccaacagacccatggtgctgctgaagagcggccagctgatcaagaccgagtgggagggcacctggtggaagagcagagtggaggaggtggacggcagcctggtgagaatcctgttcctggacgacaagagatgcgagtggatctacagaggcagcaccagactggagcccatgttcagcatgaagaccagcagcgccagcgccctggagaagaagcagggccagctgagaaccagacccaacatgggcgccgtgagaagcaagggccccgtggtgcagtacacccaggacctgaccggcaccggcacccagttcaagcccgtggagcccccccagcccaccgccccccccgccccccccttcccccccgccccccccctgagcccccaggccggcgacagcgacctggagagccagctggcccagagcagaaagcaggtggccaagaagagcaccagcttcagacccggcagcgtgggcagcggccacagcagccccaccagccccgccctgagcgagaacgtgagcggcggcaagcccggcatcaaccagacctacagaagccccctgggcagcaccgccagcgcccccgcccccagcgccctgcccgccccccccgccccccccgtgttccacggcatgctggagagagcccccgccgagcccagctacagagcccccatggagaagctgttctacctgccccacgtgtgcagctacacctgcctgagcagagtgagacccatgagaaacgagcagtacagaggcaagaaccccctgctggtgcccctgctgtacgacttcagaagaatgaccgccagaagaagagtgaacagaaagatgggcttccacgtgatctacaagaccccctgcggcctgtgcctgagaaccatgcaggagatcgagagatacctgttcgagaccggctgcgacttcctgttcctggagatgttctgcctggacccctacgtgctggtggacagaaagttccagccctacaagcccttctactacatcctggacatcacctacggcaaggaggacgtgcccctgagctgcgtgaacgagatcgacaccaccccccccccccaggtggcctacagcaaggagagaatccccggcaagggcgtgttcatcaacaccggccccgagttcctggtgggctgcgactgcaaggacggctgcagagacaagagcaagtgcgcctgccaccagctgaccatccaggccaccgcctgcacccccggcggccagatcaaccccaacagcggctaccagtacaagagactggaggagtgcctgcccaccggcgtgtacgagtgcaacaagagatgcaagtgcgaccccaacatgtgcaccaacagactggtgcagcacggcctgcaggtgagactgcagctgttcaagacccagaacaagggctggggcatcagatgcctggacgacatcgccaagggcagcttcgtgtgcatctacgccggcaagatcctgaccgacgacttcgccgacaaggagggcctggagatgggcgacgagtacttcgccaacctggaccacatcgagagcgtggagaacttcaaggagggctacgagagcgacgccccctgcagcagcgacagcagcggcgtggacctgaaggaccaggaggacggcaacagcggcaccgaggaccccgaggagagcaacgacgacagcagcgacgacaacttctgcaaggacgaggacttcagcaccagcagcgtgtggagaagctacgccaccagaagacagaccagaggccagaaggagaacggcctgagcgagaccaccagcaaggacagccacccccccgacctgggccccccccacatccccgtgccccccagcatccccgtgggcggctgcaacccccccagcagcgaggagacccccaagaacaaggtggccagctggctgagctgcaacagcgtgagcgagggcggcttcgccgacagcgacagccacagcagcttcaagaccaacgagggcggcgagggcagagccggcggcagcagaatggaggccgagaaggccagcaccagcggcctgggcatcaaggacgagggcgacatcaagcaggccaagaaggaggacaccgacgacagaaacaagatgagcgtggtgaccgagagcagcagaaactacggctacaaccccagccccgtgaagcccgagggcctgagaagaccccccagcaagaccagcatgcaccagagcagaagactgatggccagcgcccagagcaaccccgacgacgtgctgaccctgagcagcagcaccgagagcgagggcgagagcggcaccagcagaaagcccaccgccggccagaccagcgccaccgccgtggacagcgacgacatccagaccatcagcagcggcagcgagggcgacgacttcgaggacaagaagaacatgaccggccccatgaagagacaggtggccgtgaagagcaccagaggcttcgccctgaagagcacccacggcatcgccatcaagagcaccaacatggccagcgtggacaagggcgagagcgcccccgtgagaaagaacaccagacagttctacgacggcgaggagagctgctacatcatcgacgccaagctggagggcaacctgggcagatacctgaaccacagctgcagccccaacctgttcgtgcagaacgtgttcgtggacacccacgacctgagattcccctgggtggccttcttcgccagcaagatcagagccggcaccgagctgacctgggactacaactacgaggtgggcagcgtggagggcaaggagctgctgtgctgctgcggcgccatcgagtgcagaggcagactgctgtag

SEQ ID NO: 98702 - DNA, 504 bp, synthetic construct
  misc_feature 1..504: note = Description of Artificial Sequence: Synthetic coding sequence
  source 1..504: mol_type = other DNA
atgagcagcctgcccggctgcatcggcctggacgccgccaccgccaccgtggagagcgaggagatcgccgagctgcagcaggccgtggtggaggagctgggcatcagcatggaggagctgagacacttcatcgacgaggagctggagaagatggactgcgtgcagcagagaaagaagcagctggccgagctggagaccgtgggccccggcaagaagtacaaggtgaagttcgacaacaagggcaagagcctgctgagcggcaaccacatcgcctacgactaccacccccccgccgacaagctgtacgtgggcagcagagtggtggccaagtacaaggacggcaaccaggtgtggctgtacgccggcatcgtggccgagacccccaacgtgaagaacaagctgagattcctgatcttcttcgacgacggctacgccagctacgtgacccagagcgagctgtaccccatctgcagacccagagagtgcttcagcctgatcccctag

SEQ ID NO: 98703 - DNA, 471 bp, synthetic construct
  misc_feature 1..471: note = Description of Artificial Sequence: Synthetic coding sequence
  source 1..471: mol_type = other DNA
atgagcagcctgcccggctgcatcggcctggacgccgccaccgccaccgtggagagcgaggagatcgccgagctgcagcaggccgtggtggaggagctgggcatcagcatggaggagctgagacacttcatcgacgaggagctggagaagatggactgcgtgcagcagagaaagaagcagctggccgagctggagacctgggtgatccagaaggagagcgaggtggcccacgtggaccagctgttcgacgacgccagcagagccgtgaccaactgcgagagcctggtgaaggacttctacagcaagctgggcctgcagtacagagacagcagcagcgaggacgagagcagcagacccaccgagatcatcgagatccccgacgaggacgacgacgtgctgagcatcgacagcggcgacgccggcagcagaacccccaaggaccagaagctgagagaggccatggccgcctag

SEQ ID NO: 98704 - DNA, 3780 bp, synthetic construct
  misc_feature 1..3780: note = Description of Artificial Sequence: Synthetic coding sequence
  source 1..3780: mol_type = other DNA
atgagcagcctgcccggctgcatcggcctggacgccgccaccgccaccgtggagagcgaggagatcgccgagctgcagcaggccgtggtggaggagctgggcatcagcatggaggagctgagacacttcatcgacgaggagctggagaagatggactgcgtgcagcagagaaagaagcagctggccgagctggagacctgggtgatccagaaggagagcgaggtggcccacgtggaccagctgttcgacgacgccagcagagccgtgaccaactgcgagagcctggtgaaggacttctacagcaagctgggcctgcagtacagagacagcagcagcgaggacgagagcagcagacccaccgagatcatcgagatccccgacgaggacgacgacgtgctgagcatcgacagcggcgacgccggcagcagaacccccaaggaccagaagctgagagaggccatggccgccctgagaaagagcgcccaggacgtgcagaagttcatggacgccgtgaacaagaagagcagcagccaggacctgcacaagggcaccctgagccagatgagcggcgagctgagcaaggacggcgacctgatcgtgagcatgagaatcctgggcaagaagagaaccaagacctggcacaagggcaccctgatcgccatccagaccgtgggccccggcaagaagtacaaggtgaagttcgacaacaagggcaagagcctgctgagcggcaaccacatcgcctacgactaccacccccccgccgacaagctgtacgtgggcagcagagtggtggccaagtacaaggacggcaaccaggtgtggctgtacgccggcatcgtggccgagacccccaacgtgaagaacaagctgagattcctgatcttcttcgacgacggctacgccagctacgtgacccagagcgagctgtaccccatctgcagacccctgaagaagacctgggaggacatcgaggacatcagctgcagagacttcatcgaggagtacgtgaccgcctaccccaacagacccatggtgctgctgaagagcggccagctgatcaagaccgagtgggagggcacctggtggaagagcagagtggaggaggtggacggcagcctggtgagaatcctgttcctggacgacaagagatgcgagtggatctacagaggcagcaccagactggagcccatgttcagcatgaagaccagcagcgccagcgccctggagaagaagcagggccagctgagaaccagacccaacatgggcgccgtgagaagcaagggccccgtggtgcagtacacccaggacctgaccggcaccggcacccagttcaagcccgtggagcccccccagcccaccgccccccccgccccccccttcccccccgccccccccctgagcccccaggccggcgacagcgacctggagagccagctggcccagagcagaaagcaggtggccaagaagagcaccagcttcagacccggcagcgtgggcagcggccacagcagccccaccagccccgccctgagcgagaacgtgagcggcggcaagcccggcatcaaccagacctacagaagccccctgggcagcaccgccagcgcccccgcccccagcgccctgcccgccccccccgccccccccgtgttccacggcatgctggagagagcccccgccgagcccagctacagagcccccatggagaagctgttctacctgccccacgtgtgcagctacacctgcctgagcagagtgagacccatgagaaacgagcagtacagaggcaagaaccccctgctggtgcccctgctgtacgacttcagaagaatgaccgccagaagaagagtgaacagaaagatgggcttccacgtgatctacaagaccccctgcggcctgtgcctgagaaccatgcaggagatcgagagatacctgttcgagaccggctgcgacttcctgttcctggagatgttctgcctggacccctacgtgctggtggacagaaagttccagccctacaagcccttctactacatcctggacatcacctacggcaaggaggacgtgcccctgagctgcgtgaacgagatcgacaccaccccccccccccaggtggcctacagcaaggagagaatccccggcaagggcgtgttcatcaacaccggccccgagttcctggtgggctgcgactgcaaggacggctgcagagacaagagcaagtgcgcctgccaccagctgaccatccaggccaccgcctgcacccccggcggccagatcaaccccaacagcggctaccagtacaagagactggaggagtgcctgcccaccggcgtgtacgagtgcaacaagagatgcaagtgcgaccccaacatgtgcaccaacagactggtgcagcacggcctgcaggtgagactgcagctgttcaagacccagaacaagggctggggcatcagatgcctggacgacatcgccaagggcagcttcgtgtgcatctacgccggcaagatcctgaccgacgacttcgccgacaaggagggcctggagatgggcgacgagtacttcgccaacctggaccacatcgagagcgtggagaacttcaaggagggctacgagagcgacgccccctgcagcagcgacagcagcggcgtggacctgaaggaccaggaggacggcaacagcggcaccgaggaccccgaggagagcaacgacgacagcagcgacgacaacttctgcaaggacgaggacttcagcaccagcagcgtgtggagaagctacgccaccagaagacagaccagaggccagaaggagaacggcctgagcgagaccaccagcaaggacagccacccccccgacctgggccccccccacatccccgtgccccccagcatccccgtgggcggctgcaacccccccagcagcgaggagacccccaagaacaaggtggccagctggctgagctgcaacagcgtgagcgagggcggcttcgccgacagcgacagccacagcagcttcaagaccaacgagggcggcgagggcagagccggcggcagcagaatggaggccgagaaggccagcaccagcggcctgggcatcaaggacgagggcgacatcaagcaggccaagaaggaggacaccgacgacagaaacaagatgagcgtggtgaccgagagcagcagaaactacggctacaaccccagccccgtgaagcccgagggcctgagaagaccccccagcaagaccagcatgcaccagagcagaagactgatggccagcgcccagagcaaccccgacgacgtgctgaccctgagcagcagcaccgagagcgagggcgagagcggcaccagcagaaagcccaccgccggccagaccagcgccaccgccgtggacagcgacgacatccagaccatcagcagcggcagcgagggcgacgacttcgaggacaagaagaacatgaccggccccatgaagagacaggtggccgtgaagagcaccagaggcttcgccctgaagagcacccacggcatcgccatcaagagcaccaacatggccagcgtggacaagggcgagagcgcccccgtgagaaagaacaccagacagttctacgacggcgaggagagctgctacatcatcgacgccaagctggagggcaacctgggcagatacctgaacgtgagacccctgagcccccccctggacgccggcctgagccacggcccccagatcagcttcaacatcctgtacaagcccttcagctgctacaagctgctgatcagcaagtag

SEQ ID NO: 98705 - DNA, 492 bp, synthetic construct
  misc_feature 1..492: note = Description of Artificial Sequence: Synthetic coding sequence
  source 1..492: mol_type = other DNA
atgagcagcctgcccggctgcatcggcctggacgccgccaccgccaccgtggagagcgaggagatcgccgagctgcagcaggccgtggtggaggagctgggcatcagcatggaggagctgagacacttcatcgacgaggagctggagaagatggactgcgtgcagcagagaaagaagcagctggccgagctggagacctgggtgatccagaaggagagcgaggtggcccacgtggaccagctgttcgacgacgccagcagagccgtgaccaactgcgagagcctggtgaaggacttctacagcaagctgggcctgcagtacagagacagcagcagcgaggacgagagcagcagacccaccgagatcatcgagatccccgacgaggacgacgacgtgctgagcatcgacagcggcgacgccggcagcagaacccccaaggaccagaagctgagagaggccatggccgccctgagaaagagcgcccaggactag

SEQ ID NO: 98706 - DNA, 1911 bp, synthetic construct
  misc_feature 1..1911: note = Description of Artificial Sequence: Synthetic coding sequence
  source 1..1911: mol_type = other DNA
atgagcagcctgcccggctgcatcggcctggacgccgccaccgccaccgtggagagcgaggagatcgccgagctgcagcaggccgtggtggaggagctgggcatcagcatggaggagctgagacacttcatcgacgaggagctggagaagatggactgcgtgcagcagagaaagaagcagctggccgagctggagacctgggtgatccagaaggagagcgaggtggcccacgtggaccagctgttcgacgacgccagcagagccgtgaccaactgcgagagcctggtgaaggacttctacagcaagctgggcctgcagtacagagacagcagcagcgaggacgagagcagcagacccaccgagatcatcgagatccccgacgaggacgacgacgtgctgagcatcgacagcggcgacgccggcagcagaacccccaaggaccagaagctgagagaggccatggccgccctgagaaagagcgcccaggacgtgcagaagttcatggacgccgtgaacaagaagagcagcagccaggacctgcacaagggcaccctgagccagatgagcggcgagctgagcaaggacggcgacctgatcgtgagcatgagaatcctgggcaagaagagaaccaagacctggcacaagggcaccctgatcgccatccagaccgtgggccccggcaagaagtacaaggtgaagttcgacaacaagggcaagagcctgctgagcggcaaccacatcgcctacgactaccacccccccgccgacaagctgtacgtgggcagcagagtggtggccaagtacaaggacggcaaccaggtgtggctgtacgccggcatcgtggccgagacccccaacgtgaagaacaagctgagattcctgatcttcttcgacgacggctacgccagctacgtgacccagagcgagctgtaccccatctgcagacccctgaagaagacctgggaggacatcgaggacatcagctgcagagacttcatcgaggagtacgtgaccgcctaccccaacagacccatggtgctgctgaagagcggccagctgatcaagaccgagtgggagggcacctggtggaagagcagagtggaggaggtggacggcagcctggtgagaatcctgttcctggacgacaagagatgcgagtggatctacagaggcagcaccagactggagcccatgttcagcatgaagaccagcagcgccagcgccctggagaagaagcagggccagctgagaaccagacccaacatgggcgccgtgagaagcaagggccccgtggtgcagtacacccaggacctgaccggcaccggcacccagttcaagcccgtggagcccccccagcccaccgccccccccgccccccccttcccccccgccccccccctgagcccccaggccggcgacagcgagagcctggagagccagctggcccagagcagaaagcaggtggccaagaagagcaccagcttcagacccggcagcgtgggcagcggccacagcagccccaccagccccgccctgagcgagaacgtgagcggcggcaagcccggcatcaaccagacctacagaagccccctgggcagcaccgccagcgcccccgcccccagcgccctgcccgccccccccgccccccccgtgttccacggcatgctggagagagcccccgccgagcccagctacagagcccccatggagaagctgttctacctgccccacgtgtgcagctacacctgcctgagcagagtgagacccatgagaaacgagcagtacagaggcaagaaccccctgctggtgcccctgctgtacgacttcagaagaatgaccgccagaagaagagtgaacagaaagatgggcttccacgtgatctacaagaccccctgcggcctgtgcctgtag

SEQ ID NO: 98707 - DNA, 2160 bp, synthetic construct
  misc_feature 1..2160: note = Description of Artificial Sequence: Synthetic coding sequence
  source 1..2160: mol_type = other DNA
atgggcgagaagaacggcgacgccaagaccttctggatggagctggaggacgacggcaaggtggacttcatcttcgagcaggtgcagaacgtgctgcagagcctgaagcagaagatcaaggacggcagcgccaccaacaaggagtacatccaggccatgatcctggtgaacgaggccaccatcatcaacagcagcaccagcatcaagggcgccagccagaaggaggtgaacgcccagagcagcgaccccatgcccgtgacccagaaggagcaggagaacaagagcaacgccttccccagcaccagctgcgagaacagcttccccgaggactgcaccttcctgaccaccgagaacaaggagatcctgagcctggaggacaaggtggtggacttcagagagaaggacagcagcagcaacctgagctaccagagccacgactgcagcggcgcctgcctgatgaagatgcccctgaacctgaagggcgagaaccccctgcagctgcccatcaagtgccacttccagagaagacacgccaagaccaacagccacagcagcgccctgcacgtgagctacaagaccccctgcggcagaagcctgagaaacgtggaggaggtgttcagatacctgctggagaccgagtgcaacttcctgttcaccgacaacttcagcttcaacacctacgtgcagctggccagaaactaccccaagcagaaggaggtggtgagcgacgtggacatcagcaacggcgtggagagcgtgcccatcagcttctgcaacgagatcgacagcagaaagctgccccagttcaagtacagaaagaccgtgtggcccagagcctacaacctgaccaacttcagcagcatgttcaccgacagctgcgactgcagcgagggctgcatcgacatcaccaagtgcgcctgcctgcagctgaccgccagaaacgccaagaccagccccctgagcagcgacaagatcaccaccggctacaagtacaagagactgcagagacagatccccaccggcatctacgagtgcagcctgctgtgcaagtgcaacagacagctgtgccagaacagagtggtgcagcacggcccccaggtgagactgcaggtgttcaagaccgagcagaagggctggggcgtgagatgcctggacgacatcgacagaggcaccttcgtgtgcatctacagcggcagactgctgagcagagccaacaccgagaagagctacggcatcgacgagaacggcagagacgagaacaccatgaagaacatcttcagcaagaagagaaagctggaggtggcctgcagcgactgcgaggtggaggtgctgcccctgggcctggagacccaccccagaaccgccaagaccgagaagtgcccccccaagttcagcaacaaccccaaggagctgaccgtggagaccaagtacgacaacatcagcagaatccagtaccacagcgtgatcagagaccccgagagcaagaccgccatcttccagcacaacggcaagaagatggagttcgtgagcagcgagagcgtgacccccgaggacaacgacggcttcaagccccccagagagcacctgaacagcaagaccaagggcgcccagaaggacagcagcagcaaccacgtggacgagttcgaggacaacctgctgatcgagagcgacgtgatcgacatcaccaagtacagagaggagaccccccccagaagcagatgcaaccaggccaccaccctggacaaccagaacatcaagaaggccatcgaggtgcagatccagaagccccaggagggcagaagcaccgcctgccagagacagcaggtgttctgcgacgaggagctgctgagcgagaccaagaacaccagcagcgacagcctgaccaagttcaacaagggcaacgtgttcctgctggacgccaccaaggagggcaacgtgggcagattcctgaaccacagctgctgccccaacctgctggtgcagaacgtgttcgtggagacccacaacagaaacttccccctggtggccttcttcaccaacagatacgtgaaggccagaaccgagctgacctgggactacggctacgaggccggcaccgtgcccgagaaggagatcttctgccagtgcggcgtgaacaagtgcagaaagaagatcctgtag

SEQ ID NO: 98708 - DNA, 2124 bp, synthetic construct
  misc_feature 1..2124: note = Description of Artificial Sequence: Synthetic coding sequence
  source 1..2124: mol_type = other DNA
atgggcgagaagaacggcgacgccaagaccttctggatggagctggaggacgacggcaaggtggacttcatcttcgagcaggtgcagaacgtgctgcagagcctgaagcagaagatcaaggacggcagcgccaccaacaaggagtacatccaggccatgatcctggtgaacgaggccaccatcatcaacagcagcaccagcatcaaggaccccatgcccgtgacccagaaggagcaggagaacaagagcaacgccttccccagcaccagctgcgagaacagcttccccgaggactgcaccttcctgaccaccgagaacaaggagatcctgagcctggaggacaaggtggtggacttcagagagaaggacagcagcagcaacctgagctaccagagccacgactgcagcggcgcctgcctgatgaagatgcccctgaacctgaagggcgagaaccccctgcagctgcccatcaagtgccacttccagagaagacacgccaagaccaacagccacagcagcgccctgcacgtgagctacaagaccccctgcggcagaagcctgagaaacgtggaggaggtgttcagatacctgctggagaccgagtgcaacttcctgttcaccgacaacttcagcttcaacacctacgtgcagctggccagaaactaccccaagcagaaggaggtggtgagcgacgtggacatcagcaacggcgtggagagcgtgcccatcagcttctgcaacgagatcgacagcagaaagctgccccagttcaagtacagaaagaccgtgtggcccagagcctacaacctgaccaacttcagcagcatgttcaccgacagctgcgactgcagcgagggctgcatcgacatcaccaagtgcgcctgcctgcagctgaccgccagaaacgccaagaccagccccctgagcagcgacaagatcaccaccggctacaagtacaagagactgcagagacagatccccaccggcatctacgagtgcagcctgctgtgcaagtgcaacagacagctgtgccagaacagagtggtgcagcacggcccccaggtgagactgcaggtgttcaagaccgagcagaagggctggggcgtgagatgcctggacgacatcgacagaggcaccttcgtgtgcatctacagcggcagactgctgagcagagccaacaccgagaagagctacggcatcgacgagaacggcagagacgagaacaccatgaagaacatcttcagcaagaagagaaagctggaggtggcctgcagcgactgcgaggtggaggtgctgcccctgggcctggagacccaccccagaaccgccaagaccgagaagtgcccccccaagttcagcaacaaccccaaggagctgaccgtggagaccaagtacgacaacatcagcagaatccagtaccacagcgtgatcagagaccccgagagcaagaccgccatcttccagcacaacggcaagaagatggagttcgtgagcagcgagagcgtgacccccgaggacaacgacggcttcaagccccccagagagcacctgaacagcaagaccaagggcgcccagaaggacagcagcagcaaccacgtggacgagttcgaggacaacctgctgatcgagagcgacgtgatcgacatcaccaagtacagagaggagaccccccccagaagcagatgcaaccaggccaccaccctggacaaccagaacatcaagaaggccatcgaggtgcagatccagaagccccaggagggcagaagcaccgcctgccagagacagcaggtgttctgcgacgaggagctgctgagcgagaccaagaacaccagcagcgacagcctgaccaagttcaacaagggcaacgtgttcctgctggacgccaccaaggagggcaacgtgggcagattcctgaaccacagctgctgccccaacctgctggtgcagaacgtgttcgtggagacccacaacagaaacttccccctggtggccttcttcaccaacagatacgtgaaggccagaaccgagctgacctgggactacggctacgaggccggcaccgtgcccgagaaggagatcttctgccagtgcggcgtgaacaagtgcagaaagaagatcctgtag

SEQ ID NO: 98709 - DNA, 975 bp, synthetic construct
  misc_feature 1..975: note = Description of Artificial Sequence: Synthetic coding sequence
  source 1..975: mol_type = other DNA
atgagcagacccagcagcaccggccccagcgccaacaagccctgcagcaagcagccccccccccagccccagcacacccccagccccgccgccccccccgccgccgccaccatcagcgccgccggccccggcagcagcgccgtgcccgccgccgccgccgtgatcagcggccccggcggcggcggcggcgccggccccgtgagcccccagcaccacgagctgaccagcctgttcgagtgccccgtgtgcttcgactacgtgctgccccccatcctgcagtgccaggccggccacctggtgtgcaaccagtgcagacagaagctgagctgctgccccacctgcagaggcgccctgacccccagcatcagaaacctggccatggagaaggtggccagcgccgtgctgttcccctgcaagtacgccaccaccggctgcagcctgaccctgcaccacaccgagaagcccgagcacgaggacatctgcgagtacagaccctacagctgcccctgccccggcgccagctgcaagtggcagggcagcctggaggccgtgatgagccacctgatgcacgcccacaagagcatcaccaccctgcagggcgaggacatcgtgttcctggccaccgacatcaacctgcccggcgccgtggactgggtgatgatgcagagctgcttcggccaccacttcatgctggtgctggagaagcaggagaagtacgagggccaccagcagttcttcgccatcgtgctgctgatcggcaccagaaagcaggccgagaacttcgcctacagactggagctgaacggcaacagaagaagactgacctgggaggccacccccagaagcatccacgacggcgtggccgccgccatcatgaacagcgactgcctggtgttcgacaccgccatcgcccacctgttcgccgacaacggcaacctgggcatcaacgtgaccatcagcacctgctgcccctag

SEQ ID NO: 98710 - DNA, 990 bp, synthetic construct
  misc_feature 1..990: note = Description of Artificial Sequence: Synthetic coding sequence
  source 1..990: mol_type = other DNA
atgatgagcaacagcagcagcgagatcgacgtgatcaagaccagaatccccacctacgacgaggacgacaacaccatcctgtacgcctacgagaccaagcccgagttcgtgaacaaggagcccaacatcgtgagcgacgccagctgcaacaccgaggagcagctgaagaccgtggacgacgtgctgatccactgccaggtgatctacgacgccctgcagaacctggacaagaagatcgacgtgatcagaagaaaggtgagcaagatccagagattccacgccagaagcctgtggaccaaccacaagagatacggctacaagaagcacagctacagactggtgaagaagctgaagctgcagaagatgaagaagaacgaggtgtacgagaccttcagctaccccgagagctacagccccaccctgcccgtgagcagaagagagaacaacagccccagcaacctgcccagacccagcttctgcatggaggagtaccagagagccgagctggaggaggaccccatcctgagcagaacccccagccccgtgcaccccagcgacttcagcgagcacaactgccagccctactacgccagcgacggcgccacctacggcagcagcagcggcctgtgcctgggcaaccccagagccgacagcatccacaacacctacagcaccgaccacgccagcgccgccccccccagcgtgaccagaagccccgtggagaacgacggctacatcgaggagggcagcatcaccaagcaccccagcacctggagcgtggaggccgtggtgctgttcctgaagcagaccgaccccctggccctgtgccccctggtggacctgttcagaagccacgagatcgacggcaaggccctgctgctgctgaccagcgacgtgctgctgaagcacctgggcgtgaagctgggcaccgccgtgaagctgtgctactacatcgacagactgaagcagggcaagtgcttcgagaactag

SEQ ID NO: 98711 - DNA, 909 bp, synthetic construct
  misc_feature 1..909: note = Description of Artificial Sequence: Synthetic coding sequence
  source 1..909: mol_type = other DNA
atgatgagcaacagcagcagcgagatcgacgtgcaggagcccaacatcgtgagcgacgccagctgcaacaccgaggagcagctgaagaccgtggacgacgtgctgatccactgccaggtgatctacgacgccctgcagaacctggacaagaagatcgacgtgatcagaagaaaggtgagcaagatccagagattccacgccagaagcctgtggaccaaccacaagagatacggctacaagaagcacagctacagactggtgaagaagctgaagctgcagaagatgaagaagaacgaggtgtacgagaccttcagctaccccgagagctacagccccaccctgcccgtgagcagaagagagaacaacagccccagcaacctgcccagacccagcttctgcatggaggagtaccagagagccgagctggaggaggaccccatcctgagcagaacccccagccccgtgcaccccagcgacttcagcgagcacaactgccagccctactacgccagcgacggcgccacctacggcagcagcagcggcctgtgcctgggcaaccccagagccgacagcatccacaacacctacagcaccgaccacgccagcgccgccccccccagcgtgaccagaagccccgtggagaacgacggctacatcgaggagggcagcatcaccaagcaccccagcacctggagcgtggaggccgtggtgctgttcctgaagcagaccgaccccctggccctgtgccccctggtggacctgttcagaagccacgagatcgacggcaaggccctgctgctgctgaccagcgacgtgctgctgaagcacctgggcgtgaagctgggcaccgccgtgaagctgtgctactacatcgacagactgaagcagggcaagtgcttcgagaactag

SEQ ID NO: 98712 - DNA, 627 bp, synthetic construct
  misc_feature 1..627: note = Description of Artificial Sequence: Synthetic coding sequence
  source 1..627: mol_type = other DNA
atgaagaagaacgaggtgtacgagaccttcagctaccccgagagctacagccccaccctgcccgtgagcagaagagagaacaacagccccagcaacctgcccagacccagcttctgcatggaggagtaccagagagccgagctggaggaggaccccatcctgagcagaacccccagccccgtgcaccccagcgacttcagcgagcacaactgccagccctactacgccagcgacggcgccacctacggcagcagcagcggcctgtgcctgggcaaccccagagccgacagcatccacaacacctacagcaccgaccacgccagcgccgccccccccagcgtgaccagaagccccgtggagaacgacggctacatcgaggagggcagcatcaccaagcaccccagcacctggagcgtggaggccgtggtgctgttcctgaagcagaccgaccccctggccctgtgccccctggtggacctgttcagaagccacgagatcgacggcaaggccctgctgctgctgaccagcgacgtgctgctgaagcacctgggcgtgaagctgggcaccgccgtgaagctgtgctactacatcgacagactgaagcagggcaagtgcttcgagaactag

SEQ ID NO: 98713 - DNA, 627 bp, synthetic construct; identical to SEQ ID NO: 98712
  misc_feature 1..627: note = Description of Artificial Sequence: Synthetic coding sequence
  source 1..627: mol_type = other DNA

SEQ ID NO: 98714 - DNA, 447 bp, synthetic construct
  misc_feature 1..447: note = Description of Artificial Sequence: Synthetic coding sequence
  source 1..447: mol_type = other DNA
atgatgagcaacagcagcagcgagatcgacgtgcaggagcccaacatcgtgagcgacgccagctgcaacaccgaggagcagctgaagaccgtggacgacgtgctgatccactgccaggtgatctacgacgccctgcagaacctggacaagaagatcgacgtgatcagaagaaaggtgagcaagatccagagattccacgccagaagcctgtggaccaaccacaagagatacggctacaagaagcacagctacagactggtgaagaagctgaagctgcagaagatgaagaagaacgaggtgtacgagaccttcagctaccccgagagctacagccccaccctgcccgtgagcagaagagagaacaacagccccagcaacctgcccagacccagcttctgcatggaggagtaccagagagccgagctggaggaggaccccatcctgtag

SEQ ID NO: 98715 - DNA, 2103 bp, synthetic construct
  misc_feature 1..2103: note = Description of Artificial Sequence: Synthetic coding sequence
  source 1..2103: mol_type = other DNA
atgggccagaccgtgaacgaggacagcatggacgtgaagaaggagaaccaggagaagaccccccagagcagcaccagcagcgtgcagagagacgacttccactgggaggagtacctgaaggagaccggcagcatcagcgcccccagcgagtgcttcagacagagccagatcccccccgtgaacgacttcaaggtgggcatgaagctggaggccagagaccccagaaacgccaccagcgtgtgcatcgccaccgtgatcggcatcaccggcgccagactgagactgagactggacggcagcgacaacagaaacgacttctggagactggtggacagccccgacatccagcccgtgggcacctgcgagaaggagggcgacctgctgcagccccccctgggctaccagatgaacaccagcagctggcccatgttcctgctgaagaccctgaacggcagcgagatggccagcgccaccctgttcaagaaggagccccccaagccccccctgaacaacttcaaggtgggcatgaagctggaggccatcgacaagaagaacccctacctgatctgccccgccaccatcggcgacgtgaagggcgacgaggtgcacatcaccttcgacggctggagcggcgccttcgactactggtgcaagtacgacagcagagacatcttccccgccggctggtgcagactgaccggcgacgtgctgcagccccccggcaccagcgtgcccatcgtgaagaacatcgccaagaccgagagcagccccagcgaggccagccagcacagcatgcagagcccccagaagaccaccctgatcctgcccacccagcaggtgagaagaagcagcagaatcaagccccccggccccaccgccgtgcccaagagaagcagcagcgtgaagaacatcacccccagaaagaagggccccaacagcggcaagaaggagaagcccctgcccgtgatctgcagcaccagcgccgccagcctgaagagcctgaccagagacagaggcatgctgtacaaggacgtggccagcggcccctgcaagatcgtgatgagcaccgtgtgcgtgtacgtgaacaagcacggcaacttcggcccccacctggaccccaagagaatccagcagctgcccgaccacttcggccccggccccgtgaacgtggtgctgagaagaatcgtgcaggcctgcgtggactgcgccctggagaccaagaccgtgttcggctacctgaagcccgacaacagaggcggcgaggtgatcaccgccagcttcgacggcgagacccacagcatccagctgccccccgtgaacagcgccagcttcgccctgagattcctggagaacttctgccacagcctgcagtgcgacaacctgctgagcagccagcccttcagcagcagcagaggccacacccacagcagcgccgagcacgacaagaaccagagcgccaaggaggacgtgaccgagagacagagcaccaagagaagcccccagcagaccgtgccctacgtggtgcccctgagccccaagctgcccaagaccaaggagtacgccagcgagggcgagcccctgttcgccggcggcagcgccatccccaaggaggagaacctgagcgaggacagcaagagcagcagcctgaacagcggcaactacctgaaccccgcctgcagaaaccccatgtacatccacaccagcgtgagccaggacttcagcagaagcgtgcccggcaccaccagcagccccctggtgggcgacatcagccccaagagcagcccccacgaggtgaagttccagatgcagagaaagagcgaggcccccagctacatcgccgtgcccgaccccagcgtgctgaagcagggcttcagcaaggaccccagcacctggagcgtggacgaggtgatccagttcatgaagcacaccgacccccagatcagcggccccctggccgacctgttcagacagcacgagatcgacggcaaggccctgttcctgctgaagagcgacgtgatgatgaagtacatgggcctgaagctgggccccgccctgaagctgtgctactacatcgagaagctgaaggagggcaagtacagctag

SEQ ID NO: 98716 - DNA, 1038 bp, synthetic construct
  misc_feature 1..1038: note = Description of Artificial Sequence: Synthetic coding sequence
  source 1..1038: mol_type = other DNA
atgcagagcccccagaagaccaccctgatcctgcccacccagcaggtgagaagaagcagcagaatcaagccccccggccccaccgccgtgcccaagagaagcagcagcgtgaagaacatcacccccagaaagaagggccccaacagcggcaagaaggagaagcccctgcccgtgatctgcagcaccagcgccgccagcctgaagagcctgaccagagacagaggcatgctgtacaaggacgtggccagcggcccctgcaagatcgtgatgagcaccgtgtgcgtgtacgtgaacaagcacggcaacttcggcccccacctggaccccaagagaatccagcagctgcccgaccacttcggccccggccccgtgaacgtggtgctgagaagaatcgtgcaggcctgcgtggactgcgccctggagaccaagaccgtgttcggctacctgaagcccgacaacagaggcggcgaggtgatcaccgccagcttcgacggcgagacccacagcatccagctgccccccgtgaacagcgccagcttcgccctgagattcctggagaacttctgccacagcctgcagtgcgacaacctgctgagcagccagcccttcagcagcagcagaggccacacccacagcagcgccgagcacgacaagaaccagagcgccaaggaggacgtgaccgagagacagagcaccaagagaagcccccagcagaccgtgccctacgtggtgcccctgagccccaagctgcccaagaccaaggagtacgccagcgagggcgagcccctgttcgccggcggcagcgccatccccaaggaggagaacctgagcgaggacagcaagagcagcagcctgaacagcggcaactacctgaaccccgcctgcagaaaccccatgtacatccacaccagcgtgagccaggacttcagcagaagcgtgcccggcaccaccagcagccccctggtgggcgacatcagccccaagagcagcccccacgaggtgaagttccagatgcagagaaagagcgagggcaactag

SEQ ID NO: 98717 - DNA, 378 bp, synthetic construct
  misc_feature 1..378: note = Description of Artificial Sequence: Synthetic coding sequence
  source 1..378: mol_type = other DNA
tgagccaaggaggacgtgaccgagagacagagcaccaagagaagcccccagcagaccgtgccctacgtggtgcccctgagccccaagctgcccaagaccaaggagtacgccagcgagggcgagcccctgttcgccggcggcagcgccatccccaaggaggagaacctgagcgaggacagcaagagcagcagcctgaacagcggcaactacctgaaccccgcctgcagaaaccccatgtacatccacaccagcgtgagccaggacttcagcagaagcgtgcccggcaccaccagcagccccctggtgggcgacatcagccccaagagcagcccccacgaggtgaagttccagatgcagagaaagagcgagggcaactag

SEQ ID NO: 98718 - DNA, 1734 bp, synthetic construct
  misc_feature 1..1734: note = Description of Artificial Sequence: Synthetic coding sequence
  source 1..1734: mol_type = other DNA
atgggccagaccgtgaacgaggacagcatggacgtgaagaaggagaaccaggagaagaccccccagagccagatcccccccgtgaacgacttcaaggtgggcatgaagctggaggccagagaccccagaaacgccaccagcgtgtgcatcgccaccgtgatcggcatcaccggcgccagactgagactgagactggacggcagcgacaacagaaacgacttctggagactggtggacagccccgacatccagcccgtgggcacctgcgagaaggagggcgacctgctgcagccccccctgggctaccagatgaacaccagcagctggcccatgttcctgctgaagaccctgaacggcagcgagatggccagcgccaccctgttcaagaaggagccccccaagccccccctgaacaacttcaaggtgggcatgaagctggaggccatcgacaagaagaacccctacctgatctgccccgccaccatcggcgacgtgaagggcgacgaggtgcacatcaccttcgacggctggagcggcgccttcgactactggtgcaagtacgacagcagagacatcttccccgccggctggtgcagactgaccggcgacgtgctgcagccccccggcaccagcgtgcccatcgtgaagaacatcgccaagaccgagagcagccccagcgaggccagccagcacagcatgcagagcccccagaagaccaccctgatcctgcccacccagcaggtgagaagaagcagcagaatcaagccccccggccccaccgccgtgcccaagagaagcagcagcgtgaagaacatcacccccagaaagaagggccccaacagcggcaagaaggagaagcccctgcccgtgatctgcagcaccagcgccgccagcctgaagagcctgaccagagacagaggcatgctgtacaaggacgtggccagcggcccctgcaagatcgtgatgagcaccgtgtgcgtgtacgtgaacaagcacggcaacttcggcccccacctggaccccaagagaatccagcagctgcccgaccacttcggccccggccccgtgaacgtggtgctgagaagaatcgtgcaggcctgcgtggactgcgccctggagaccaagaccgtgttcggctacctgaagcccgacaacagaggcggcgaggtgatcaccgccagcttcgacggcgagacccacagcatccagctgccccccgtgaacagcgccagcttcgccctgagattcctggagaacttctgccacagcctgcagtgcgacaacctgctgagcagccagcccttcagcagcagcagaggccacacccacagcagcgccgagcacgacaagaaccagagcgccaaggaggacgtgaccgagagacagagcaccaagagaagcccccagcagaccgtgccctacgtggtgcccctgagccccaagctgcccaagaccaaggagtacgccagcgagggcgagcccctgttcgccggcggcagcgccatccccaaggaggagaacctgagcgaggacagcaagagcagcagcctgaacagcggcaactacctgaaccccgcctgcagaaaccccatgtacatccacaccagcgtgagccaggacttcagcagaagcgtgcccggcaccaccagcagccccctggtgggcgacatcagccccaagagcagcccccacgaggtgaagttccagatgcagagaaagagcgagggcaactag

SEQ ID NO: 98719 - DNA, 615 bp, synthetic construct
  misc_feature 1..615: note = Description of Artificial Sequence: Synthetic coding sequence
  source 1..615: mol_type = other DNA
atgcagagctacgccagcgccatgctgagcgtgttcaacagcgacgactacagccccgccgtgcaggagaacatccccgccctgagaagaagcagcagcttcctgtgcaccgagagctgcaacagcaagtaccagtgcgagaccggcgagaacagcaagggcaacgtgcaggacagagtgaagagacccatgaacgccttcatcgtgtggagcagagaccagagaagaaagatggccctggagaaccccagaatgagaaacagcgagatcagcaagcagctgggctaccagtggaagatgctgaccgaggccgagaagtggcccttcttccaggaggcccagaagctgcaggccatgcacagagagaagtaccccaactacaagtacagacccagaagaaaggccaagatgctgcccaagaactgcagcctgctgcccgccgaccccgccagcgtgctgtgcagcgaggtgcagctggacaacagactgtacagagacgactgcaccaaggccacccacagcagaatggagcaccagctgggccacctgccccccatcaacgccgccagcagcccccagcagagagacagatacagccactggaccaagctgtag

SEQ ID NO: 98720 - DNA, 594 bp, synthetic construct
  misc_feature 1..594: note = Description of Artificial Sequence: Synthetic coding sequence
  source 1..594: mol_type = other DNA
atgcagagctacgccagcgccatgctgagcgtgttcaacagcgacgactacagccccgccgtgcaggagaacatccccgccctgagaagaagcagcagcttcctgtgcaccgagagctgcaacagcaagtaccagtgcgagaccggcgagaacagcaagggcaacgtgcaggacagagtgaagagacccatgaacgccttcatcgtgtggagcagagaccagagaagaaagatggccctggagaaccccagaatgagaaacagcgagatcagcaagcagctgggctaccagtggaagatgctgaccgaggccgagaagtggcccttcttccaggaggcccagaagctgcaggccatgcacagagagaagtaccccaactacaagtacagacccagaagaaaggccaagatgctgcccaagaactgcagcctgctgcccgccgaccccgccagcgtgctgtgcagcgaggtgcagctggacaacagactgtacagagacgactgcaccaaggccacccacagcagaatggagcaccagctgggccacctgccccccatcaacgccgccagcgccgccaccggccccctgcagtag

SEQ ID NO: 98721 - DNA, 498 bp, synthetic construct
  misc_feature 1..498: note = Description of Artificial Sequence: Synthetic coding sequence
  source 1..498: mol_type = other DNA
atgcagagctacgccagcgccatgctgagcgtgttcaacagcgacgactacagccccgccgtgcaggagaacatccccgccctgagaagaagcagcagcttcctgtgcaccgagagctgcaacagcaagtaccagtgcgagaccggcgagaacagcaagggcaacgtgcaggacagagtgaagagacccatgaacgccttcatcgtgtggagcagagaccagagaagaaagatggccctggagaaccccagaatgagaaacagcgagatcagcaagcagctgggctaccagtggaagatgctgaccgaggccgagaagtggcccttcttccaggaggcccagaagctgcaggccatgcacagagagaagtaccccaactacaagtacagacccagaagaaaggccaagatgctgcccaagaactgcagcctgctgcccgccgaccccgccagcgtgctgtgcagcgaggtgcagggccagcaggtggtgcagggctag

SEQ ID NO: 98722 - DNA, 3729 bp, synthetic construct
  misc_feature 1..3729: note = Description of Artificial Sequence: Synthetic coding sequence
  source 1..3729: mol_type = other DNA
atgaagaacctgctgaccgagaagtgcatcagcagccacaacttccaccagaaggtgatcaagcagagaatggagaagaaggtggacagcagatacttcaaggacggcgccgtgaagaagccctacagcgccaagaccctgagcaacaagaagagcagcgccagcttcggcatcagaagagagctgcccagcaccagccacctggtgcagtacagaggcacccacacctgcaccagacagggcagactgagagagctgagaatcagatgcgtggccagaaagttcctgtacctgtggatcagaatgaccttcggcagagtgttccccagcaaggccagattctactacgagcagagactgctgagaaaggtgttcgaggagtggaaggaggagtggtgggtgttccagcacgagtggaagctgtgcgtgagagccgactgccactacagatactacctgtacaacctgatgttccagacctggaagacctacgtgagacagcagcaggagatgagaaacaagtacatcagagccgaggtgcacgacgccaagcagaagatgagacaggcctggaagagctggctgatctacgtggtggtgagaagaaccaagctgcagatgcagaccaccgccctggagttcagacagagaatcatcctgagagtgtggtggagcacctggagacagagactgggccaggtgagagtgagcagagccctgcacgccagcgccctgaagcacagagccctgagcctgcaggtgcaggcctggagccagtggagagagcagctgctgtacgtgcagaaggagaagcagaaggtggtgagcgccgtgaagcaccaccagcactggcagaagagaagattcctgaaggcctggctggagtacctgcaggtgagaagagtgaagagacagcagaacgagatggccgagagattccaccacgtgaccgtgctgcagatctacttctgcgactggcagcaggcctgggagagaagagagagcctgtacgcccaccacgcccaggtggagaagctggccagaaagatggccctgagaagagccttcacccactggaagcactacatgctgctgtgcgccgaggaggccgcccagttcgagatggccgaggagcaccacagacacagccagctgtacttctgcttcagagccctgaaggacaacgtgacccacgcccacctgcagcagatcagaagaaacctggcccaccagcagcacggcgtgaccctgctgcacagattctggaacctgtggagaagccagatcgagcagaagaaggagagagagctgctgcccctgctgcacgccgcctgggaccactacagaatcgccctgctgtgcaagtgcatcgagctgtggctgcagtacacccagaagagaagatacaagcagctgctgcaggccagagccgacggccacttccagcagagagccctgcccgccgccttccacacctggaacagactgtggagatggagacaccaggagaacgtgctgagcgccagagccaccagattccacagagagaccctggagaagcaggtgttcagcctgtggagacagaagatgttccagcacagagagaacagactggccgagagaatggccatcctgcacgccgagagacagctgctgtacagaagctggttcatgtggcaccagcaggccgccgccagacaccaggagcaggagtggcagaccgtggcctgcgcccaccacagacacggcagactgaagaaggccttctgcctgtggagagagagcgcccagggcctgagaaccgagagaaccggcagagtgagagccgccgagttccacatggcccagctgctgagatgggcctggagccagtggagagagtgcctggccctgagaggcgccgagagacagaagctgatgagagccgacctgcaccaccagcacagcgtgctgcacagagccctgcaggcctgggtgacctaccagggcagagtgagaagcatcctgagagaggtggccgccagagagagccagcacaacagacagctgctgagaggcgccctgagaagatggaaggagaacaccatggccagagtggacgaggccaagaagaccttccaggccagcacccactacagaagaaccatctgcagcaaggtgctggtgcagtggagagaggccgtgagcgtgcagatgtactacagacagcaggaggactgcgccatctgggaggcccagaaggtgctggacagaggctgcctgagaacctggttccagagatggtgggactgcagcagaagaagcgcccagcagagactgcagctggagagagccgtgcagcaccaccacagacagctgctgctggagggcctggccagatggaagacccaccacctgcagtgcgtgagaaagagactgctgcacagacagagcacccagctgctggcccagagactgagcagaacctgcttcagacagtggagacagcagctggccgccagaagacaggagcagagagccaccgtgagagccctgtggttctgggccttcagcctgcaggccaaggtgtgggccacctggctggccttcgtgctggagagaagaagaaagaaggccagactgcagtgggccctgcaggcctaccagggccagctgctgcaggagggcgccaccagactgctgagattcgccgccagcatgaaggccagcagacagcagctgcaggcccagcagcaggtgcaggccgcccacagcctgcacagagccgtgagaagatgcgccaccctgtggaagcagaaggtgctgggcagaggcggcaagccccagcccctggccgccatcgcccccagcagaaaggtgaccttcgagggccccctgctgaacagaatcgccgccggcgccggcgacggcaccctggagaccaagagaccccaggccagcagacccctgggcgccctgggcagactggccgccgaggagccccacgccctggagctgaacaccgcccacagcgccagaaagcagcccagaagaccccacttcctgctggagcccgcccagagccagagaccccagaagccccaggagcacggcctgggcatggcccagcccgccgcccccagcctgaccagacccttcctggccgaggcccccaccgccctggtgccccacagccccctgcccggcgccctgagcagcgcccccggccccaagcagccccccaccgccagcaccggccccgagctgctgctgctgcccctgagcagcttcatgccctgcggcgccgccgcccccgccagagtgagcgcccagagagccacccccagagacaagccccccgtgcccagcagcctggccagcgtgcccgacccccacctgctgctgcccggcgacttcagcgccaccagagccggccccggcctgagcaccgccggcagcctggacctggaggccgagctggaggagatccagcagcagctgctgcactaccagaccaccaagcagaacctgtggagctgcagaagacaggccagcagcctgagaagatggctggagctgaacagagaggagcccggccccgaggaccaggaggtggagcagcaggtgcagaaggagctggagcaggtggagatgcagatccagctgctggccgaggagctgcaggcccagagacagcccatcggcgcctgcgtggccagaatccaggccctgagacaggccctgtgctag

SEQ ID NO: 98723 - DNA, 3483 bp, synthetic construct
  misc_feature 1..3483: note = Description of Artificial Sequence: Synthetic coding sequence
  source 1..3483: mol_type = other DNA
atgaagaacctgctgaccgagaagtgcatcagcagccacaacttccaccagaaggtgatcaagcagagaatggagaagaaggtggacagcagattctactacgagcagagactgctgagaaaggtgttcgaggagtggaaggaggagtggtgggtgttccagcacgagtggaagctgtgcgtgagagccgactgccactacagatactacctgtacaacctgatgttccagacctggaagacctacgtgagacagcagcaggagatgagaaacaagtacatcagagccgaggtgcacgacgccaagcagaagatgagacaggcctggaagagctggctgatctacgtggtggtgagaagaaccaagctgcagatgcagaccaccgccctggagttcagacagagaatcatcctgagagtgtggtggagcacctggagacagagactgggccaggtgagagtgagcagagccctgcacgccagcgccctgaagcacagagccctgagcctgcaggtgcaggcctggagccagtggagagagcagctgctgtacgtgcagaaggagaagcagaaggtggtgagcgccgtgaagcaccaccagcactggcagaagagaagattcctgaaggcctggctggagtacctgcaggtgagaagagtgaagagacagcagaacgagatggccgagagattccaccacgtgaccgtgctgcagatctacttctgcgactggcagcaggcctgggagagaagagagagcctgtacgcccaccacgcccaggtggagaagctggccagaaagatggccctgagaagagccttcacccactggaagcactacatgctgctgtgcgccgaggaggccgcccagttcgagatggccgaggagcaccacagacacagccagctgtacttctgcttcagagccctgaaggacaacgtgacccacgcccacctgcagcagatcagaagaaacctggcccaccagcagcacggcgtgaccctgctgcacagattctggaacctgtggagaagccagatcgagcagaagaaggagagagagctgctgcccctgctgcacgccgcctgggaccactacagaatcgccctgctgtgcaagtgcatcgagctgtggctgcagtacacccagaagagaagatacaagcagctgctgcaggccagagccgacggccacttccagcagagagccctgcccgccgccttccacacctggaacagactgtggagatggagacaccaggagaacgtgctgagcgccagagccaccagattccacagagagaccctggagaagcaggtgttcagcctgtggagacagaagatgttccagcacagagagaacagactggccgagagaatggccatcctgcacgccgagagacagctgctgtacagaagctggttcatgtggcaccagcaggccgccgccagacaccaggagcaggagtggcagaccgtggcctgcgcccaccacagacacggcagactgaagaaggccttctgcctgtggagagagagcgcccagggcctgagaaccgagagaaccggcagagtgagagccgccgagttccacatggcccagctgctgagatgggcctggagccagtggagagagtgcctggccctgagaggcgccgagagacagaagctgatgagagccgacctgcaccaccagcacagcgtgctgcacagagccctgcaggcctgggtgacctaccagggcagagtgagaagcatcctgagagaggtggccgccagagagagccagcacaacagacagctgctgagaggcgccctgagaagatggaaggagaacaccatggccagagtggacgaggccaagaagaccttccaggccagcacccactacagaagaaccatctgcagcaaggtgctggtgcagtggagagaggccgtgagcgtgcagatgtactacagacagcaggaggactgcgccatctgggaggcccagaaggtgctggacagaggctgcctgagaacctggttccagagatggtgggactgcagcagaagaagcgcccagcagagactgcagctggagagagccgtgcagcaccaccacagacagctgctgctggagggcctggccagatggaagacccaccacctgcagtgcgtgagaaagagactgctgcacagacagagcacccagctgctggcccagagactgagcagaacctgcttcagacagtggagacagcagctggccgccagaagacaggagcagagagccaccgtgagagccctgtggttctgggccttcagcctgcaggccaaggtgtgggccacctggctggccttcgtgctggagagaagaagaaagaaggccagactgcagtgggccctgcaggcctaccagggccagctgctgcaggagggcgccaccagactgctgagattcgccgccagcatgaaggccagcagacagcagctgcaggcccagcagcaggtgcaggccgcccacagcctgcacagagccgtgagaagatgcgccaccctgtggaagcagaaggtgctgggcagaggcggcaagccccagcccctggccgccatcgcccccagcagaaaggtgaccttcgagggccccctgctgaacagaatcgccgccggcgccggcgacggcaccctggagaccaagagaccccaggccagcagacccctgggcgccctgggcagactggccgccgaggagccccacgccctggagctgaacaccgcccacagcgccagaaagcagcccagaagaccccacttcctgctggagcccgcccagagccagagaccccagaagccccaggagcacggcctgggcatggcccagcccgccgcccccagcctgaccagacccttcctggccgaggcccccaccgccctggtgccccacagccccctgcccggcgccctgagcagcgcccccggccccaagcagccccccaccgccagcaccggccccgagctgctgctgctgcccctgagcagcttcatgccctgcggcgccgccgcccccgccagagtgagcgcccagagagccacccccagagacaagccccccgtgcccagcagcctggccagcgtgcccgacccccacctgctgctgcccggcgacttcagcgccaccagagccggccccggcctgagcaccgccggcagcctggacctggaggccgagctggaggagatccagcagcagctgctgcactaccagaccaccaagcagaacctgtggagctgcagaagacaggccagcagcctgagaagatggctggagctgaacagagaggagcccggccccgaggaccaggaggtggagcagcaggtgcagaaggagctggagcaggtggagatgcagatccagctgctggccgaggagctgcaggcccagagacagcccatcggcgcctgcgtggccagaatccaggccctgagacaggccctgtgctag

SEQ ID NO: 98724 - DNA, 3096 bp, synthetic construct
  misc_feature 1..3096: note = Description of Artificial Sequence: Synthetic coding sequence
  source 1..3096: mol_type = other DNA
atgaagaacctgctgaccgagaagtgcatcagcagccacaacttccaccagaaggtgatcaagcagagaatggagaagaaggtggacagcagattctactacgagcagagactgctgagaaaggtgttcgaggagtggaaggaggagtggtgggtgttccagcacgagtggaagctgtgcgtgagagccgactgccactacagagtgtggtggagcacctggagacagagactgggccaggtgagagtgagcagagccctgcacgccagcgccctgaagcacagagccctgagcctgcaggtgcaggcctggagccagtggagagagcagctgctgtacgtgcagaaggagaagcagaaggtggtgagcgccgtgaagcaccaccagcactggcagaagagaagattcctgaaggcctggctggagtacctgcaggtgagaagagtgaagagacagcagaacgagatggccgagagattccaccacgtgaccgtgctgcagatctacttctgcgactggcagcaggcctgggagagaagagagagcctgtacgcccaccacgcccaggtggagaagctggccagaaagatggccctgagaagagccttcacccactggaagcactacatgctgctgtgcgccgaggaggccgcccagttcgagatggccgaggagcaccacagacacagccagctgtacttctgcttcagagccctgaaggacaacgtgacccacgcccacctgcagcagatcagaagaaacctggcccaccagcagcacggcgtgaccctgctgcacagattctggaacctgtggagaagccagatcgagcagaagaaggagagagagctgctgcccctgctgcacgccgcctgggaccactacagaatcgccctgctgtgcaagtgcatcgagctgtggctgcagtacacccagaagagaagatacaagcagctgctgcaggccagagccgacggccacttccagcagagagccctgcccgccgccttccacacctggaacagactgtggagatggagacaccaggagaacgtgctgagcgccagagccaccagattccacagagagaccctggagaagcaggtgttcagcctgtggagacagaagatgttccagcacagagagaacagactggccgagagaatggccatcctgcacgccgagagacagctgctgtacagaagctggttcatgtggcaccagcaggccgccgccagacaccaggagcaggagtggcagaccgtggcctgcgcccaccacagacacggcagactgaagaaggccttctgcctgtggagagagagcgcccagggcctgagaaccgagagaaccggcagagtgagagccgccgagttccacatggcccagctgctgagatgggcctggagccagtggagagagtgcctggccctgagaggcgccgagagacagaagctgatgagagccgacctgcaccaccagcacagcgtgctgcacagagccctgcaggcctgggtgacctaccagggcagagtgagaagcatcctgagagaggtggccgccagagagagccagcacaacagacagctgctgagaggcgccctgagaagatggaaggagaacaccatggccagagtggacgaggccaagaagaccttccaggccagcacccactacagaagaaccatctgcagcaaggtgctggtgcagtggagagaggccgtgagcgtgcagatgtactacagacagcaggaggactgcgccatctgggaggcccagaaggtgctggacagaggctgcctgagaacctggttccagagatggtgggactgcagcagaagaagcgcccagcagagactgcagctggagagagccgtgcagcaccaccacagacagctgctgctggagggcctggccagatggaagacccaccacctgcagtgcgtgagaaagagactgctgcacagacagagcacccagctgctggcccagagactgagcagaacctgcttcagacagtggagacagcagctggccgccagaagacaggagcagagagccaccgtgagagccctgtggttctgggccttcagcctgcaggccaaggtgtgggccacctggctggccttcgtgctggagagaagaagaaagaaggccagactgcagtgggccctgcaggcctaccagggccagctgctgcaggagggcgccaccagactgctgagattcgccgccagcatgaaggccagcagacagcagctgcaggcccagcagcaggtgcaggccgcccacagcctgcacagagccgtgagaagatgcgccaccctgtggaagcagaaggtgctgggcagaggcggcaagccccagcccctggccgccatcgcccccagcagaaaggtgaccttcgagggccccctgctgaacagaatcgccgccggcgccggcgacggcaccctggagaccaagagaccccaggccagcagacccctgggcgccctgggcagactggccgccgaggagccccacgccctggagctgaacaccgcccacagcgccagaaagcagcccagaagaccccacttcctgctggagcccgcccagagccagagaccccagaagccccaggagcacggcctgggcatggcccagcccgccgcccccagcctgaccagacccttcctggccgaggcccccaccgccctggtgccccacagccccctgcccggcgccctgagcagcgcccccggccccaagcagccccccaccgccagcaccggccccgagctgctgctgctgcccctgagcagcttcatgccctgcggcgccgccgcccccgccagagtgagcgcccagagagccacccccagagacaagccccccgtgcccagcagcctggccagcgtgcccgacccccacctgctgctgcccggcgacttcagcgccaccagagccggccccggcctgagcaccgccgcctggaccctgagactgaacctgagaagaagcagcagcaactactgcaccaccagaccccccagcagaaccagcggccccgtgggcggcaagagagccgcctgcgccggcggctggagctag

SEQ ID NO: 98725 - DNA, 2976 bp, synthetic construct
  misc_feature 1..2976: note = Description of Artificial Sequence: Synthetic coding sequence
  source 1..2976: mol_type = other DNA
atgaagaacctgctgaccgagaagtgcatcagcagccacaacttccaccagaaggtgatcaagcagagaatggagaagaaggtggacagcagatacttcaaggacggcgccgtgaagaagccctacagcgccaagaccctgagcaacaagaagagcagcgccagcttcggcatcagaagagagctgcccagcaccagccacctggtgcagtacagaggcacccacacctgcaccagacagggcagactgagagagctgagaatcagattctactacgagcagagactgctgagaaaggtgttcgaggagtggaaggaggagtggtgggtgttccagcacgagtggaagctgtgcgtgagagccgactgccactacagatactacctgtacaacctgatgttccagacctggaagacctacgtgagacagcagcaggagatgagaaacaagtacatcagagccgaggtgcacgacgccaagcagaagatgagacaggcctggaagagctggctgatctacgtggtggtgagaagaaccaagctgcagatgcagaccaccgccctggagttcagacagagaatcatcctgagagtgtggtggagcacctggagacagagactgggccaggtgagagtgagcagagccctgcacgccagcgccctgaagcacagagccctgagcctgcaggtgcaggcctggagccagtggagagagcagctgctgtacgtgcagaaggagaagcagaaggtggtgagcgccgtgaagcaccaccagcactggcagaagagaagattcctgaaggcctggctggagtacctgcaggtgagaagagtgaagagacagcagaacgagatggccgagagattccaccacgtgaccgtgctgcagatctacttctgcgactggcagcaggcctgggagagaagagagagcctgtacgcccaccacgcccaggtggagaagctggccagaaagatggccctgagaagagccttcacccactggaagcactacatgctgctgtgcgccgaggaggccgcccagttcgagatggccgaggagcaccacagacacagccagctgtacttctgcttcagagccctgaaggacaacgtgacccacgcccacctgcagcagatcagaagaaacctggcccaccagcagcacggcgtgaccctgctgcacagattctggaacctgtggagaagccagatcgagcagaagaaggagagagagctgctgcccctgctgcacgccgcctgggaccactacagaatcgccctgctgtgcaagtgcatcgagctgtggctgcagtacacccagaagagaagatacaagcagctgctgcaggccagagccgacggccacttccagcagagagccctgcccgccgccttccacacctggaacagactgtggagatggagacaccaggagaacgtgctgagcgccagagccaccagattccacagagagaccctggagaagcaggtgttcagcctgtggagacagaagatgttccagcacagagagaacagactggccgagagaatggccatcctgcacgccgagagacagctgctgtacagaagctggttcatgtggcaccagcaggccgccgccagacaccaggagcaggagtggcagaccgtggcctgcgcccaccacagacacggcagactgaagaaggccttctgcctgtggagagagagcgcccagggcctgagaaccgagagaaccggcagagtgagagccgccgagttccacatggcccagctgctgagatgggcctggagccagtggagagagtgcctggccctgagaggcgccgagagacagaagctgatgagagccgacctgcaccaccagcacagcgtgctgcacagagccctgcaggcctgggtgacctaccagggcagagtgagaagcatcctgagagaggtggccgccagagagagccagcagctgcaggcccagcagcaggtgcaggccgcccacagcctgcacagagccgtgagaagatgcgccaccctgtggaagcagaaggtgctgggcagaggcggcaagccccagcccctggccgccatcgcccccagcagaaaggtgaccttcgagggccccctgctgaacagaatcgccgccggcgccggcgacggcaccctggagaccaagagaccccaggccagcagacccctgggcgccctgggcagactggccgccgaggagccccacgccctggagctgaacaccgcccacagcgccagaaagcagcccagaagaccccacttcctgctggagcccgcccagagccagagaccccagaagccccaggagcacggcctgggcatggcccagcccgccgcccccagcctgaccagacccttcctggccgaggcccccaccgccctggtgccccacagccccctgcccggcgccctgagcagcgcccccggccccaagcagccccccaccgccagcaccggccccgagctgctgctgctgcccctgagcagcttcatgccctgcggcgccgccgcccccgccagagtgagcgcccagagagccacccccagagacaagccccccgtgcccagcagcctggccagcgtgcccgacccccacctgctgctgcccggcgacttcagcgccaccagagccggccccggcctgagcaccgccggcagcctggacctggaggccgagctggaggagatccagcagcagctgctgcactaccagaccaccaagcagaacctgtggagctgcagaagacaggccagcagcctgagaagatggctggagctgaacagagaggagcccggccccgaggaccaggaggtggagcagcaggtgcagaaggagctggagcaggtggagatgcagatccagctgctggccgaggagctgcaggcccagagacagcccatcggcgcctgcgtggccagaatccaggccctgagacaggccctgtgctag

SEQ ID NO: 98726 - DNA, 3636 bp, synthetic construct
  misc_feature 1..3636: note = Description of Artificial Sequence: Synthetic coding sequence
  source 1..3636: mol_type = other DNA
atgaagaacctgctgaccgagaagtgcatcagcagccacaacttccaccagaaggtgatcaagcagagaatggagaagaaggtggacagcagatacttcaaggacggcgccgtgaagaagccctacagcgccaagaccctgagcaacaagaagagcagcgccagcttcggcatcagaagagagctgcccagcaccagccacctggtgcagtacagaggcacccacacctgcaccagacagggcagactgagagagctgagaatcagatgcgtggccagaaagttcctgtacctgtggatcagaatgaccttcggcagagtgttccccagcaaggccagattctactacgagcagagactgctgagaaaggtgttcgaggagtggaaggaggagtggtgggtgttccagcacgagtggaagctgtgcgtgagagccgactgccactacagatactacctgtacaacctgatgttccagacctggaagacctacgtgagacagcagcaggagatgagaaacaagtacatcagagccgaggtgcacgacgccaagcagaagatgagacaggcctggaagagctggctgatctacgtggtggtgagaagaaccaagctgcagatgcagaccaccgccctggagttcagacagagaatcatcctgagagtgtggtggagcacctggagacagagactgggccaggtgagagtgagcagagccctgcacgccagcgccctgaagcacagagccctgagcctgcaggtgcaggcctggagccagtggagagagcagctgctgtacgtgcagaaggagaagcagaaggtggtgagcgccgtgaagcaccaccagcactggcagaagagaagattcctgaaggcctggctggagtacctgcaggtgagaagagtgaagagacagcagaacgagatggccgagagattccaccacgtgaccgtgctgcagatctacttctgcgactggcagcaggcctgggagagaagagagagcctgtacgcccaccacgcccaggtggagaagctggccagaaagatggccctgagaagagccttcacccactggaagcactacatgctgctgtgcgccgaggaggccgcccagttcgagatggccgaggagcaccacagacacagccagctgctgctgcacagattctggaacctgtggagaagccagatcgagcagaagaaggagagagagctgctgcccctgctgcacgccgcctgggaccactacagaatcgccctgctgtgcaagtgcatcgagctgtggctgcagtacacccagaagagaagatacaagcagctgctgcaggccagagccgacggccacttccagcagagagccctgcccgccgccttccacacctggaacagactgtggagatggagacaccaggagaacgtgctgagcgccagagccaccagattccacagagagaccctggagaagcaggtgttcagcctgtggagacagaagatgttccagcacagagagaacagactggccgagagaatggccatcctgcacgccgagagacagctgctgtacagaagctggttcatgtggcaccagcaggccgccgccagacaccaggagcaggagtggcagaccgtggcctgcgcccaccacagacacggcagactgaagaaggccttctgcctgtggagagagagcgcccagggcctgagaaccgagagaaccggcagagtgagagccgccgagttccacatggcccagctgctgagatgggcctggagccagtggagagagtgcctggccctgagaggcgccgagagacagaagctgatgagagccgacctgcaccaccagcacagcgtgctgcacagagccctgcaggcctgggtgacctaccagggcagagtgagaagcatcctgagagaggtggccgccagagagagccagcacaacagacagctgctgagaggcgccctgagaagatggaaggagaacaccatggccagagtggacgaggccaagaagaccttccaggccagcacccactacagaagaaccatctgcagcaaggtgctggtgcagtggagagaggccgtgagcgtgcagatgtactacagacagcaggaggactgcgccatctgggaggcccagaaggtgctggacagaggctgcctgagaacctggttccagagatggtgggactgcagcagaagaagcgcccagcagagactgcagctggagagagccgtgcagcaccaccacagacagctgctgctggagggcctggccagatggaagacccaccacctgcagtgcgtgagaaagagactgctgcacagacagagcacccagctgctggcccagagactgagcagaacctgcttcagacagtggagacagcagctggccgccagaagacaggagcagagagccaccgtgagagccctgtggttctgggccttcagcctgcaggccaaggtgtgggccacctggctggccttcgtgctggagagaagaagaaagaaggccagactgcagtgggccctgcaggcctaccagggccagctgctgcaggagggcgccaccagactgctgagattcgccgccagcatgaaggccagcagacagcagctgcaggcccagcagcaggtgcaggccgcccacagcctgcacagagccgtgagaagatgcgccaccctgtggaagcagaaggtgctgggcagaggcggcaagccccagcccctggccgccatcgcccccagcagaaaggtgaccttcgagggccccctgctgaacagaatcgccgccggcgccggcgacggcaccctggagaccaagagaccccaggccagcagacccctgggcgccctgggcagactggccgccgaggagccccacgccctggagctgaacaccgcccacagcgccagaaagcagcccagaagaccccacttcctgctggagcccgcccagagccagagaccccagaagccccaggagcacggcctgggcatggcccagcccgccgcccccagcctgaccagacccttcctggccgaggcccccaccgccctggtgccccacagccccctgcccggcgccctgagcagcgcccccggccccaagcagccccccaccgccagcaccggccccgagctgctgctgctgcccctgagcagcttcatgccctgcggcgccgccgcccccgccagagtgagcgcccagagagccacccccagagacaagccccccgtgcccagcagcctggccagcgtgcccgacccccacctgctgctgcccggcgacttcagcgccaccagagccggccccggcctgagcaccgccggcagcctggacctggaggccgagctggaggagatccagcagcagctgctgcactaccagaccaccaagcagaacctgtggagctgcagaagacaggccagcagcctgagaagatggctggagctgaacagagaggagcccggccccgaggaccaggaggtggagcagcaggtgcagaaggagctggagcaggtggagatgcagatccagctgctggccgaggagctgcaggcccagagacagcccatcggcgcctgcgtggccagaatccaggccctgagacaggccctgtgctag

SEQ ID NO: 98727 - DNA, 3483 bp, synthetic construct; identical to SEQ ID NO: 98723
  misc_feature 1..3483: note = Description of Artificial Sequence: Synthetic coding sequence
  source 1..3483: mol_type = other DNA

SEQ ID NO: 98728 - DNA, 240 bp, synthetic construct
  misc_feature 1..240: note = Description of Artificial Sequence: Synthetic coding sequence
  source 1..240: mol_type = other DNA
atgaagaacctgctgaccgagaagtgcatcagcagccacaacttccaccagaaggtgatcaagcagagaatggagaagaaggtggacagcagatacttcaaggacggcgccgtgaagaagccctacagcgccaagaccctgagcaacaagaagagcagcgccagcttcggcatcagaagagagctgcccagcaccagccacctggtgcagtacagaggcacccacacctgcaccagatag

SEQ ID NO: 98729 - DNA, 3564 bp, synthetic construct
  misc_feature 1..3564: note = Description of Artificial Sequence: Synthetic coding sequence
  source 1..3564: mol_type = other DNA
atgaagaacctgctgaccgagaagtgcatcagcagccacaacttccaccagaaggtgatcaagcagagaatggagaagaaggtggacagcagatacttcaaggacggcgccgtgaagaagccctacagcgccaagaccctgagcaacaagaagagcagcgccagcttcggcatcagaagagagctgcccagcaccagccacctggtgcagtacagaggcacccacacctgcaccagacagggcagactgagagagctgagaatcagattctactacgagcagagactgctgagaaaggtgttcgaggagtggaaggaggagtggtgggtgttccagcacgagtggaagctgtgcgtgagagccgactgccactacagatactacctgtacaacctgatgttccagacctggaagacctacgtgagacagcagcaggagatgagaaacaagtacatcagagccgaggtgcacgacgccaagcagaagatgagacaggcctggaagagctggctgatctacgtggtggtgagaagaaccaagctgcagatgcagaccaccgccctggagttcagacagagaatcatcctgagagtgtggtggagcacctggagacagagactgggccaggtgagagtgagcagagccctgcacgccagcgccctgaagcacagagccctgagcctgcaggtgcaggcctggagccagtggagagagcagctgctgtacgtgcagaaggagaagcagaaggtggtgagcgccgtgaagcaccaccagcactggcagaagagaagattcctgaaggcctggctggagtacctgcaggtgagaagagtgaagagacagcagaacgagatggccgagagattccaccacgtgaccgtgctgcagatctacttctgcgactggcagcaggcctgggagagaagagagagcctgtacgcccaccacgcccaggtggagaagctggccagaaagatggccctgagaagagccttcacccactggaagcactacatgctgctgtgcgccgaggaggccgcccagttcgagatggccgaggagcaccacagacacagccagctgctgctgcacagattctggaacctgtggagaagccagatcgagcagaagaaggagagagagctgctgcccctgctgcacgccgcctgggaccactacagaatcgccctgctgtgcaagtgcatcgagctgtggctgcagtacacccagaagagaagatacaagcagctgctgcaggccagagccgacggccacttccagcagagagccctgcccgccgccttccacacctggaacagactgtggagatggagacaccaggagaacgtgctgagcgccagagccaccagattccacagagagaccctggagaagcaggtgttcagcctgtggagacagaagatgttccagcacagagagaacagactggccgagagaatggccatcctgcacgccgagagacagctgctgtacagaagctggttcatgtggcaccagcaggccgccgccagacaccaggagcaggagtggcagaccgtggcctgcgcccaccacagacacggcagactgaagaaggccttctgcctgtggagagagagcgcccagggcctgagaaccgagagaaccggcagagtgagagccgccgagttccacatggcccagctgctgagatgggcctggagccagtggagagagtgcctggccctgagaggcgccgagagacagaagctgatgagagccgacctgcaccaccagcacagcgtgctgcacagagccctgcaggcctgggtgacctaccagggcagagtgagaagcatcctgagagaggtggccgccagagagagccagcacaacagacagctgctgagaggcgccctgagaagatggaaggagaacaccatggccagagtggacgaggccaagaagaccttccaggccagcacccactacagaagaaccatctgcagcaaggtgctggtgcagtggagagaggccgtgagcgtgcagatgtactacagacagcaggaggactgcgccatctgggaggcccagaaggtgctggacagaggctgcctgagaacctggttccagagatggtgggactgcagcagaagaagcgcccagcagagactgcagctggagagagccgtgcagcaccaccacagacagctgctgctggagggcctggccagatggaagacccaccacctgcagtgcgtgagaaagagactgctgcacagacagagcacccagctgctggcccagagactgagcagaacctgcttcagacagtggagacagcagctggccgccagaagacaggagcagagagccaccgtgagagccctgtggttctgggccttcagcctgcaggccaaggtgtgggccacctggctggccttcgtgctggagagaagaagaaagaaggccagactgcagtgggccctgcaggcctaccagggccagctgctgcaggagggcgccaccagactgctgagattcgccgccagcatgaaggccagcagacagcagctgcaggcccagcagcaggtgcaggccgcccacagcctgcacagagccgtgagaagatgcgccaccctgtggaagcagaaggtgctgggcagaggcggcaagccccagcccctggccgccatcgcccccagcagaaaggtgaccttcgagggccccctgctgaacagaatcgccgccggcgccggcgacggcaccctggagaccaagagaccccaggccagcagacccctgggcgccctgggcagactggccgccgaggagccccacgccctggagctgaacaccgcccacagcgccagaaagcagcccagaagaccccacttcctgctggagcccgcccagagccagagaccccagaagccccaggagcacggcctgggcatggcccagcccgccgcccccagcctgaccagacccttcctggccgaggcccccaccgccctggtgccccacagccccctgcccggcgccctgagcagcgcccccggccccaagcagccccccaccgccagcaccggccccgagctgctgctgctgcccctgagcagcttcatgccctgcggcgccgccgcccccgccagagtgagcgcccagagagccacccccagagacaagccccccgtgcccagcagcctggccagcgtgcccgacccccacctgctgctgcccggcgacttcagcgccaccagagccggccccggcctgagcaccgccggcagcctggacctggaggccgagctggaggagatccagcagcagctgctgcactaccagaccaccaagcagaacctgtggagctgcagaagacaggccagcagcctgagaagatggctggagctgaacagagaggagcccggccccgaggaccaggaggtggagcagcaggtgcagaaggagctggagcaggtggagatgcagatccagctgctggccgaggagctgcaggcccagagacagcccatcggcgcctgcgtggccagaatccaggccctgagacaggccctgtgctag

SEQ ID NO: 98730 - DNA, 378 bp, synthetic construct
  misc_feature 1..378: note = Description of Artificial Sequence: Synthetic coding sequence
  source 1..378: mol_type = other DNA
atggacgccgtggccgtgtaccacggcaagatcagcagagagaccggcgagaagctgctgctggccaccggcctggacggcagctacctgctgagagacagcgagagcgtgcccggcgtgtactgcctgtgcgtgctgtaccacggctacatctacacctacagagtgagccagaccgagaccggcagctggagcgccgagaccgcccccggcgtgcacaagagatacttcagaaagatcaagaacctgatcagcgccttccagaagcccgaccagggcatcgtgatccccctgcagtaccccgtggagaagaagagcagcgccagaagcacccagggcatcagagaggaccccgacgtgtgcctgaaggccccctag

SEQ ID NO: 98731 - DNA, 387 bp, synthetic construct
  misc_feature 1..387: note = Description of Artificial Sequence: Synthetic coding sequence
  source 1..387: mol_type = other DNA
atggacgccgtggccgtgtaccacggcaagatcagcagagagaccggcgagaagctgctgctggccaccggcctggacggcagctacctgctgagagacagcgagagcgtgcccggcgtgtactgcctgtgcgtgctgtaccacggctacatctacacctacagagtgagccagaccgagaccggcagctggagcgccgagaccgcccccggcgtgcacaagagatacttcagaaagatcaagaacctgatcagcgccttccagaagcccgaccagggcatcgtgatccccctgcagtaccccgtggagaagaagagcagcgccagaagcacccagggcaccaccggcatcagagaggaccccgacgtgtgcctgaaggccccctag

SEQ ID NO: 98732 - DNA, 177 bp, synthetic construct
  misc_feature 1..177: note = Description of Artificial Sequence: Synthetic coding sequence
  source 1..177: mol_type = other DNA
atggacgccgtggccgtgtaccacggcaagatcagcagagagaccggcgagaagctgctgctggccaccggcctggacggcagctacctgctgagagacagcgagagcgtgcccggcgtgtactgcctgtgcgtgctgcaccactggggctacatcaagttcatcaacaagctgtag

SEQ ID NO: 98733 - DNA, 234 bp, synthetic construct
  misc_feature 1..234: note = Description of Artificial Sequence: Synthetic coding sequence
  source 1..234: mol_type = other DNA
atggacctgccctactaccacggcagactgaccaagcaggactgcgagaccctgctgctgaaggagggcgtggacggcaacttcctgctgagagacagcgagagcatccccggcgtgctgtgcctgtgcgtgagcttcaagaacatcgtgtacacctacagaatcttcagagagaagcacggctactacagaatccagaacagcaacagcgactacgtggacgtgctgccctag

SEQ ID NO: 98734 - DNA, 399 bp, synthetic construct
  misc_feature 1..399: note = Description of Artificial Sequence: Synthetic coding sequence
  source 1..399: mol_type = other DNA
atggacctgccctactaccacggcagactgaccaagcaggactgcgagaccctgctgctgaaggagggcgtggacggcaacttcctgctgagagacagcgagagcatccccggcgtgctgtgcctgtgcgtgagcttcaagaacatcgtgtacacctacagaatcttcagagagaagcacggctactacagaatccagaccgccgagggcagccccaagcaggtgttccccagcctgaaggagctgatcagcaagttcgagaagcccaaccagggcatggtggtgcacctgctgaagcccatcaagagaaccagccccagcctgagatggagaggcctgaagctggagctggagaccttcgtgaacagcaacagcgactacgtggacgtgctgccctag

SEQ ID NO: 98735 - DNA, 2271 bp, synthetic construct
  misc_feature 1..2271: note = Description of Artificial Sequence: Synthetic coding sequence
  source 1..2271: mol_type = other DNA
atgaacggcgcccccagccccgaggacggcgccagccccagcagcccccccctgccccccccccccccccccagctggagagagttctgcgagagccacgccagagccgccgccctggacttcgccagaagattcagactgtacctggccagccacccccagtacgccggccccggcgccgaggccgccttcagcagaagattcgccgagctgttcctgcagcacttcgaggccgaggtggccagagccagcggcagcctgagcccccccatcctggcccccctgagccccggcgccgagatcagcccccacgacctgagcctggagagctgcagagtgggcggccccctggccgtgctgggccccagcagaagcagcgaggacctggccggccccctgcccagcagcgtgagcagcagcagcaccaccagcagcaagcccaagctgaagaagagattcagcctgagaagcgtgggcagaagcgtgagaggcagcgtgagaggcatcctgcagtggagaggcaccgtggacccccccagcagcgccggccccctggagaccagcagcggcccccccgtgctgggcggcaacagcaacagcaacagcagcggcggcgccggcaccgtgggcagaggcctggtgagcgacggcaccagccccggcgagagatggacccacagattcgagagactgagactgagcagaggcggcggcgccctgaaggacggcgccggcatggtgcagagagaggagctgctgagcttcatgggcgccgaggaggccgcccccgaccccgccggcgtgggcagaggcggcggcgtggccggcccccccagcggcggcggcggccagccccagtggcagaagtgcagactgctgctgagaagcgagggcgagggcggcggcggcagcagactggagttcttcgtgccccccaaggccagcagacccagactgagcatcccctgcagcagcatcaccgacgtgagaaccaccaccgccctggagatgcccgacagagagaacaccttcgtggtgaaggtggagggccccagcgagtacatcatggagaccgtggacgcccagcacgtgaaggcctgggtgagcgacatccaggagtgcctgagccccggcccctgccccgccaccagccccagacccatgaccctgcccctggcccccggcaccagcttcctgaccagagagaacaccgacagcctggagctgagctgcctgaaccacagcgagagcctgcccagccaggacctgctgctgggccccagcgagagcaacgacagactgagccagggcgcctacggcggcctgagcgacagacccagcgccagcatcagccccagcagcgccagcatcgccgccagccacttcgacagcatggagctgctgccccccgagctgccccccagaatccccatcgaggagggcccccccaccggcaccgtgcaccccctgagcgccccctacccccccctggacacccccgagaccgccaccggcagcttcctgttccagggcgagcccgagggcggcgagggcgaccagcccctgagcggctacccctggttccacggcatgctgagcagactgaaggccgcccagctggtgctgaccggcggcaccggcagccacggcgtgttcctggtgagacagagcgagaccagaagaggcgagtacgtgctgaccttcaacttccagggcaaggccaagcacctgagactgagcctgaacgaggagggccagtgcagagtgcagcacctgtggttccagagcatcttcgacatgctggagcacttcagagtgcaccccatccccctggagagcggcggcagcagcgacgtggtgctggtgagctacgtgcccagcagccagagacagcaggagcccaccaccagccacgaccccccccagccccccgagccccccagctggaccgaccccccccagcccggcgccgaggaggccagcagagcccccgaggtggccgccgccgccgccgccgccgccaaggagagacaggagaaggagaaggccggcggcggcggcgtgcccgaggagctggtgcccgtggtggagctggtgcccgtggtggagctggaggaggccatcgcccccggcagcgaggcccagggcgccggcagcggcggcgacgccggcgtgccccccatggtgcagctgcagcagagccccctgggcggcgacggcgaggagggcggccaccccagagccatcaacaaccagtacagcttcgtgtag

SEQ ID NO: 98736 - DNA, 2016 bp, synthetic construct
  misc_feature 1..2016: note = Description of Artificial Sequence: Synthetic coding sequence
  source 1..2016: mol_type = other DNA
atgaacggcgcccccagccccgaggacggcgccagccccagcagcccccccctgccccccccccccccccccagctggagagagttctgcgagagccacgccagagccgccgccctggacttcgccagaagattcagactgtacctggccagccacccccagtacgccggccccggcgccgaggccgccttcagcagaagattcgccgagctgttcctgcagcacttcgaggccgaggtggccagagccagcggcagcctgagcccccccatcctggcccccctgagccccggcgccgagatcagcccccacgacctgagcctggagagctgcagagtgggcggccccctggccgtgctgggccccagcagaagcagcgaggacctggccggccccctgcccagcagcgtgagcagcagcagcaccaccagcagcaagcccaagctgaagaagagattcagcctgagaagcgtgggcagaagcgtgagaggcagcgtgagaggcatcctgcagtggagaggcaccgtggacccccccagcagcgccggccccctggagaccagcagcggcccccccgtgctgggcggcaacagcaacagcaacagcagcggcggcgccggcaccgtgggcagaggcctggtgagcgacggcaccagccccggcgagagatggacccacagattcgagagactgagactgagcagaggcggcggcgccctgaaggacggcgccggcatggtgcagagagaggagctgctgagcttcatgggcgccgaggaggccgcccccgaccccgccggcgtgggcagaggcggcggcgtggccggcccccccagcggcggcggcggccagccccagtggcagaagtgcagactgctgctgagaagcgagggcgagggcggcggcggcagcagactggagttcttcgtgccccccaaggccagcagacccagactgagcatcccctgcagcagcatcaccgacgtgagaaccaccaccgccctggagatgcccgacagagagaacaccttcgtggtgaaggtggagggccccagcgagtacatcatggagaccgtggacgcccagcacgtgaaggcctgggtgagcgacatccaggagtgcctgagccccggcccctgccccgccaccagccccagacccatgaccctgcccctggcccccggcaccagcttcctgaccagagagaacaccgacagcctggagctgagctgcctgaaccacagcgagagcctgcccagccaggacctgctgctgggccccagcgagagcaacgacagactgagccagggcgcctacggcggcctgagcgacagacccagcgccagcatcagccccagcagcgccagcatcgccgccagccacttcgacagcatggagctgctgccccccgagctgccccccagaatccccatcgaggagggcccccccaccggcaccgtgcaccccctgagcgccccctacccccccctggacacccccgagaccgccaccggcagcttcctgttccagggcgagcccgagggcggcgagggcgaccagcccctgagcggctacccctggttccacggcatgctgagcagactgaaggccgcccagctggtgctgaccggcggcaccggcagccacggcgtgttcctggtgagacagagcgagaccagaagaggcgagtacgtgctgaccttcaacttccagggcaaggccaagcacctgagactgagcctgaacgaggagggccagtgcagagtgcagcacctgtggttccagagcatcttcgacatgctggagcacttcagagtgcaccccatccccctggagagcggcggcagcagcgacgtggtgctggtgagctacgtgcccagcagccagagacagcagggcagagagcaggccggcagccacgccggcgtgtgcgagggcgacggctgccaccccgacgccagctgcaccctgatgcccttcggcgccagcgactgcgtgaccgaccacctgccctag

SEQ ID NO: 98737 - DNA, 2052 bp, synthetic construct
  misc_feature 1..2052: note = Description of Artificial Sequence: Synthetic coding sequence
  source 1..2052: mol_type = other DNA
atgaacggcgcccccagccccgaggacggcgccagccccagcagcccccccctgccccccccccccccccccagctggagagagttctgcgagagccacgccagagccgccgccctggacttcgccagaagattcagactgtacctggccagccacccccagtacgccggccccggcgccgaggccgccttcagcagaagattcgccgagctgttcctgcagcacttcgaggccgaggtggccagagccagcggcagcctgagcccccccatcctggcccccctgagccccggcgccgagatcagcccccacgacctgagcctggagagctgcagagtgggcggccccctggccgtgctgggccccagcagaagcagcgaggacctggccggccccctgcccagcagcgtgagcagcagcagcaccaccagcagcaagcccaagctgaagaagagattcagcctgagaagcgtgggcagaagcgtgagaggcagcgtgagaggcatcctgcagtggagaggcaccgtggacccccccagcagcgccggccccctggagaccagcagcggcccccccgtgctgggcggcaacagcaacagcaacagcagcggcggcgccggcaccgtgggcagaggcctggtgagcgacggcaccagccccggcgagagatggacccacagattcgagagactgagactgagcagaggcggcggcgccctgaaggacggcgccggcatggtgcagagagaggagctgctgagcttcatgggcgccgaggaggccgcccccgaccccgccggcgtgggcagaggcggcggcgtggccggcccccccagcggcggcggcggccagccccagtggcagaagtgcagactgctgctgagaagcgagggcgagggcggcggcggcagcagactggagttcttcgtgccccccaaggccagcagacccagactgagcatcccctgcagcagcatcaccgacgtgagaaccaccaccgccctggagatgcccgacagagagaacaccttcgtggtgaaggtggagggccccagcgagtacatcatggagaccgtggacgcccagcacgtgaaggcctgggtgagcgacatccaggagtgcctgagccccggcccctgccccgccaccagccccagacccatgaccctgcccctggcccccggcaccagcttcctgaccagagagaacaccgacagcctggagctgagctgcctgaaccacagcgagagcctgcccagccaggacctgctgctgggccccagcgagagcaacgacagactgagccagggcgcctacggcggcctgagcgacagacccagcgccagcatcagccccagcagcgccagcatcgccgccagccacttcgacagcatggagctgctgccccccgagctgccccccagaatccccatcgaggagggcccccccaccggcaccgtgcaccccctgagcgccccctacccccccctggacacccccgagaccgccaccggcagcttcctgttccagggcgagcccgagggcggcgagggcgaccagcccctgagcggctacccctggttccacggcatgctgagcagactgaaggccgcccagctggtgctgaccggcggcaccggcagccacggcgtgttcctggtgagacagagcgagaccagaagaggcgagtacgtgctgaccttcaacttccagggcaaggccaagcacctgagactgagcctgaacgaggagggccagtgcagagtgcagcacctgtggttccagagcatcttcgacatgctggagcacttcagagtgcaccccatccccctggagagcggcggcagcagcgacgtggtgctggtgagctacgtgcccagcagccagagacagcagggcgagcagagcagaagcgccggcgaggaggtgcccgtgcaccccagaagcgaggccggcagcagactgggcgccatgagaggctgcgccagagagatggacgccacccccatgccccccgcccccagctgccccagcgagagagtgaccgtgtag

SEQ ID NO: 98738 - DNA, 2016 bp, synthetic construct; identical to SEQ ID NO: 98736
  misc_feature 1..2016: note = Description of Artificial Sequence: Synthetic coding sequence
  source 1..2016: mol_type = other DNA

SEQ ID NO: 98739 - DNA, 1008 bp, synthetic construct
  misc_feature 1..1008: note = Description of Artificial Sequence: Synthetic coding sequence
  source 1..1008: mol_type = other DNA
atgcccgacagagagaacaccttcgtggtgaaggtggagggccccagcgagtacatcatggagaccgtggacgcccagcacgtgaaggcctgggtgagcgacatccaggagtgcctgagccccggcccctgccccgccaccagccccagacccatgaccctgcccctggcccccggcaccagcttcctgaccagagagaacaccgacagcctggagctgagctgcctgaaccacagcgagagcctgcccagccaggacctgctgctgggccccagcgagagcaacgacagactgagccagggcgcctacggcggcctgagcgacagacccagcgccagcatcagccccagcagcgccagcatcgccgccagccacttcgacagcatggagctgctgccccccgagctgccccccagaatccccatcgaggagggcccccccaccggcaccgtgcaccccctgagcgccccctacccccccctggacacccccgagaccgccaccggcagcttcctgttccagggcgagcccgagggcggcgagggcgaccagcccctgagcggctacccctggttccacggcatgctgagcagactgaaggccgcccagctggtgctgaccggcggcaccggcagccacggcgtgttcctggtgagacagagcgagaccagaagaggcgagtacgtgctgaccttcaacttccagggcaaggccaagcacctgagactgagcctgaacgaggagggccagtgcagagtgcagcacctgtggttccagagcatcttcgacatgctggagcacttcagagtgcaccccatccccctggagagcggcggcagcagcgacgtggtgctggtgagctacgtgcccagcagccagagacagcagggcagagagcaggccggcagccacgccggcgtgtgcgagggcgacggctgccaccccgacgccagctgcaccctgatgcccttcggcgccagcgactgcgtgaccgaccacctgccctag

SEQ ID NO: 98740 - DNA, 1122 bp, synthetic construct
  misc_feature 1..1122: note = Description of Artificial Sequence: Synthetic coding sequence
  source 1..1122: mol_type = other DNA
atggccgaggccagcagacccagactgagcatcccctgcagcagcatcaccgacgtgagaaccaccaccgccctggagatgcccgacagagagaacaccttcgtggtgaaggtggagggccccagcgagtacatcatggagaccgtggacgcccagcacgtgaaggcctgggtgagcgacatccaggagtgcctgagccccggcccctgccccgccaccagccccagacccatgaccctgcccctggcccccggcaccagcttcctgaccagagagaacaccgacagcctggagctgagctgcctgaaccacagcgagagcctgcccagccaggacctgctgctgggccccagcgagagcaacgacagactgagccagggcgcctacggcggcctgagcgacagacccagcgccagcatcagccccagcagcgccagcatcgccgccagccacttcgacagcatggagctgctgccccccgagctgccccccagaatccccatcgaggagggcccccccaccggcaccgtgcaccccctgagcgccccctacccccccctggacacccccgagaccgccaccggcagcttcctgttccagggcgagcccgagggcggcgagggcgaccagcccctgagcggctacccctggttccacggcatgctgagcagactgaaggccgcccagctggtgctgaccggcggcaccggcagccacggcgtgttcctggtgagacagagcgagaccagaagaggcgagtacgtgctgaccttcaacttccagggcaaggccaagcacctgagactgagcctgaacgaggagggccagtgcagagtgcagcacctgtggttccagagcatcttcgacatgctggagcacttcagagtgcaccccatccccctggagagcggcggcagcagcgacgtggtgctggtgagctacgtgcccagcagccagagacagcagggcgagcagagcagaagcgccggcgaggaggtgcccgtgcaccccagaagcgaggccggcagcagactgggcgccatgagaggctgcgccagagagatggacgccacccccatgccccccgcccccagctgccccagcgagagagtgaccgtgtag

SEQ ID NO: 98741 - DNA, 1728 bp, synthetic construct
  misc_feature 1..1728: note = Description of Artificial Sequence: Synthetic coding sequence
  source 1..1728: mol_type = other DNA
atgaacggccccgccctgcagcccagcagccccagcagcgcccccagcgccagccccgccgccgcccccagaggctggagcgagttctgcgagctgcacgccgtggccgccgccagagagctggccagacagtactggctgttcgccagagagcacccccagcacgcccccctgagagccgagctggtgagcctgcagttcaccgacctgttccagagatacttctgcagagaggtgagagacggcagagcccccggcagagactacagagacaccggcagaggcccccccgccaaggccgaggccagccccgagcccggccccggccccgccgcccccggcctgcccaaggccagaagcagcgaggagctggccccccccagaccccccggcccctgcagcttccagcacttcagaagaagcctgagacacatcttcagaagaagaagcgccggcgagctgcccgccgcccacaccgccgccgcccccggcacccccggcgaggccgccgagacccccgccagacccggcctggccaagaagttcctgccctggagcctggccagagagcccccccccgaggccctgaaggaggccgtgctgagatacagcctggccgacgaggccagcatggacagcggcgccagatggcagagaggcagactggccctgagaagagcccccggccccgacggccccgacagagtgctggagctgttcgacccccccaagagcagcagacccaagctgcaggccgcctgcagcagcatccaggaggtgagatggtgcaccagactggagatgcccgacaacctgtacaccttcgtgctgaaggtgaaggacagaaccgacatcatcttcgaggtgggcgacgagcagcagctgaacagctggatggccgagctgagcgagtgcaccggcagaggcctggagagcaccgaggccgagatgcacatccccagcgccctggagcccagcaccagcagcagccccagaggcagcaccgacagcctgaaccagggcgccagccccggcggcctgctggaccccgcctgccagaagaccgaccacttcctgagctgctacccctggttccacggccccatcagcagagtgaaggccgcccagctggtgcagctgcagggccccgacgcccacggcgtgttcctggtgagacagagcgagaccagaagaggcgagtacgtgctgaccttcaacttccagggcatcgccaagcacctgagactgagcctgaccgagagaggccagtgcagagtgcagcacctgcacttccccagcgtggtggacatgctgcaccacttccagagaagccccatccccctggagtgcggcgccgcctgcgacgtgagactgagcagctacgtggtggtggtgagccagccccccggcagctgcaacaccgtgctgttccccttcagcctgccccactgggacagcgagagcctgccccactggggcagcgagctgggcctgccccacctgagcagcagcggctgccccagaggcctgagccccgagggcctgcccggcagaagcagcccccccgagcagatcttccacctggtgcccagccccgaggagctggccaacagcctgcagcacctggagcacgagcccgtgaacagagccagagacagcgactacgagatggacagcagcagcagaagccacctgagagccatcgacaaccagtacacccccctgtag

SEQ ID NO: 98742 - DNA, 1122 bp, synthetic construct
  misc_feature 1..1122: note = Description of Artificial Sequence: Synthetic coding sequence
  source 1..1122: mol_type = other DNA
atgggcttccccgtgctgtgcagaggctggagaagaacctggcccggctgcgccagctggctgggcgccccccccccccagaagcccctgctgagccccctgctgctgaaccacagaagcagcaagagcagcagacccaagctgcaggccgcctgcagcagcatccaggaggtgagatggtgcaccagactggagatgcccgacaacctgtacaccttcgtgctgaaggtgaaggacagaaccgacatcatcttcgaggtgggcgacgagcagcagctgaacagctggatggccgagctgagcgagtgcaccggcagaggcctggagagcaccgaggccgagatgcacatccccagcgccctggagcccagcaccagcagcagccccagaggcagcaccgacagcctgaaccagggcgccagccccggcggcctgctggaccccgcctgccagaagaccgaccacttcctgagctgctacccctggttccacggccccatcagcagagtgaaggccgcccagctggtgcagctgcagggccccgacgcccacggcgtgttcctggtgagacagagcgagaccagaagaggcgagtacgtgctgaccttcaacttccagggcatcgccaagcacctgagactgagcctgaccgagagaggccagtgcagagtgcagcacctgcacttccccagcgtggtggacatgctgcaccacttccagagaagccccatccccctggagtgcggcgccgcctgcgacgtgagactgagcagctacgtggtggtggtgagccagccccccggcagctgcaacaccgtgctgttccccttcagcctgccccactgggacagcgagagcctgccccactggggcagcgagctgggcctgccccacctgagcagcagcggctgccccagaggcctgagccccgagggcctgcccggcagaagcagcccccccgagcagatcttccacctggtgcccagccccgaggagctggccaacagcctgcagcacctggagcacgagcccgtgaacagagccagagacagcgactacgagatggacagcagcagcagaagccacctgagagccatcgacaaccagtacacccccctgtag

SEQ ID NO: 98743 - DNA, 1209 bp, synthetic construct
  misc_feature 1..1209: note = Description of Artificial Sequence: Synthetic coding sequence
  source 1..1209: mol_type = other DNA
atgatcccccccagcagccccagagaggacggcgtggacggcctgcccaaggaggccgtgggcgccgagcagccccccagccccgccagcaccagcagccaggagagcaagctgcagaagctgaagagaagcctgagcttcaagaccaagagcctgagaagcaagagcgccgacaacttcttccagagaaccaacagcgaggacatgaagctgcaggcccacatggtggccgagatcagccccagcagcagccccctgcccgcccccggcagcctgaccagcacccccgccagagccggcctgcaccccggcggcaaggcccacgccttccaggagtacatcttcaagaagcccaccttctgcgacgtgtgcaaccacatgatcgtgggcaccaacgccaagcacggcctgagatgcaaggcctgcaagatgagcatccaccacaagtgcaccgacggcctggccccccagagatgcatgggcaagctgcccaagggcttcagaagatactacagcagccccctgctgatccacgagcagttcggctgcatcaaggaggtgatgcccatcgcctgcggcaacaaggtggaccccgtgtacgagaccctgagattcggcaccagcctggcccagagaaccaagaagggcagcagcggcagcggcagcgacagcccccacagaaccagcaccagcgacctggtggaggtgcccgaggaggccaacggccccggcggcggctacgacctgagaaagagaagcaacagcgtgttcacctaccccgagaacggcaccgacgacttcagagaccccgccaagaacatcaaccaccagggcagcctgagcaaggaccccctgcagatgaacacctacgtggccctgtacaagttcgtgccccaggagaacgaggacctggagatgagacccggcgacatcatcaccctgctggaggacagcaacgaggactggtggaagggcaagatccaggacagaatcggcttcttccccgccaacttcgtgcagagactgcagcagaacgagaagatcttcagatgcgtgagaaccttcatcggctgcaaggagcagggccagatcaccctgaaggagaaccagatctgcgtgagcagcgaggaggagcaggacggcttcatcagagtgctgagcggcaagaagaagggcctgatccccctggacgtgctggagaacatctag

SEQ ID NO: 98744 - DNA, 1005 bp, synthetic construct
  misc_feature 1..1005: note = Description of Artificial Sequence: Synthetic coding sequence
  source 1..1005: mol_type = other DNA
atgaagctgcaggcccacatggtggccgagatcagccccagcagcagccccctgcccgcccccggcagcctgaccagcacccccgccagagccggcctgcaccccggcggcaaggcccacgccttccaggagtacatcttcaagaagcccaccttctgcgacgtgtgcaaccacatgatcgtgggcaccaacgccaagcacggcctgagatgcaaggcctgcaagatgagcatccaccacaagtgcaccgacggcctggccccccagagatgcatgggcaagctgcccaagggcttcagaagatactacagcagccccctgctgatccacgagcagttcggctgcatcaaggaggtgatgcccatcgcctgcggcaacaaggtggaccccgtgtacgagaccctgagattcggcaccagcctggcccagagaaccaagaagggcagcagcggcagcggcagcgacagcccccacagaaccagcaccagcgacctggtggaggtgcccgaggaggccaacggccccggcggcggctacgacctgagaaagagaagcaacagcgtgttcacctaccccgagaacggcaccgacgacttcagagaccccgccaagaacatcaaccaccagggcagcctgagcaaggaccccctgcagatgaacacctacgtggccctgtacaagttcgtgccccaggagaacgaggacctggagatgagacccggcgacatcatcaccctgctggaggacagcaacgaggactggtggaagggcaagatccaggacagaatcggcttcttccccgccaacttcgtgcagagactgcagcagaacgagaagatcttcagatgcgtgagaaccttcatcggctgcaaggagcagggccagatcaccctgaaggagaaccagatctgcgtgagcagcgaggaggagcaggacggcttcatcagagtgctgagcggcaagaagaagggcctgatccccctggacgtgctggagaacatctag

SEQ ID NO: 98745 - DNA, 4422 bp, synthetic construct
  misc_feature 1..4422: note = Description of Artificial Sequence: Synthetic coding sequence
  source 1..4422: mol_type = other DNA
gtggccatcatcgccggcaacttcgagctggccgagtacatcaagaaccacaaggagaccgacatcgtgcccttcagagaggcccccgcctacagcaacagaagaagaagaccccccaacaccctggccgcccccagagtgctgctgagaagcaacagcgacaacaacctgaacgccagcgcccccgactgggccgtgtgcagcaccgccaccagccacagaagcctgagcccccagctgctgcagcagatgcccagcaagcccgagggcgccgccaagaccatcggcagctacgtgcccggccccagaagcagaagccccagcctgaacagactgggcggcgccggcgaggacggcaagagaccccagcccctgtggcacgtgggcagccccttcgccctgggcgccaacaaggacagcctgagcgccttcgagtaccccggccccaagagaaagctgtacagcgccgtgcccggcagactgttcgtggccgtgaagccctaccagccccaggtggacggcgagatccccctgcacagaggcgacagagtgaaggtgctgagcatcggcgagggcggcttctgggagggcagcgccagaggccacatcggctggttccccgccgagtgcgtggaggaggtgcagtgcaagcccagagacagccaggccgagaccagagccgacagaagcaagaagctgttcagacactacaccgtgggcagctacgacagcttcgacaccagcagcgactgcatcatcgaggagaagaccgtggtgctgcagaagaaggacaacgagggcttcggcttcgtgctgagaggcgccaaggccgacacccccatcgaggagttcacccccacccccgccttccccgccctgcagtacctggagagcgtggacgagggcggcgtggcctggcaggccggcctgagaaccggcgacttcctgatcgaggtgaacaacgagaacgtggtgaaggtgggccacagacaggtggtgaacatgatcagacagggcggcaaccacctggtgctgaaggtggtgaccgtgaccagaaacctggaccccgacgacaccgccagaaagaaggccccccccccccccaagagagcccccaccaccgccctgaccctgagaagcaagagcatgaccagcgagctggaggagctggtggacaaggacaagcccgaggagatcgtgcccgccagcaagcccagcagagccgccgagaacatggccgtggagcccagagtggccaccatcaagcagagacccagcagcagatgcttccccgccggcagcgacatgaacagcgtgtacgagagacagggcatcgccgtgatgacccccaccgtgcccggcagccccaaggcccccttcctgggcatccccagaggcaccatgagaagacagaagagcatcgacagcagaatcttcctgagcggcatcaccgaggaggagagacagttcctggccccccccatgctgaagttcaccagaagcctgagcatgcccgacaccagcgaggacatccccccccccccccagagcgtgccccccagcccccccccccccagccccaccacctacaactgccccaagagccccacccccagagtgtacggcaccatcaagcccgccttcaaccagaacagcgccgccaaggtgagccccgccaccagaagcgacaccgtggccaccatgatgagagagaagggcatgtacttcagaagagagctggacagatacagcctggacagcgaggacctgtacagcagaaacgccggcccccaggccaacttcagaaacaagagaggccagatgcccgagaacccctacagcgaggtgggcaagatcgccagcaaggccgtgtacgtgcccgccaagcccgccagaagaaagggcatgctggtgaagcagagcaacgtggaggacagccccgagaagacctgcagcatccccatccccaccatcatcgtgaaggagcccagcaccagcagcagcggcaagagcagccagggcagcagcatggagatcgacccccaggcccccgagccccccagccagctgagacccgacgagagcctgaccgtgagcagccccttcgccgccgccatcgccggcgccgtgagagacagagagaagagactggaggccagaagaaacagccccgccttcctgagcaccgacctgggcgacgaggacgtgggcctgggcccccccgcccccagaaccagacccagcatgttccccgaggagggcgacttcgccgacgaggacagcgccgagcagctgagcagccccatgcccagcgccacccccagagagcccgagaaccacttcgtgggcggcgccgaggccagcgcccccggcgaggccggcagacccctgaacagcaccagcaaggcccagggccccgagagcagccccgccgtgcccagcgccagcagcggcaccgccggccccggcaactacgtgcaccccctgaccggcagactgctggaccccagcagccccctggccctggccctgagcgccagagacagagccatgaaggagagccagcagggccccaagggcgaggcccccaaggccgacctgaacaagcccctgtacatcgacaccaagatgagacccagcctggacgccggcttccccaccgtgaccagacagaacaccagaggccccctgagaagacaggagaccgagaacaagtacgagaccgacctgggcagagacagaaagggcgacgacaagaagaacatgctgatcgacatcatggacaccagccagcagaagagcgccggcctgctgatggtgcacaccgtggacgccaccaagctggacaacgccctgcaggaggaggacgagaaggccgaggtggagatgaagcccgacagcagccccagcgaggtgcccgagggcgtgagcgagaccgagggcgccctgcagatcagcgccgcccccgagcccaccaccgtgcccggcagaaccatcgtggccgtgggcagcatggaggaggccgtgatcctgcccttcagaatcccccccccccccctggccagcgtggacctggacgaggacttcatcttcaccgagcccctgcccccccccctggagttcgccaacagcttcgacatccccgacgacagagccgccagcgtgcccgccctgagcgacctggtgaagcagaagaagagcgacaccccccagagccccagcctgaacagcagccagcccaccaacagcgccgacagcaagaagcccgccagcctgagcaactgcctgcccgccagcttcctgcccccccccgagagcttcgacgccgtggccgacagcggcatcgaggaggtggacagcagaagcagcagcgaccaccacctggagaccaccagcaccatcagcaccgtgagcagcatcagcaccctgagcagcgagggcggcgagaacgtggacacctgcaccgtgtacgccgacggccaggccttcatggtggacaagccccccgtgccccccaagcccaagatgaagcccatcatccacaagagcaacgccctgtaccaggacgccctggtggaggaggacgtggacagcttcgtgatccccccccccgcccccccccccccccccggcagcgcccagcccggcatggccaaggtgctgcagcccagaaccagcaagctgtggggcgacgtgaccgagatcaagagccccatcctgagcggccccaaggccaacgtgatcagcgagctgaacagcatcctgcagcagatgaacagagagaagctggccaagcccggcgagggcctggacagccccatgggcgccaagagcgccagcctggcccccagaagccccgagatcatgagcaccatcagcggcaccagaagcaccaccgtgaccttcaccgtgagacccggcaccagccagcccatcaccctgcagagcagaccccccgactacgagagcagaaccagcggcaccagaagagcccccagccccgtggtgagccccaccgagatgaacaaggagaccctgcccgcccccctgagcgccgccaccgccagccccagccccgccctgagcgacgtgttcagcctgcccagccagccccccagcggcgacctgttcggcctgaaccccgccggcagaagcagaagccccagccccagcatcctgcagcagcccatcagcaacaagcccttcaccaccaagcccgtgcacctgtggaccaagcccgacgtggccgactggctggagagcctgaacctgggcgagcacaaggaggccttcatggacaacgagatcgacggcagccacctgcccaacctgcagaaggaggacctgatcgacctgggcgtgaccagagtgggccacagaatgaacatcgagagagccctgaagcagctgctggacagatag

SEQ ID NO: 98746 - DNA, 5553 bp, synthetic construct
  misc_feature 1..5553: note = Description of Artificial Sequence: Synthetic coding sequence
  source 1..5553: mol_type = other DNA
atgcccagaagccccaccagcagcgaggacgagatggcccagagcttcagcgactacagcgtgggcagcgagagcgacagcagcaaggaggagaccatctacgacaccatcagagccaccgccgagaagcccggcggcgccagaaccgaggagagccagggcaacaccctggtgatcagagtggtgatccacgacctgcagcagaccaagtgcatcagattcaaccccgacgccaccgtgtgggtggccaagcagagaatcctgtgcaccctgacccagagcctgaaggacgtgctgaactacggcctgttccagcccgccagcaacggcagagacggcaagttcctggacgaggagagactgctgagagagtacccccagcccgtgggcgagggcgtgcccagcctggagttcagatacaagaagagagtgtacaagcaggccagcctggacgagaagcagctggccaagctgcacaccaagaccaacctgaagaagtgcatggaccacatccagcacagactggtggagaagatcaccaagatgctggacagaggcctggaccccaacttccacgaccccgagaccggcgagacccccctgaccctggccgcccagctggacgacagcgtggaggtgatcaaggccctgaagaacggcggcgcccacctggacttcagagccaaggacggcatgaccgccctgcacaaggccgccagagccagaaaccaggtggccctgaagaccctgctggagctgggcgccagccccgactacaaggacagctacggcctgacccccctgtaccacaccgccatcgtgggcggcgacccctactgctgcgagctgctgctgcacgagcacgccaccgtgtgctgcaaggacgagaacggctggcacgagatccaccagagcagatgctggggccacatcagcgagccccaccacaccctgctgagcggcagcgccagaagccagcagagcagaagcgccagcagcgccctgcacgtgtgcgccatgtacagcagcttcagctgcgtgagaatcagcctgctgttccacggcagaatcaccgagctgaagcagtacaagaagagcacccccttccaggtggccatcatcgccggcaacttcgagctggccgagtacatcaagaaccacaaggagaccgacatcgtgcccttcagagaggcccccgcctacagcaacagaagaagaagaccccccaacaccctggccgcccccagagtgctgctgagaagcaacagcgacaacaacctgaacgccagcgcccccgactgggccgtgtgcagcaccgccaccagccacagaagcctgagcccccagctgctgcagcagatgcccagcaagcccgagggcgccgccaagaccatcggcagctacgtgcccggccccagaagcagaagccccagcctgaacagactgggcggcgccggcgaggacggcaagagaccccagcccctgtggcacgtgggcagccccttcgccctgggcgccaacaaggacagcctgagcgccttcgagtaccccggccccaagagaaagctgtacagcgccgtgcccggcagactgttcgtggccgtgaagccctaccagccccaggtggacggcgagatccccctgcacagaggcgacagagtgaaggtgctgagcatcggcgagggcggcttctgggagggcagcgccagaggccacatcggctggttccccgccgagtgcgtggaggaggtgcagtgcaagcccagagacagccaggccgagaccagagccgacagaagcaagaagctgttcagacactacaccgtgggcagctacgacagcttcgacaccagcagcgactgcatcatcgaggagaagaccgtggtgctgcagaagaaggacaacgagggcttcggcttcgtgctgagaggcgccaaggccgacacccccatcgaggagttcacccccacccccgccttccccgccctgcagtacctggagagcgtggacgagggcggcgtggcctggcaggccggcctgagaaccggcgacttcctgatcgaggtgaacaacgagaacgtggtgaaggtgggccacagacaggtggtgaacatgatcagacagggcggcaaccacctggtgctgaaggtggtgaccgtgaccagaaacctggaccccgacgacaccgccagaaagaaggccccccccccccccaagagagcccccaccaccgccctgaccctgagaagcaagagcatgaccagcgagctggaggagctggtggacaagggcgtgatcagaaaggtgagcgacaagcccgaggagatcgtgcccgccagcaagcccagcagagccgccgagaacatggccgtggagcccagagtggccaccatcaagcagagacccagcagcagatgcttccccgccggcagcgacatgaacagcgtgtacgagagacagggcatcgccgtgatgacccccaccgtgcccggcagccccaaggcccccttcctgggcatccccagaggcaccatgagaagacagaagagcatcgacagcagaatcttcctgagcggcatcaccgaggaggagagacagttcctggccccccccatgctgaagttcaccagaagcctgagcatgcccgacaccagcgaggacatccccccccccccccagagcgtgccccccagcccccccccccccagccccaccacctacaactgccccaagagccccacccccagagtgtacggcaccatcaagcccgccttcaaccagaacagcgccgccaaggtgagccccgccaccagaagcgacaccgtggccaccatgatgagagagaagggcatgtacttcagaagagagctggacagatacagcctggacagcgaggacctgtacagcagaaacgccggcccccaggccaacttcagaaacaagagaggccagatgcccgagaacccctacagcgaggtgggcaagatcgccagcaaggccgtgtacgtgcccgccaagcccgccagaagaaagggcatgctggtgaagcagagcaacgtggaggacagccccgagaagacctgcagcatccccatccccaccatcatcgtgaaggagcccagcaccagcagcagcggcaagagcagccagggcagcagcatggagatcgacccccaggcccccgagccccccagccagctgagacccgacgagagcctgaccgtgagcagccccttcgccgccgccatcgccggcgccgtgagagacagagagaagagactggaggccagaagaaacagccccgccttcctgagcaccgacctgggcgacgaggacgtgggcctgggcccccccgcccccagaaccagacccagcatgttccccgaggagggcgacttcgccgacgaggacagcgccgagcagctgagcagccccatgcccagcgccacccccagagagcccgagaaccacttcgtgggcggcgccgaggccagcgcccccggcgaggccggcagacccctgaacagcaccagcaaggcccagggccccgagagcagccccgccgtgcccagcgccagcagcggcaccgccggccccggcaactacgtgcaccccctgaccggcagactgctggaccccagcagccccctggccctggccctgagcgccagagacagagccatgaaggagagccagcagggccccaagggcgaggcccccaaggccgacctgaacaagcccctgtacatcgacaccaagatgagacccagcctggacgccggcttccccaccgtgaccagacagaacaccagaggccccctgagaagacaggagaccgagaacaagtacgagaccgacctgggcagagacagaaagggcgacgacaagaagaacatgctgatcgacatcatggacaccagccagcagaagagcgccggcctgctgatggtgcacaccgtggacgccaccaagctggacaacgccctgcaggaggaggacgagaaggccgaggtggagatgaagcccgacagcagccccagcgaggtgcccgagggcgtgagcgagaccgagggcgccctgcagatcagcgccgcccccgagcccaccaccgtgcccggcagaaccatcgtggccgtgggcagcatggaggaggccgtgatcctgcccttcagaatcccccccccccccctggccagcgtggacctggacgaggacttcatcttcaccgagcccctgcccccccccctggagttcgccaacagcttcgacatccccgacgacagagccgccagcgtgcccgccctgagcgacctggtgaagcagaagaagagcgacaccccccagagccccagcctgaacagcagccagcccaccaacagcgccgacagcaagaagcccgccagcctgagcaactgcctgcccgccagcttcctgcccccccccgagagcttcgacgccgtggccgacagcggcatcgaggaggtggacagcagaagcagcagcgaccaccacctggagaccaccagcaccatcagcaccgtgagcagcatcagcaccctgagcagcgagggcggcgagaacgtggacacctgcaccgtgtacgccgacggccaggccttcatggtggacaagccccccgtgccccccaagcccaagatgaagcccatcatccacaagagcaacgccctgtaccaggacgccctggtggaggaggacgtggacagcttcgtgatccccccccccgcccccccccccccccccggcagcgcccagcccggcatggccaaggtgctgcagcccagaaccagcaagctgtggggcgacgtgaccgagatcaagagccccatcctgagcggccccaaggccaacgtgatcagcgagctgaacagcatcctgcagcagatgaacagagagaagctggccaagcccggcgagggcctggacagccccatgggcgccaagagcgccagcctggcccccagaagccccgagatcatgagcaccatcagcggcaccagaagcaccaccgtgaccttcaccgtgagacccggcaccagccagcccatcaccctgcagagcagaccccccgactacgagagcagaaccagcggcaccagaagagcccccagccccgtggtgagccccaccgagatgaacaaggagaccctgcccgcccccctgagcgccgccaccgccagccccagccccgccctgagcgacgtgttcagcctgcccagccagccccccagcggcgacctgttcggcctgaaccccgccggcagaagcagaagccccagccccagcatcctgcagcagcccatcagcaacaagcccttcaccaccaagcccgtgcacctgtggaccaagcccgacgtggccgactggctggagagcctgaacctgggcgagcacaaggaggccttcatggacaacgagatcgacggcagccacctgcccaacctgcagaaggaggacctgatcgacctgggcgtgaccagagtgggccacagaatgaacatcgagagagccctgaagcagctgctggacagatag

SEQ ID NO: 98747 - DNA, 846 bp, synthetic construct
  misc_feature 1..846: note = Description of Artificial Sequence: Synthetic coding sequence
  source 1..846: mol_type = other DNA
atgatgatgaacgtgcccggcggcggcgccgccgccgtgatgatgaccggctacaacaacggcagatgccccagaaacagcctgtacagcgactgcatcatcgaggagaagaccgtggtgctgcagaagaaggacaacgagggcttcggcttcgtgctgagaggcgccaaggccgacacccccatcgaggagttcacccccacccccgccttccccgccctgcagtacctggagagcgtggacgagggcggcgtggcctggcaggccggcctgagaaccggcgacttcctgatcgaggtgaacaacgagaacgtggtgaaggtgggccacagacaggtggtgaacatgatcagacagggcggcaaccacctggtgctgaaggtggtgaccgtgaccagaaacctggaccccgacgacaccgccagaaagaaggccccccccccccccaagagagcccccaccaccgccctgaccctgagaagcaagagcatgaccagcgagctggaggagctggtggacaagggcgtgatcagaaagggcaaggacaagcccgaggagatcgtgcccgccagcaagcccagcagagccgccgagaacatggccgtggagcccagagtggccaccatcaagcagagacccagcagcagatgcttccccgccggcagcgacatgaacagcgtgtacgagagacagggcatcgccgtgatgacccccaccgtgcccggcagccccaaggcccccttcctgggcatccccagaggcaccatgagaagacagaagagcatcggcaagaagtgcggcacccccccccagaagctgcccctgggcttccagacccagccctag

SEQ ID NO: 98748 - DNA, 3762 bp, synthetic construct
  misc_feature 1..3762: note = Description of Artificial Sequence: Synthetic coding sequence
  source 1..3762: mol_type = other DNA
atgatgaacgtgcccggcggcggcgccgccgccgtgatgatgaccggctacaacaacggcagatgccccagaaacagcctgtacagcgactgcatcatcgaggagaagaccgtggtgctgcagaagaaggacaacgagggcttcggcttcgtgctgagaggcgccaaggccgacacccccatcgaggagttcacccccacccccgccttccccgccctgcagtacctggagagcgtggacgagggcggcgtggcctggcaggccggcctgagaaccggcgacttcctgatcgaggtgaacaacgagaacgtggtgaaggtgggccacagacaggtggtgaacatgatcagacagggcggcaaccacctggtgctgaaggtggtgaccgtgaccagaaacctggaccccgacgacaccgccagaaagaaggccccccccccccccaagagagcccccaccaccgccctgaccctgagaagcaagagcatgaccagcgagctggaggagctggtggacaaggacaagcccgaggagatcgtgcccgccagcaagcccagcagagccgccgagaacatggccgtggagcccagagtggccaccatcaagcagagacccagcagcagatgcttccccgccggcagcgacatgaacagcgtgtacgagagacagggcatcgccgtgatgacccccaccgtgcccggcagccccaaggcccccttcctgggcatccccagaggcaccatgagaagacagaagagcatcgacagcagaatcttcctgagcggcatcaccgaggaggagagacagttcctggccccccccatgctgaagttcaccagaagcctgagcatgcccgacaccagcgaggacatccccccccccccccagagcgtgccccccagcccccccccccccagccccaccacctacaactgccccaagagccccacccccagagtgtacggcaccatcaagcccgccttcaaccagaacagcgccgccaaggtgagccccgccaccagaagcgacaccgtggccaccatgatgagagagaagggcatgtacttcagaagagagctggacagatacagcctggacagcgaggacctgtacagcagaaacgccggcccccaggccaacttcagaaacaagagaggccagatgcccgagaacccctacagcgaggtgggcaagatcgccagcaaggccgtgtacgtgcccgccaagcccgccagaagaaagggcatgctggtgaagcagagcaacgtggaggacagccccgagaagacctgcagcatccccatccccaccatcatcgtgaaggagcccagcaccagcagcagcggcaagagcagccagggcagcagcatggagatcgacccccaggcccccgagccccccagccagctgagacccgacgagagcctgaccgtgagcagccccttcgccgccgccatcgccggcgccgtgagagacagagagaagagactggaggccagaagaaacagccccgccttcctgagcaccgacctgggcgacgaggacgtgggcctgggcccccccgcccccagaaccagacccagcatgttccccgaggagggcgacttcgccgacgaggacagcgccgagcagctgagcagccccatgcccagcgccacccccagagagcccgagaaccacttcgtgggcggcgccgaggccagcgcccccggcgaggccggcagacccctgaacagcaccagcaaggcccagggccccgagagcagccccgccgtgcccagcgccagcagcggcaccgccggccccggcaactacgtgcaccccctgaccggcagactgctggaccccagcagccccctggccctggccctgagcgccagagacagagccatgaaggagagccagcagggccccaagggcgaggcccccaaggccgacctgaacaagcccctgtacatcgacaccaagatgagacccagcctggacgccggcttccccaccgtgaccagacagaacaccagaggccccctgagaagacaggagaccgagaacaagtacgagaccgacctgggcagagacagaaagggcgacgacaagaagaacatgctgatcgacatcatggacaccagccagcagaagagcgccggcctgctgatggtgcacaccgtggacgccaccaagctggacaacgccctgcaggaggaggacgagaaggccgaggtggagatgaagcccgacagcagccccagcgaggtgcccgagggcgtgagcgagaccgagggcgccctgcagatcagcgccgcccccgagcccaccaccgtgcccggcagaaccatcgtggccgtgggcagcatggaggaggccgtgatcctgcccttcagaatcccccccccccccctggccagcgtggacctggacgaggacttcatcttcaccgagcccctgcccccccccctggagttcgccaacagcttcgacatccccgacgacagagccgccagcgtgcccgccctgagcgacctggtgaagcagaagaagagcgacaccccccagagccccagcctgaacagcagccagcccaccaacagcgccgacagcaagaagcccgccagcctgagcaactgcctgcccgccagcttcctgcccccccccgagagcttcgacgccgtggccgacagcggcatcgaggaggtggacagcagaagcagcagcgaccaccacctggagaccaccagcaccatcagcaccgtgagcagcatcagcaccctgagcagcgagggcggcgagaacgtggacacctgcaccgtgtacgccgacggccaggccttcatggtggacaagccccccgtgccccccaagcccaagatgaagcccatcatccacaagagcaacgccctgtaccaggacgccctggtggaggaggacgtggacagcttcgtgatccccccccccgcccccccccccccccccggcagcgcccagcccggcatggccaaggtgctgcagcccagaaccagcaagctgtggggcgacgtgaccgagatcaagagccccatcctgagcggccccaaggccaacgtgatcagcgagctgaacagcatcctgcagcagatgaacagagagaagctggccaagcccggcgagggcctggacagccccatgggcgccaagagcgccagcctggcccccagaagccccgagatcatgagcaccatcagcggcaccagaagcaccaccgtgaccttcaccgtgagacccggcaccagccagcccatcaccctgcagagcagaccccccgactacgagagcagaaccagcggcaccagaagagcccccagccccgtggtgagccccaccgagatgaacaaggagaccctgcccgcccccctgagcgccgccaccgccagccccagccccgccctgagcgacgtgttcagcctgcccagccagccccccagcggcgacctgttcggcctgaaccccgccggcagaagcagaagccccagccccagcatcctgcagcagcccatcagcaacaagcccttcaccaccaagcccgtgcacctgtggaccaagcccgacgtggccgactggctggagagcctgaacctgggcgagcacaaggaggccttcatggacaacgagatcgacggcagccacctgcccaacctgcagaaggaggacctgatcgacctgggcgtgaccagagtgggccacagaatgaacatcgagagagccctgaagcagctgctggacagatag

SEQ ID NO: 98749 - DNA, 843 bp, synthetic construct
  misc_feature 1..843: note = Description of Artificial Sequence: Synthetic coding sequence
  source 1..843: mol_type = other DNA
atgatgaacgtgcccggcggcggcgccgccgccgtgatgatgaccggctacaacaacggcagatgccccagaaacagcctgtacagcgactgcatcatcgaggagaagaccgtggtgctgcagaagaaggacaacgagggcttcggcttcgtgctgagaggcgccaaggccgacacccccatcgaggagttcacccccacccccgccttccccgccctgcagtacctggagagcgtggacgagggcggcgtggcctggcaggccggcctgagaaccggcgacttcctgatcgaggtgaacaacgagaacgtggtgaaggtgggccacagacaggtggtgaacatgatcagacagggcggcaaccacctggtgctgaaggtggtgaccgtgaccagaaacctggaccccgacgacaccgccagaaagaaggccccccccccccccaagagagcccccaccaccgccctgaccctgagaagcaagagcatgaccagcgagctggaggagctggtggacaaggccagcgtgagaaagaagaaggacaagcccgaggagatcgtgcccgccagcaagcccagcagagccgccgagaacatggccgtggagcccagagtggccaccatcaagcagagacccagcagcagatgcttccccgccggcagcgacatgaacagcgtgtacgagagacagggcatcgccgtgatgacccccaccgtgcccggcagccccaaggcccccttcctgggcatccccagaggcaccatgagaagacagaagagcatcggcaagaagtgcggcacccccccccagaagctgcccctgggcttccagacccagccctag

SEQ ID NO: 98750 - DNA, 4413 bp, synthetic construct
  misc_feature 1..4413: note = Description of Artificial Sequence: Synthetic coding sequence
  source 1..4413: mol_type = other DNA
atgaagagcctgctgaacgccttcaccaagaaggaggtgcccttcagagaggcccccgcctacagcaacagaagaagaagaccccccaacaccctggccgcccccagagtgctgctgagaagcaacagcgacaacaacctgaacgccagcgcccccgactgggccgtgtgcagcaccgccaccagccacagaagcctgagcccccagctgctgcagcagatgcccagcaagcccgagggcgccgccaagaccatcggcagctacgtgcccggccccagaagcagaagccccagcctgaacagactgggcggcgccggcgaggacggcaagagaccccagcccctgtggcacgtgggcagccccttcgccctgggcgccaacaaggacagcctgagcgccttcgagtaccccggccccaagagaaagctgtacagcgccgtgcccggcagactgttcgtggccgtgaagccctaccagccccaggtggacggcgagatccccctgcacagaggcgacagagtgaaggtgctgagcatcggcgagggcggcttctgggagggcagcgccagaggccacatcggctggttccccgccgagtgcgtggaggaggtgcagtgcaagcccagagacagccaggccgagaccagagccgacagaagcaagaagctgttcagacactacaccgtgggcagctacgacagcttcgacaccagcagcgactgcatcatcgaggagaagaccgtggtgctgcagaagaaggacaacgagggcttcggcttcgtgctgagaggcgccaaggccgacacccccatcgaggagttcacccccacccccgccttccccgccctgcagtacctggagagcgtggacgagggcggcgtggcctggcaggccggcctgagaaccggcgacttcctgatcgaggtgaacaacgagaacgtggtgaaggtgggccacagacaggtggtgaacatgatcagacagggcggcaaccacctggtgctgaaggtggtgaccgtgaccagaaacctggaccccgacgacaccgccagaaagaaggccccccccccccccaagagagcccccaccaccgccctgaccctgagaagcaagagcatgaccagcgagctggaggagctggtggacaaggccagcgtgagaaagaagaaggacaagcccgaggagatcgtgcccgccagcaagcccagcagagccgccgagaacatggccgtggagcccagagtggccaccatcaagcagagacccagcagcagatgcttccccgccggcagcgacatgaacagcgtgtacgagagacagggcatcgccgtgatgacccccaccgtgcccggcagccccaaggcccccttcctgggcatccccagaggcaccatgagaagacagaagagcatcgacagcagaatcttcctgagcggcatcaccgaggaggagagacagttcctggccccccccatgctgaagttcaccagaagcctgagcatgcccgacaccagcgaggacatccccccccccccccagagcgtgccccccagcccccccccccccagccccaccacctacaactgccccaagagccccacccccagagtgtacggcaccatcaagcccgccttcaaccagaacagcgccgccaaggtgagccccgccaccagaagcgacaccgtggccaccatgatgagagagaagggcatgtacttcagaagagagctggacagatacagcctggacagcgaggacctgtacagcagaaacgccggcccccaggccaacttcagaaacaagagaggccagatgcccgagaacccctacagcgaggtgggcaagatcgccagcaaggccgtgtacgtgcccgccaagcccgccagaagaaagggcatgctggtgaagcagagcaacgtggaggacagccccgagaagacctgcagcatccccatccccaccatcatcgtgaaggagcccagcaccagcagcagcggcaagagcagccagggcagcagcatggagatcgacccccaggcccccgagccccccagccagctgagacccgacgagagcctgaccgtgagcagccccttcgccgccgccatcgccggcgccgtgagagacagagagaagagactggaggccagaagaaacagccccgccttcctgagcaccgacctgggcgacgaggacgtgggcctgggcccccccgcccccagaaccagacccagcatgttccccgaggagggcgacttcgccgacgaggacagcgccgagcagctgagcagccccatgcccagcgccacccccagagagcccgagaaccacttcgtgggcggcgccgaggccagcgcccccggcgaggccggcagacccctgaacagcaccagcaaggcccagggccccgagagcagccccgccgtgcccagcgccagcagcggcaccgccggccccggcaactacgtgcaccccctgaccggcagactgctggaccccagcagccccctggccctggccctgagcgccagagacagagccatgaaggagagccagcagggccccaagggcgaggcccccaaggccgacctgaacaagcccctgtacatcgacaccaagatgagacccagcctggacgccggcttccccaccgtgaccagacagaacaccagaggccccctgagaagacaggagaccgagaacaagtacgagaccgacctgggcagagacagaaagggcgacgacaagaagaacatgctgatcgacatcatggacaccagccagcagaagagcgccggcctgctgatggtgcacaccgtggacgccaccaagctggacaacgccctgcaggaggaggacgagaaggccgaggtggagatgaagcccgacagcagccccagcgaggtgcccgagggcgtgagcgagaccgagggcgccctgcagatcagcgccgcccccgagcccaccaccgtgcccggcagaaccatcgtggccgtgggcagcatggaggaggccgtgatcctgcccttcagaatcccccccccccccctggccagcgtggacctggacgaggacttcatcttcaccgagcccctgcccccccccctggagttcgccaacagcttcgacatccccgacgacagagccgccagcgtgcccgccctgagcgacctggtgaagcagaagaagagcgacaccccccagagccccagcctgaacagcagccagcccaccaacagcgccgacagcaagaagcccgccagcctgagcaactgcctgcccgccagcttcctgcccccccccgagagcttcgacgccgtggccgacagcggcatcgaggaggtggacagcagaagcagcagcgaccaccacctggagaccaccagcaccatcagcaccgtgagcagcatcagcaccctgagcagcgagggcggcgagaacgtggacacctgcaccgtgtacgccgacggccaggccttcatggtggacaagccccccgtgccccccaagcccaagatgaagcccatcatccacaagagcaacgccctgtaccaggacgccctggtggaggaggacgtggacagcttcgtgatccccccccccgcccccccccccccccccggcagcgcccagcccggcatggccaaggtgctgcagcccagaaccagcaagctgtggggcgacgtgaccgagatcaagagccccatcctgagcggccccaaggccaacgtgatcagcgagctgaacagcatcctgcagcagatgaacagagagaagctggccaagcccggcgagggcctggacagccccatgggcgccaagagcgccagcctggcccccagaagccccgagatcatgagcaccatcagcggcaccagaagcaccaccgtgaccttcaccgtgagacccggcaccagccagcccatcaccctgcagagcagaccccccgactacgagagcagaaccagcggcaccagaagagcccccagccccgtggtgagccccaccgagatgaacaaggagaccctgcccgcccccctgagcgccgccaccgccagccccagccccgccctgagcgacgtgttcagcctgcccagccagccccccagcggcgacctgttcggcctgaaccccgccggcagaagcagaagccccagccccagcatcctgcagcagcccatcagcaacaagcccttcaccaccaagcccgtgcacctgtggaccaagcccgacgtggccgactggctggagagcctgaacctgggcgagcacaaggaggccttcatggacaacgagatcgacggcagccacctgcccaacctgcagaaggaggacctgatcgacctgggcgtgaccagagtgggccacagaatgaacatcgagagagccctgaagcagctgctggacagatag

SEQ ID NO: 98751 - DNA, 816 bp, synthetic construct
  misc_feature 1..816: note = Description of Artificial Sequence: Synthetic coding sequence
  source 1..816: mol_type = other DNA
atgatgatgaacgtgcccggcggcggcgccgccgccgtgatgatgaccggctacaacaacggcagatgccccagaaacagcctgtacagcgactgcatcatcgaggagaagaccgtggtgctgcagaagaaggacaacgagggcttcggcttcgtgctgagaggcgccaaggccgacacccccatcgaggagttcacccccacccccgccttccccgccctgcagtacctggagagcgtggacgagggcggcgtggcctggcaggccggcctgagaaccggcgacttcctgatcgaggtgaacaacgagaacgtggtgaaggtgggccacagacaggtggtgaacatgatcagacagggcggcaaccacctggtgctgaaggtggtgaccgtgaccagaaacctggaccccgacgacaccgccagaaagaaggccccccccccccccaagagagcccccaccaccgccctgaccctgagaagcaagagcatgaccagcgagctggaggagctggacaagcccgaggagatcgtgcccgccagcaagcccagcagagccgccgagaacatggccgtggagcccagagtggccaccatcaagcagagacccagcagcagatgcttccccgccggcagcgacatgaacagcgtgtacgagagacagggcatcgccgtgatgacccccaccgtgcccggcagccccaaggcccccttcctgggcatccccagaggcaccatgagaagacagaagagcatcggcaagaagtgcggcacccccccccagaagctgcccctgggcttccagacccagccctag

SEQ ID NO: 98752 - DNA, 3765 bp, synthetic construct
  misc_feature 1..3765: note = Description of Artificial Sequence: Synthetic coding sequence
  source 1..3765: mol_type = other DNA
atgatgatgaacgtgcccggcggcggcgccgccgccgtgatgatgaccggctacaacaacggcagatgccccagaaacagcctgtacagcgactgcatcatcgaggagaagaccgtggtgctgcagaagaaggacaacgagggcttcggcttcgtgctgagaggcgccaaggccgacacccccatcgaggagttcacccccacccccgccttccccgccctgcagtacctggagagcgtggacgagggcggcgtggcctggcaggccggcctgagaaccggcgacttcctgatcgaggtgaacaacgagaacgtggtgaaggtgggccacagacaggtggtgaacatgatcagacagggcggcaaccacctggtgctgaaggtggtgaccgtgaccagaaacctggaccccgacgacaccgccagaaagaaggccccccccccccccaagagagcccccaccaccgccctgaccctgagaagcaagagcatgaccagcgagctggaggagctggtggacaaggacaagcccgaggagatcgtgcccgccagcaagcccagcagagccgccgagaacatggccgtggagcccagagtggccaccatcaagcagagacccagcagcagatgcttccccgccggcagcgacatgaacagcgtgtacgagagacagggcatcgccgtgatgacccccaccgtgcccggcagccccaaggcccccttcctgggcatccccagaggcaccatgagaagacagaagagcatcgacagcagaatcttcctgagcggcatcaccgaggaggagagacagttcctggccccccccatgctgaagttcaccagaagcctgagcatgcccgacaccagcgaggacatccccccccccccccagagcgtgccccccagcccccccccccccagccccaccacctacaactgccccaagagccccacccccagagtgtacggcaccatcaagcccgccttcaaccagaacagcgccgccaaggtgagccccgccaccagaagcgacaccgtggccaccatgatgagagagaagggcatgtacttcagaagagagctggacagatacagcctggacagcgaggacctgtacagcagaaacgccggcccccaggccaacttcagaaacaagagaggccagatgcccgagaacccctacagcgaggtgggcaagatcgccagcaaggccgtgtacgtgcccgccaagcccgccagaagaaagggcatgctggtgaagcagagcaacgtggaggacagccccgagaagacctgcagcatccccatccccaccatcatcgtgaaggagcccagcaccagcagcagcggcaagagcagccagggcagcagcatggagatcgacccccaggcccccgagccccccagccagctgagacccgacgagagcctgaccgtgagcagccccttcgccgccgccatcgccggcgccgtgagagacagagagaagagactggaggccagaagaaacagccccgccttcctgagcaccgacctgggcgacgaggacgtgggcctgggcccccccgcccccagaaccagacccagcatgttccccgaggagggcgacttcgccgacgaggacagcgccgagcagctgagcagccccatgcccagcgccacccccagagagcccgagaaccacttcgtgggcggcgccgaggccagcgcccccggcgaggccggcagacccctgaacagcaccagcaaggcccagggccccgagagcagccccgccgtgcccagcgccagcagcggcaccgccggccccggcaactacgtgcaccccctgaccggcagactgctggaccccagcagccccctggccctggccctgagcgccagagacagagccatgaaggagagccagcagggccccaagggcgaggcccccaaggccgacctgaacaagcccctgtacatcgacaccaagatgagacccagcctggacgccggcttccccaccgtgaccagacagaacaccagaggccccctgagaagacaggagaccgagaacaagtacgagaccgacctgggcagagacagaaagggcgacgacaagaagaacatgctgatcgacatcatggacaccagccagcagaagagcgccggcctgctgatggtgcacaccgtggacgccaccaagctggacaacgccctgcaggaggaggacgagaaggccgaggtggagatgaagcccgacagcagccccagcgaggtgcccgagggcgtgagcgagaccgagggcgccctgcagatcagcgccgcccccgagcccaccaccgtgcccggcagaaccatcgtggccgtgggcagcatggaggaggccgtgatcctgcccttcagaatcccccccccccccctggccagcgtggacctggacgaggacttcatcttcaccgagcccctgcccccccccctggagttcgccaacagcttcgacatccccgacgacagagccgccagcgtgcccgccctgagcgacctggtgaagcagaagaagagcgacaccccccagagccccagcctgaacagcagccagcccaccaacagcgccgacagcaagaagcccgccagcctgagcaactgcctgcccgccagcttcctgcccccccccgagagcttcgacgccgtggccgacagcggcatcgaggaggtggacagcagaagcagcagcgaccaccacctggagaccaccagcaccatcagcaccgtgagcagcatcagcaccctgagcagcgagggcggcgagaacgtggacacctgcaccgtgtacgccgacggccaggccttcatggtggacaagccccccgtgccccccaagcccaagatgaagcccatcatccacaagagcaacgccctgtaccaggacgccctggtggaggaggacgtggacagcttcgtgatccccccccccgcccccccccccccccccggcagcgcccagcccggcatggccaaggtgctgcagcccagaaccagcaagctgtggggcgacgtgaccgagatcaagagccccatcctgagcggccccaaggccaacgtgatcagcgagctgaacagcatcctgcagcagatgaacagagagaagctggccaagcccggcgagggcctggacagccccatgggcgccaagagcgccagcctggcccccagaagccccgagatcatgagcaccatcagcggcaccagaagcaccaccgtgaccttcaccgtgagacccggcaccagccagcccatcaccctgcagagcagaccccccgactacgagagcagaaccagcggcaccagaagagcccccagccccgtggtgagccccaccgagatgaacaaggagaccctgcccgcccccctgagcgccgccaccgccagccccagccccgccctgagcgacgtgttcagcctgcccagccagccccccagcggcgacctgttcggcctgaaccccgccggcagaagcagaagccccagccccagcatcctgcagcagcccatcagcaacaagcccttcaccaccaagcccgtgcacctgtggaccaagcccgacgtggccgactggctggagagcctgaacctgggcgagcacaaggaggccttcatggacaacgagatcgacggcagccacctgcccaacctgcagaaggaggacctgatcgacctgggcgtgaccagagtgggccacagaatgaacatcgagagagccctgaagcagctgctggacagatag

SEQ ID NO: 98753 - DNA, 915 bp, synthetic construct
  misc_feature 1..915: note = Description of Artificial Sequence: Synthetic coding sequence
  source 1..915: mol_type = other DNA
atgcccagaagccccaccagcagcgaggacgagatggcccagagcttcagcgactacagcgtgggcagcgagagcgacagcagcaaggaggagaccatctacgacaccatcagagccaccgccgagaagcccggcggcgccagaaccgaggagagccagggcaacaccctggtgatcagagtggtgatccacgacctgcagcagaccaagtgcatcagattcaaccccgacgccaccgtgtgggtggccaagcagagaatcctgtgcaccctgacccagagcctgaaggacgtgctgaactacggcctgttccagcccgccagcaacggcagagacggcaagttcctggacgaggagagactgctgagagagtacccccagcccgtgggcgagggcgtgcccagcctggagttcagatacaagaagagagtgtacaagcaggccagcctggacgagaagcagctggccaagctgcacaccaagaccaacctgaagaagtgcatggaccacatccagcacagactggtggagaagatcaccaagatgctggacagaggcctggaccccaacttccacgaccccgagaccggcgagacccccctgaccctggccgcccagctggacgacagcgtggaggtgatcaaggccctgaagaacggcggcgcccacctggacttcagagccaaggacggcatgaccgccctgcacaaggccgccagagccagaaaccaggtggccctgaagaccctgctggagctgggcgccagccccgactacaaggacagctacggcctgacccccctgtaccacaccgccatcgtgggcggcgacccctactgctgcgagctgctgctgcacgagcacgccaccgtgtgctgcaaggacgagaacggctggcacgagatccaccagtag

SEQ ID NO: 98754 - DNA, 5244 bp, synthetic construct
  misc_feature 1..5244: note = Description of Artificial Sequence: Synthetic coding sequence
  source 1..5244: mol_type = other DNA
atggacggccccggcgccagcgccgtggtggtgagagtgggcatccccgacctgcagcagaccaagtgcctgagactggaccccgccgcccccgtgtgggccgccaagcagagagtgctgtgcgccctgaaccacagcctgcaggacgccctgaactacggcctgttccagccccccagcagaggcagagccggcaagttcctggacgaggagagactgctgcaggagtacccccccaacctggacacccccctgccctacctggagttcagatacaagagaagagtgtacgcccagaacctgatcgacgacaagcagttcgccaagctgcacaccaaggccaacctgaagaagttcatggactacgtgcagctgcacagcaccgacaaggtggccagactgctggacaagggcctggaccccaacttccacgaccccgacagcggcgagtgccccctgagcctggccgcccagctggacaacgccaccgacctgctgaaggtgctgaagaacggcggcgcccacctggacttcagaaccagagacggcctgaccgccgtgcactgcgccaccagacagagaaacgccgccgccctgaccaccctgctggacctgggcgccagccccgactacaaggacagcagaggcctgacccccctgtaccacagcgccctgggcggcggcgacgccctgtgctgcgagctgctgctgcacgaccacgcccagctgggcatcaccgacgagaacggctggcaggagatccaccaggcctgcagattcggccacgtgcagcacctggagcacctgctgttctacggcgccgacatgggcgcccagaacgccagcggcaacaccgccctgcacatctgcgccctgtacaaccaggagagctgcgccagagtgctgctgttcagaggcgccaacagagacgtgagaaactacaacagccagaccgccttccaggtggccatcatcgccggcaacttcgagctggccgaggtgatcaagacccacaaggacagcgacgtggtgcccttcagagagacccccagctacgccaagagaagaagactggccggccccagcggcctggccagccccagacccctgcagagaagcgccagcgacatcaacctgaagggcgaggcccagcccgccgccagccccggccccagcctgagaagcctgccccaccagctgctgctgcagagactgcaggaggagaaggacagagacagagacgccgaccaggagagcaacatcagcggccccctggccggcagagccggccagagcaagatcagcgaccccggccccggccccggcggcgtgggcggcgcccccctgcccccccccggcgcccccagaagctgcatcagaatcagagccagattccccgccccccccgccccccccgcccccccccccagaggccccaagagaaagctgtacagcgccgtgcccggcagaaagttcatcgccgtgaaggcccacagcccccagggcgagggcgagatccccctgcacagaggcgaggccgtgaaggtgctgagcatcggcgagggcggcttctgggagggcaccgtgaagggcagaaccggctggttccccgccgactgcgtggaggaggtgcagatgagacagcacgacaccagacccgagaccagagaggacagaaccaagagactgttcagacactacaccgtgggcagctacgacagcctgaccagccacagcgactacgtgatcgacgacaaggtggccgtgctgcagaagagagaccacgagggcttcggcttcgtgctgagaggcgccaaggccgagacccccatcgaggagttcacccccacccccgccttccccgccctgcagtacctggagagcgtggacgtggagggcgtggcctggagagccggcctgagaaccggcgacttcctgatcgaggtgaacggcgtgaacgtggtgaaggtgggccacaagcaggtggtggccctgatcagacagggcggcaacagactggtgatgaaggtggtgagcgtgaccagaaagcccgaggaggacggcgccagaagaagagccccccccccccccaagagagcccccagcaccaccctgaccctgagaagcaagagcatgaccgccgagctggaggagctggccagcatcagaagaagaaagggcgagaagctggacgagatgctggccgccgccgccgagcccaccctgagacccgacatcgccgacgccgacagcagagccgccaccgtgaagcagagacccaccagcagaagaatcacccccgccgagatcagcagcctgttcgagagacagggcctgcccggccccgagaagctgcccggcagcctgagaaagggcatccccagaaccaagagcgtgggcgaggacgagaagctggccagcctgctggagggcagattccccagaagcaccagcatgcaggaccccgtgagagagggcagaggcatccccccccccccccagaccgcccccccccccccccccgccccctactacttcgacagcggccccccccccgccttcagccccccccccccccccggcagagcctacgacaccgtgagaagcagcttcaagcccggcctggaggccagactgggcgccggcgccgccggcctgtacgagcccggcgccgccctgggccccctgccctaccccgagagacagaagagagccagaagcatgatcatcctgcaggacagcgcccccgagagcggcgacgcccccagacccccccccgccgccaccccccccgagagacccaagagaagacccagaccccccggccccgacagcccctacgccaacctgggcgccttcagcgccagcctgttcgcccccagcaagccccagagaagaaagagccccctggtgaagcagctgcaggtggaggacgcccaggagagagccgccctggccgtgggcagccccggccccggcggcggcagcttcgccagagagcccagccccacccacagaggccccagacccggcggcctggactacggcgccggcgacggccccggcctggccttcggcggccccggccccgccaaggacagaagactggaggagagaagaagaagcaccgtgttcctgagcgtgggcgccatcgagggcagcgcccccggcgccgacctgcccagcctgcagcccagcagaagcatcgacgagagactgctgggcaccggccccaccgccggcagagacctgctgctgcccagccccgtgagcgccctgaagcccctggtgagcggccccagcctgggccccagcggcagcaccttcatccaccccctgaccggcaagcccctggaccccagcagccccctggccctggccctggccgccagagagagagccctggccagccaggcccccagcagaagccccacccccgtgcacagccccgacgccgacagacccggccccctgttcgtggacgtgcaggccagagaccccgagagaggcagcctggccagccccgccttcagccccagaagccccgcctggatccccgtgcccgccagaagagaggccgagaaggtgcccagagaggagagaaagagccccgaggacaagaagagcatgatcctgagcgtgctggacaccagcctgcagagacccgccggcctgatcgtggtgcacgccaccagcaacggccaggagcccagcagactgggcggcgccgaggaggagagacccggcacccccgagctggcccccgcccccatgcagagcgccgccgtggccgagcccctgcccagccccagagcccagccccccggcggcacccccgccgacgccggccccggccagggcagcagcgaggaggagcccgagctggtgttcgccgtgaacctgccccccgcccagctgagcagcagcgacgaggagaccagagaggagctggccagaatcggcctggtgcccccccccgaggagttcgccaacggcgtgctgctggccacccccctggccggccccggccccagccccaccaccgtgcccagccccgccagcggcaagcccagcagcgagcccccccccgcccccgagagcgccgccgacagcggcgtggaggaggccgacaccagaagcagcagcgacccccacctggagaccaccagcaccatcagcaccgtgagcagcatgagcaccctgagcagcgagagcggcgagctgaccgacacccacaccagcttcgccgacggccacaccttcctgctggagaagccccccgtgccccccaagcccaagctgaagagccccctgggcaagggccccgtgaccttcagagaccccctgctgaagcagagcagcgacagcgagctgatggcccagcagcaccacgccgccagcgccggcctggccagcgccgccggccccgccagacccagatacctgttccagagaagaagcaagctgtggggcgaccccgtggagagcagaggcctgcccggccccgaggacgacaagcccaccgtgatcagcgagctgagcagcagactgcagcagctgaacaaggacaccagaagcctgggcgaggagcccgtgggcggcctgggcagcctgctggaccccgccaagaagagccccatcgccgccgccagactgttcagcagcctgggcgagctgagcagcatcagcgcccagagaagccccggcggccccggcggcggcgccagctacagcgtgagacccagcggcagataccccgtggccagaagagcccccagccccgtgaagcccgccagcctggagagagtggagggcctgggcgccggcgccggcggcgccggcagacccttcggcctgaccccccccaccatcctgaagagcagcagcctgagcatcccccacgagcccaaggaggtgagattcgtggtgagaagcgtgagcgccagaagcagaagccccagccccagccccctgcccagccccgccagcggccccggccccggcgcccccggccccagaagacccttccagcagaagcccctgcagctgtggagcaagttcgacgtgggcgactggctggagagcatccacctgggcgagcacagagacagattcgaggaccacgagatcgagggcgcccacctgcccgccctgaccaaggacgacttcgtggagctgggcgtgaccagagtgggccacagaatgaacatcgagagagccctgagacagctggacggcagctag

SEQ ID NO: 98755 - DNA, 5229 bp, synthetic construct
  misc_feature 1..5229: note = Description of Artificial Sequence: Synthetic coding sequence
  source 1..5229: mol_type = other DNA
atggacggccccggcgccagcgccgtggtggtgagagtgggcatccccgacctgcagcagaccaagtgcctgagactggaccccgccgcccccgtgtgggccgccaagcagagagtgctgtgcgccctgaaccacagcctgcaggacgccctgaactacggcctgttccagccccccagcagaggcagagccggcaagttcctggacgaggagagactgctgcaggagtacccccccaacctggacacccccctgccctacctggagttcagatacaagagaagagtgtacgcccagaacctgatcgacgacaagcagttcgccaagctgcacaccaaggccaacctgaagaagttcatggactacgtgcagctgcacagcaccgacaaggtggccagactgctggacaagggcctggaccccaacttccacgaccccgacagcggcgagtgccccctgagcctggccgcccagctggacaacgccaccgacctgctgaaggtgctgaagaacggcggcgcccacctggacttcagaaccagagacggcctgaccgccgtgcactgcgccaccagacagagaaacgccgccgccctgaccaccctgctggacctgggcgccagccccgactacaaggacagcagaggcctgacccccctgtaccacagcgccctgggcggcggcgacgccctgtgctgcgagctgctgctgcacgaccacgcccagctgggcatcaccgacgagaacggctggcaggagatccaccaggcctgcagattcggccacgtgcagcacctggagcacctgctgttctacggcgccgacatgggcgcccagaacgccagcggcaacaccgccctgcacatctgcgccctgtacaaccaggagagctgcgccagagtgctgctgttcagaggcgccaacagagacgtgagaaactacaacagccagaccgccttccaggtggccatcatcgccggcaacttcgagctggccgaggtgatcaagacccacaaggacagcgacgtggtgcccttcagagagacccccagctacgccaagagaagaagactggccggccccagcggcctggccagccccagacccctgcagagaagcgccagcgacatcaacctgaagggcgaggcccagcccgccgccagccccggccccagcctgagaagcctgccccaccagctgctgctgcagagactgcaggaggagaaggacagagacagagacgccgaccaggagagcaacatcagcggccccctggccggcagagccggccagagcaagatcagcgagcccggcgcccccagaagctgcatcagaatcagagccagattccccgccccccccgccccccccgcccccccccccagaggccccaagagaaagctgtacagcgccgtgcccggcagaaagttcatcgccgtgaaggcccacagcccccagggcgagggcgagatccccctgcacagaggcgaggccgtgaaggtgctgagcatcggcgagggcggcttctgggagggcaccgtgaagggcagaaccggctggttccccgccgactgcgtggaggaggtgcagatgagacagcacgacaccagacccgagaccagagaggacagaaccaagagactgttcagacactacaccgtgggcagctacgacagcctgaccagccacagcgactacgtgatcgacgacaaggtggccgtgctgcagaagagagaccacgagggcttcggcttcgtgctgagaggcgccaaggccgagacccccatcgaggagttcacccccacccccgccttccccgccctgcagtacctggagagcgtggacgtggagggcgtggcctggagagccggcctgagaaccggcgacttcctgatcgaggtgaacggcgtgaacgtggtgaaggtgggccacaagcaggtggtggccctgatcagacagggcggcaacagactggtgatgaaggtggtgagcgtgaccagaaagcccgaggaggacggcgccagaagaagagccccccccccccccaagagagcccccagcaccaccctgaccctgagaagcaagagcatgaccgccgagctggaggagctgggcgagtggagaggcagagagggcagcgagaagctggacgagatgctggccgccgccgccgagcccaccctgagacccgacatcgccgacgccgacagcagagccgccaccgtgaagcagagacccaccagcagaagaatcacccccgccgagatcagcagcctgttcgagagacagggcctgcccggccccgagaagctgcccggcagcctgagaaagggcatccccagaaccaagagcgtgggcgaggacgagaagctggccagcctgctggagggcagattccccagaagcaccagcatgcaggaccccgtgagagagggcagaggcatccccccccccccccagaccgcccccccccccccccccgccccctactacttcgacagcggccccccccccgccttcagccccccccccccccccggcagagcctacgacaccgtgagaagcagcttcaagcccggcctggaggccagactgggcgccggcgccgccggcctgtacgagcccggcgccgccctgggccccctgccctaccccgagagacagaagagagccagaagcatgatcatcctgcaggacagcgcccccgagagcggcgacgcccccagacccccccccgccgccaccccccccgagagacccaagagaagacccagaccccccggccccgacagcccctacgccaacctgggcgccttcagcgccagcctgttcgcccccagcaagccccagagaagaaagagccccctggtgaagcagctgcaggtggaggacgcccaggagagagccgccctggccgtgggcagccccggccccggcggcggcagcttcgccagagagcccagccccacccacagaggccccagacccggcggcctggactacggcgccggcgacggccccggcctggccttcggcggccccggccccgccaaggacagaagactggaggagagaagaagaagcaccgtgttcctgagcgtgggcgccatcgagggcagcgcccccggcgccgacctgcccagcctgcagcccagcagaagcatcgacgagagactgctgggcaccggccccaccgccggcagagacctgctgctgcccagccccgtgagcgccctgaagcccctggtgagcggccccagcctgggccccagcggcagcaccttcatccaccccctgaccggcaagcccctggaccccagcagccccctggccctggccctggccgccagagagagagccctggccagccaggcccccagcagaagccccacccccgtgcacagccccgacgccgacagacccggccccctgttcgtggacgtgcaggccagagaccccgagagaggcagcctggccagccccgccttcagccccagaagccccgcctggatccccgtgcccgccagaagagaggccgagaaggtgcccagagaggagagaaagagccccgaggacaagaagagcatgatcctgagcgtgctggacaccagcctgcagagacccgccggcctgatcgtggtgcacgccaccagcaacggccaggagcccagcagactgggcggcgccgaggaggagagacccggcacccccgagctggcccccgcccccatgcagagcgccgccgtggccgagcccctgcccagccccagagcccagccccccggcggcacccccgccgacgccggccccggccagggcagcagcgaggaggagcccgagctggtgttcgccgtgaacctgccccccgcccagctgagcagcagcgacgaggagaccagagaggagctggccagaatcggcctggtgcccccccccgaggagttcgccaacggcgtgctgctggccacccccctggccggccccggccccagccccaccaccgtgcccagccccgccagcggcaagcccagcagcgagcccccccccgcccccgagagcgccgccgacagcggcgtggaggaggccgacaccagaagcagcagcgacccccacctggagaccaccagcaccatcagcaccgtgagcagcatgagcaccctgagcagcgagagcggcgagctgaccgacacccacaccagcttcgccgacggccacaccttcctgctggagaagccccccgtgccccccaagcccaagctgaagagccccctgggcaagggccccgtgaccttcagagaccccctgctgaagcagagcagcgacagcgagctgatggcccagcagcaccacgccgccagcgccggcctggccagcgccgccggccccgccagacccagatacctgttccagagaagaagcaagctgtggggcgaccccgtggagagcagaggcctgcccggccccgaggacgacaagcccaccgtgatcagcgagctgagcagcagactgcagcagctgaacaaggacaccagaagcctgggcgaggagcccgtgggcggcctgggcagcctgctggaccccgccaagaagagccccatcgccgccgccagatgcagaagccccatggtgggcctgagactgttcagcagcctgggcgagctgagcagcatcagcgcccagagaagccccggcggccccggcggcggcgccagctacagcgtgagacccagcggcagataccccgtggccagaagagcccccagccccgtgaagcccgccagcctggagagagtggagggcctgggcgccggcgccggcggcgccggcagacccttcggcctgaccccccccaccatcctgaagagcagcagcctgagcatcccccacgagcccaaggaggtgagattcgtggtgagaagcgtgagcgccagaagcagaagccccagccccagccccctgcccagccccgccagcggccccggccccggcgcccccggccccagaagacccttccagcagaagcccctgcagctgtggagcaagttcgacgtgggcgactggctggagagcatccacctgggcgagcacagagacagattcgaggaccacgagatcgagggcgcccacctgcccgccctgaccaaggacgacttcgtggagctgggcgtgaccagagtgggccacagaatgaacatcgagagagccctgagacagctggacggcagctag

SEQ ID NO: 98756 - DNA, 2736 bp, synthetic construct
  misc_feature 1..2736: note = Description of Artificial Sequence: Synthetic coding sequence
  source 1..2736: mol_type = other DNA
atgccccccagaagaagcatcgtggaggtgaaggtgctggacgtgcagaagagaagagtgcccaacaagcactacgtgtacatcatcagagtgacctggagcagcggcagcaccgaggccatctacagaagatacagcaagttcttcgacctgcagatgcagatgctggacaagttccccatggagggcggccagaaggaccccaagcagagaatcatccccttcctgcccggcaagatcctgttcagaagaagccacatcagagacgtggccgtgaagagactgatccccatcgacgagtactgcaaggccctgatccagctgcccccctacatcagccagtgcgacgaggtgctgcagttcttcgagaccagacccgaggacctgaacccccccaaggaggagcacatcggcaagaagaagagcggcggcgaccagaccagcgtggaccccatggtgctggagcagtacgtggtggtggccaactaccagaagcaggagagcagcgagatcagcctgagcgtgggccaggtggtggacatcatcgagaagaacgagagcggctggtggttcgtgagcaccgccgaggagcagggctgggtgcccgccacctgcctggagggccaggacggcgtgcaggacgagttcagcctgcagcccgaggaggaggagaagtacaccgtgatctacccctacaccgccagagaccaggacgagatgaacctggagagaggcgccgtggtggaggtgatccagaagaacctggagggctggtggaagatcagataccagggcaaggagggctgggcccccgccagctacctgaagaagaacagcggcgagcccctgccccccaagcccggccccggcagccccagccaccccggcgccctggacctggacggcgtgagcagacagcagaacgccgtgggcagagagaaggagctgctgagcagccagagagacggcagattcgagggcagacccgtgcccgacggcgacgccaagcagagaagccccaagatgagacagagacccccccccagaagagacatgaccatccccagaggcctgaacctgcccaagccccccatccccccccaggtggaggaggagtactacaccatcgccgagttccagaccaccatccccgacggcatcagcttccaggccggcctgaaggtggaggtgatcgagaagaacctgagcggctggtggtacatccagatcgaggacaaggagggctgggcccccgccaccttcatcgacaagtacaagaagaccagcaacgccagcagacccaacttcctggcccccctgccccacgaggtgacccagctgagactgggcgaggccgccgccctggagaacaacaccggcagcgaggccaccggccccagcagacccctgcccgacgccccccacggcgtgatggacagcggcctgccctggagcaaggactggaagggcagcaaggacgtgctgagaaaggccagcagcgacatgagcgccagcgccggctacgaggagatcagcgaccccgacatggaggagaagcccagcctgccccccagaaaggagagcatcatcaagagcgagggcgagctgctggagagagagagagagagacagagaaccgagcagctgagaggccccacccccaagccccccggcgtgatcctgcccatgatgcccgccaagcacatcccccccgccagagacagcagaagacccgagcccaagcccgacaagagcagactgttccagctgaagaacgacatgggcctggagtgcggccacaaggtgctggccaaggaggtgaagaagcccaacctgagacccatcagcaagagcaagaccgacctgcccgaggagaagcccgacgccaccccccagaaccccttcctgaagagcagaccccaggtgagacccaagcccgcccccagccccaagaccgagcccccccagggcgaggaccaggtggacatctgcaacctgagaagcaagctgagacccgccaagagccaggacaagagcctgctggacggcgagggcccccaggccgtgggcggccaggacgtggccttcagcagaagcttcctgcccggcgagggccccggcagagcccaggacagaaccggcaagcaggacggcctgagccccaaggagatcagctgcagagccccccccagacccgccaagaccaccgaccccgtgagcaagagcgtgcccgtgcccctgcaggaggccccccagcagagacccgtggtgccccccagaagaccccccccccccaagaagaccagcagcagcagcagacccctgcccgaggtgagaggcccccagtgcgagggccacgagagcagagccgcccccacccccggcagagccctgctggtgccccccaaggccaagcccttcctgagcaacagcctgggcggccaggacgacaccagaggcaagggcagcctgggcccctggggcaccggcaagatcggcgagaacagagagaaggccgccgccgccagcgtgcccaacgccgacggcctgaaggacagcctgtacgtggccgtggccgacttcgagggcgacaaggacaccagcagcttccaggagggcaccgtgttcgaggtgagagagaagaacagcagcggctggtggttctgccaggtgctgagcggcgcccccagctgggagggctggatccccagcaactacctgagaaagaagccctag

SEQ ID NO: 98757 - DNA, 2805 bp, synthetic construct
  misc_feature 1..2805: note = Description of Artificial Sequence: Synthetic coding sequence
  source 1..2805: mol_type = other DNA
atggaggagatctggaagttcagcacctacctgaacctgggctacgtgagcatgtgcctggagcacctgctgttcgaccacaagtactggctgaactgcatcctggtggaggacaccgagatccaggtgagcgtggacgacaagcacctggagaccatctacctgggcctgctgatccaggagggccacttcttctgcagagccctgtgcagcgtgaccccccccgccgagaaggagggcgagtgcctgaccctgtgcaagaacgagctgatcagcgtgaagatggccgaggccggcagcgagctggagggcgtgagcctggtgaccggccagagaggcctggtgctggtgagcgccctggagcccctgcccctgcccttccaccagtggttcctgaagaactaccccggcagctgcggcctgagcagaaagagagactggaccggcagctaccagatcggcagaggcagatgcaaggccctgaccggctacgagcccggcgagaaggacgagctgaacttctaccagggcgagagcatcgagatcatcggcttcgtgatccccggcctgcagtggttcatcggcaagagcaccagcagcggccaggtgggcttcgtgcccaccagaaacatcgaccccgacagctacagccccatgagcagaaacagcgccttcctgagcgacgaggagagatgcagcctgctggccctgggcagcgacaagcagaccgagtgcagcagcttcctgcacaccctggccagaaccgacatcaccagcgtgtacagactgagcggcttcgagagcatccagaacccccccaacgacctgagcgccagccagcccgagggcttcaaggaggtgagacccggcagagcctgggaggagcaccaggccgtgggcagcagacagagcagcagcagcgaggacagcagcctggaggaggagctgctgagcgccaccagcgacagctacagactgcccgagcccgacgacctggacgaccccgagctgctgatggacctgagcaccggccaggaggaggaggccgagaacttcgcccccatcctggccttcctggaccacgagggctacgccgaccacttcaagagcctgtacgacttcagcttcagcttcctgaccagcagcttctacagcttcagcgaggaggacgagttcgtggcctacctggaggccagcagaaagtgggccaagaagagccacatgacctgggcccacgccagactgtgcttcctgctgggcagactgagcatcagaaaggtgaagctgagccaggccagagtgtacttcgaggaggccatccacatcctgaacggcgccttcgaggacctgagcctggtggccaccctgtacatcaacctggccgccatctacctgaagcagagactgagacacaagggcagcgccctgctggagaaggccggcgccctgctggcctgcctgcccgacagagagagcagcgccaagcacgagctggacgtggtggcctacgtgctgagacagggcatcgtggtgggcagcagccccctggaggccagagcctgcttcctggccatcagactgctgctgagcctgggcagacacgaggaggtgctgcccttcgccgagagactgcagctgctgagcggccacccccccgccagcgaggccgtggccagcgtgctgagcttcctgtacgacaagaagtacctgccccacctggccgtggccagcgtgcagcagcacggcatccagagcgcccagggcatgagcctgcccatctggcaggtgcacctggtgctgcagaacaccaccaagctgctgggcttccccagccccggctggggcgaggtgagcgccctggcctgccccatgctgagacaggccctggccgcctgcgaggagctggccgacagaagcacccagagagccctgtgcctgatcctgagcaaggtgtacctggagcacagaagccccgacggcgccatccactacctgagccaggccctggtgctgggccagctgctgggcgagcaggagagcttcgagagcagcctgtgcctggcctgggcctacctgctggccagccaggccaagaaggccctggacgtgctggagcccctgctgtgcagcctgaaggagaccgagagcctgacccagagaggcgtgatctacaacctgctgggcctggccctgcagggcgagggcagagtgaacagagccgccaagagctacctgagagccctgaacagagcccaggaggtgggcgacgtgcacaaccaggccgtggccatggccaacctgggccacctgagcctgaagagctgggcccagcaccccgccagaaactacctgctgcaggccgtgagactgtactgcgagctgcaggccagcaaggagaccgacatggagctggtgcaggtgttcctgtggctggcccaggtgctggtgagcggccaccagctgacccacggcctgctgtgctacgagatggccctgctgttcggcctgagacacagacacctgaagagcaagtacgtgccctgctgctgggaggccatcgagaagagcgtgggcagcagcttcatccacttcctgagccaggtgatcagcttcatgagcctgctgtgcgtgcaggtgagcttcagaccccccaaccccagcgccatcagcaccgccctgtgcccccagaccctgagacacgccagccccaccatgagcaccggctggccctggctgagcaacagcggcaccggcagatggaagggcggctgctggagcccctggggcagcttcatcggcacctag

SEQ ID NO: 98758 - DNA, 453 bp, synthetic construct
  misc_feature 1..453: note = Description of Artificial Sequence: Synthetic coding sequence
  source 1..453: mol_type = other DNA
atgagcgagcagatgatgcagagcgtgggctgcagaatcagcctgagcgtgttccagttcctgggcgaccagagacaggagctggtggccttccacagactggccaccgtgtactacagcctgcacatgtacgagatggccgaggactgctacctgaagaccctgagcctgtgccccccctggctgcagagccccaaggaggccctgtactacgccaaggtgtactacagactgggcagactgaccttctgccagctgaaggacgcccacgacgccaccgagtacttcctgctggccctggccgccgccgtgctgctgggcgacgaggagctgcaggacaccatcagaagcagactggacaacatctgccagagccccctgtggcacagcagacccagcggctgcagcagcgagagagccagatggctgagcggcggcggcctggccctgtag

SEQ ID NO: 98759 - DNA, 3867 bp, synthetic construct
  misc_feature 1..3867: note = Description of Artificial Sequence: Synthetic coding sequence
  source 1..3867: mol_type = other DNA
atgggcggctgcttctgcatccccagagagagaagcctgaccagaggccccggcaaggagacccccagcaaggaccccaccgtgagcagcgagtgcatcgccagcagcgagtacaaggagaagtgcttcctgccccagaacatcaaccccgacctgaccctgagcttctgcgtgaagagcagaagcagaagatgcgtgaacggccccctgcaggaggccgccagaagaagactgtgggccctggagaacgaggaccaggaggtgagaatgctgttcaaggacctgagcgccagactggtgagcatccagagccagagagcccagttcctgatcaccttcaagaccatggaggagatctggaagttcagcacctacctgaacctgggctacgtgagcatgtgcctggagcacctgctgttcgaccacaagtactggctgaactgcatcctggtggaggacaccgagatccaggtgagcgtggacgacaagcacctggagaccatctacctgggcctgctgatccaggagggccacttcttctgcagagccctgtgcagcgtgaccccccccgccgagaaggagggcgagtgcctgaccctgtgcaagaacgagctgatcagcgtgaagatggccgaggccggcagcgagctggagggcgtgagcctggtgaccggccagagaggcctggtgctggtgagcgccctggagcccctgcccctgcccttccaccagtggttcctgaagaactaccccggcagctgcggcctgagcagaaagagagactggaccggcagctaccagatcggcagaggcagatgcaaggccctgaccggctacgagcccggcgagaaggacgagctgaacttctaccagggcgagagcatcgagatcatcggcttcgtgatccccggcctgcagtggttcatcggcaagagcaccagcagcggccaggtgggcttcgtgcccaccagaaacatcgaccccgacagctacagccccatgagcagaaacagcgccttcctgagcgacgaggagagatgcagcctgctggccctgggcagcgacaagcagaccgagtgcagcagcttcctgcacaccctggccagaaccgacatcaccagcgtgtacagactgagcggcttcgagagcatccagaacccccccaacgacctgagcgccagccagcccgagggcttcaaggaggtgagacccggcagagcctgggaggagcaccaggccgtgggcagcagacagagcagcagcagcgaggacagcagcctggaggaggagctgctgagcgccaccagcgacagctacagactgcccgagcccgacgacctggacgaccccgagctgctgatggacctgagcaccggccaggaggaggaggccgagaacttcgcccccatcctggccttcctggaccacgagggctacgccgaccacttcaagagcctgtacgacttcagcttcagcttcctgaccagcagcttctacagcttcagcgaggaggacgagttcgtggcctacctggaggccagcagaaagtgggccaagaagagccacatgacctgggcccacgccagactgtgcttcctgctgggcagactgagcatcagaaaggtgaagctgagccaggccagagtgtacttcgaggaggccatccacatcctgaacggcgccttcgaggacctgagcctggtggccaccctgtacatcaacctggccgccatctacctgaagcagagactgagacacaagggcagcgccctgctggagaaggccggcgccctgctggcctgcctgcccgacagagagagcagcgccaagcacgagctggacgtggtggcctacgtgctgagacagggcatcgtggtgggcagcagccccctggaggccagagcctgcttcctggccatcagactgctgctgagcctgggcagacacgaggaggtgctgcccttcgccgagagactgcagctgctgagcggccacccccccgccagcgaggccgtggccagcgtgctgagcttcctgtacgacaagaagtacctgccccacctggccgtggccagcgtgcagcagcacggcatccagagcgcccagggcatgagcctgcccatctggcaggtgcacctggtgctgcagaacaccaccaagctgctgggcttccccagccccggctggggcgaggtgagcgccctggcctgccccatgctgagacaggccctggccgcctgcgaggagctggccgacagaagcacccagagagccctgtgcctgatcctgagcaaggtgtacctggagcacagaagccccgacggcgccatccactacctgagccaggccctggtgctgggccagctgctgggcgagcaggagagcttcgagagcagcctgtgcctggcctgggcctacctgctggccagccaggccaagaaggccctggacgtgctggagcccctgctgtgcagcctgaaggagaccgagagcctgacccagagaggcgtgatctacaacctgctgggcctggccctgcagggcgagggcagagtgaacagagccgccaagagctacctgagagccctgaacagagcccaggaggtgggcgacgtgcacaaccaggccgtggccatggccaacctgggccacctgagcctgaagagctgggcccagcaccccgccagaaactacctgctgcaggccgtgagactgtactgcgagctgcaggccagcaaggagaccgacatggagctggtgcaggtgttcctgtggctggcccaggtgctggtgagcggccaccagctgacccacggcctgctgtgctacgagatggccctgctgttcggcctgagacacagacacctgaagagccagctgcaggccaccaagagcctgtgccacttctacagcagcgtgagccccaaccccgaggcctgcatcacctaccacgagcactggctggccctggcccagcagctgagagacagagagatggagggcagactgctggagagcctgggccagctgtacagaaacctgaacaccgccagaagcctgagaagaagcctgacctgcatcaaggagagcctgagaatcttcatcgacctgggcgagaccgacaaggccgccgaggcctggctgggcgccggcagactgcactacctgatgcaggaggacgagctggtggagctgtgcctgcaggccgccatccagaccgccctgaagagcgaggagcccctgctggccctgaagctgtacgaggaggccggcgacgtgttcttcaacggcaccagacacagacaccacgccgtggagtactacagagccggcgccgtgcccctggccagaagactgaaggccgtgagaaccgagctgagaatcttcaacaagctgaccgagctgcagatcagcctggagggctacgagaaggccctggagttcgccaccctggccgccagactgagcaccgtgaccggcgaccagagacaggagctggtggccttccacagactggccaccgtgtactacagcctgcacatgtacgagatggccgaggactgctacctgaagaccctgagcctgtgccccccctggctgcagagccccaaggaggccctgtactacgccaaggtgtactacagactgggcagactgaccttctgccagctgaaggacgcccacgacgccaccgagtacttcctgctggccctggccgccgccgtgctgctgggcgacgaggagctgcaggacaccatcagaagcagactggacaacatctgccagagccccctgtggcacagcagacccagcggctgcagcagcgagagagccagatggctgagcggcggcggcctggccctgtag

SEQ ID NO: 98760 - DNA, 2181 bp, synthetic construct
  misc_feature 1..2181: note = Description of Artificial Sequence: Synthetic coding sequence
  source 1..2181: mol_type = other DNA
atggacctgagcaccggccaggaggaggaggccgagaacttcgcccccatcctggccttcctggaccacgagggctacgccgaccacttcaagagcctgtacgacttcagcttcagcttcctgaccagcagcttctacagcttcagcgaggaggacgagttcgtggcctacctggaggccagcagaaagtgggccaagaagagccacatgacctgggcccacgccagactgtgcttcctgctgggcagactgagcatcagaaaggtgaagctgagccaggccagagtgtacttcgaggaggccatccacatcctgaacggcgccttcgaggacctgagcctggtggccaccctgtacatcaacctggccgccatctacctgaagcagagactgagacacaagggcagcgccctgctggagaaggccggcgccctgctggcctgcctgcccgacagagagagcagcgccaagcacgagctggacgtggtggcctacgtgctgagacagggcatcgtggtgggcagcagccccctggaggccagagcctgcttcctggccatcagactgctgctgagcctgggcagacacgaggaggtgctgcccttcgccgagagactgcagctgctgagcggccacccccccgccagcgaggccgtggccagcgtgctgagcttcctgtacgacaagaagtacctgccccacctggccgtggccagcgtgcagcagcacggcatccagagcgcccagggcatgagcctgcccatctggcaggtgcacctggtgctgcagaacaccaccaagctgctgggcttccccagccccggctggggcgaggtgagcgccctggcctgccccatgctgagacaggccctggccgcctgcgaggagctggccgacagaagcacccagagagccctgtgcctgatcctgagcaaggtgtacctggagcacagaagccccgacggcgccatccactacctgagccaggccctggtgctgggccagctgctgggcgagcaggagagcttcgagagcagcctgtgcctggcctgggcctacctgctggccagccaggccaagaaggccctggacgtgctggagcccctgctgtgcagcctgaaggagaccgagagcctgacccagagaggcgtgatctacaacctgctgggcctggccctgcagggcgagggcagagtgaacagagccgccaagagctacctgagagccctgaacagagcccaggaggtgggcgacgtgcacaaccaggccgtggccatggccaacctgggccacctgagcctgaagagctgggcccagcaccccgccagaaactacctgctgcaggccgtgagactgtactgcgagctgcaggccagcaaggagaccgacatggagctggtgcaggtgttcctgtggctggcccaggtgctggtgagcggccaccagctgacccacggcctgctgtgctacgagatggccctgctgttcggcctgagacacagacacctgaagagccagctgcaggccaccaagagcctgtgccacttctacagcagcgtgagccccaaccccgaggcctgcatcacctaccacgagcactggctggccctggcccagcagctgagagacagagagatggagggcagactgctggagagcctgggccagctgtacagaaacctgaacaccgccagaagcctgagaagaagcctgacctgcatcaaggagagcctgagaatcttcatcgacctgggcgagaccgacaaggccgccgaggcctggctgggcgccggcagactgcactacctgatgcaggaggacgagctggtggagctgtgcctgcaggccgccatccagaccgccctgaagagcgaggagcccctgctggccctgaagctgtacgaggaggccggcgacgtgttcttcaacggcaccagacacagacaccacgccgtggagtactacagagccggcgccgtgcccctggccagaagactgaaggccgtgagaaccgagctgagaatcttcaacaagctgaccgagctgcagatcagcctggagggctacgagaaggccctggagttcgccaccctggccgccagactgagcaccgtgaccgaggccagagccggcggcctgagcccccccggctacagcgtgctgctgcccgcccacgtgtag

SEQ ID NO: 98761 - DNA, 720 bp, synthetic construct
  misc_feature 1..720: note = Description of Artificial Sequence: Synthetic coding sequence
  source 1..720: mol_type = other DNA
atgcccctgctgctgctgggcgagaccgagcccctgaagctggagagagactgcagaagccccgtggacccctgggccgccgccagccccgacctggccctggcctgcctgtgccactgccaggacctgagcagcggcgccttccccgacagaggcgtgctgggcggcgtgctgttccccaccgtggagatggtgatcaaggtgttcgtggccaccagcagcggcagcatcgccatcagaaagaagcagcaggaggtggtgggcttcctggaggccaacaagatcgacttcaaggagctggacatcgccggcgacgaggacaacagaagatggatgagagagaacgtgcccggcgagaagaagccccagaacggcatccccctgcccccccagatcttcaacgaggagcagtactgcggcgacttcgacagcttcttcagcgccaaggaggagaacatcatctacagcttcctgggcctggcccccccccccgacagcaagggcagcgagaaggccgaggagggcggcgagaccgaggcccagaaggagggcagcgaggacgtgggcaacctgcccgaggcccaggagaagaacgaggaggagggcgagaccgccaccgaggagaccgaggagatcgccatggagggcgccgagggcgaggccgaggaggaggaggagaccgccgagggcgaggagcccggcgaggacgaggacagctag

SEQ ID NO: 98762 - DNA, 387 bp, synthetic construct
  misc_feature 1..387: note = Description of Artificial Sequence: Synthetic coding sequence
  source 1..387: mol_type = other DNA
atgagagagaacgtgcccggcgagaagaagccccagaacggcatccccctgcccccccagatcttcaacgaggagcagtactgcggcgacttcgacagcttcttcagcgccaaggaggagaacatcatctacagcttcctgggcctggcccccccccccgacagcaagggcagcgagaaggccgaggagggcggcgagaccgaggcccagaaggagggcagcgaggacgtgggcaacctgcccgaggcccaggagaagaacgaggaggagggcgagaccgccaccgaggagaccgaggagatcgccatggagggcgccgagggcgaggccgaggaggaggaggagaccgccgagggcgaggagcccggcgaggacgaggacagctag

SEQ ID NO: 98763 - DNA, 387 bp, synthetic construct; identical to SEQ ID NO: 98762
  misc_feature 1..387: note = Description of Artificial Sequence: Synthetic coding sequence
  source 1..387: mol_type = other DNA

SEQ ID NO: 98764 - DNA, 387 bp, synthetic construct; identical to SEQ ID NO: 98762
  misc_feature 1..387: note = Description of Artificial Sequence: Synthetic coding sequence
  source 1..387: mol_type = other DNA

SEQ ID NO: 98765 - DNA, 321 bp, synthetic construct
  misc_feature 1..321: note = Description of Artificial Sequence: Synthetic coding sequence
  source 1..321: mol_type = other DNA
atgagagagaacgtgcccggcgagaagaagccccagaacggcatccccctgcccccccagatcttcaacgaggagcagtactgcggcgacttcgacagcttcttcagcgccaaggaggagaacatcatctacagcttcctgggcctggcccccccccccgacagcaagggcagcgagaaggccgaggagggcggcgagaccgaggcccagaaggagggcagcgaggacgtgggcaacctgcccgaggcccaggagaagaacgaggaggagggcgagaccgccaccgaggagaccgaggagatcgccatggagggcgcctag

SEQ ID NO: 98766 - DNA, 2373 bp, synthetic construct
  misc_feature 1..2373: note = Description of Artificial Sequence: Synthetic coding sequence
  source 1..2373: mol_type = other DNA
atgaacatcatgaacaccgagcagagccagaacagcatcgtgagcagaatcaaggtgttcgagggccagaccaacatcgagaccagcggcctgcccaagaagcccgagatcacccccagaagcctgccccccaagcccaccgtgagcagcggcaagcccagcgtggcccccaagcccgccgccaacagagccagcggcgagtgggacagcggcaccgagaacagactgaaggtgaccagcaaggagggcctgaccccctacccccccctgcaggaggccggcagcatccccgtgaccaagcccgagctgcccaagaagcccaaccccggcctgatcagaagcgtgaaccccgagatccccggcagaggccccctggccgagagcagcgacagcggcaagaaggtgcccacccccgcccccagacccctgctgctgaagaagagcgtgagcagcgagaaccccacctaccccagcgcccccctgaagcccgtgaccgtgccccccagactggccggcgccagccaggccaaggcctacaagagcctgggcgagggcccccccgccaacccccccgtgcccgtgctgcagagcaagcccctggtggacatcgacctgatcagcttcgacgacgacgtgctgcccacccccagcggcaacctggccgaggagagcgtgggcagcgagatggtgctggaccccttccagctgcccgccaagaccgagcccatcaaggagagagccgtgcagcccgcccccaccagaaagcccaccgtgatcagaatccccgccaagcccggcaagtgcctgcacgaggacccccagagccccccccccctgcccgccgagaagcccatcggcaacaccttcagcaccgtgagcggcaagctgagcaacgtggagagaaccagaaacctggagagcaaccaccccggccagaccggcggcttcgtgagagtgccccccagactgccccccagacccgtgaacggcaagaccatccccacccagcagccccccaccaaggtgccccccgagagaccccccccccccaagctgagcgccaccagaagaagcaacaagaagctgcccttcaacagaagcagcagcgacatggacctgcagaagaagcagagcaacctggccaccggcctgagcaaggccaagagccaggtgttcaagaaccaggaccccgtgctgccccccagacccaagcccggccaccccctgtacagcaagtacatgctgagcgtgccccacggcatcgccaacgaggacatcgtgagccagaaccccggcgagctgagctgcaagagaggcgacgtgctggtgatgctgaagcagaccgagaacaactacctggagtgccagaagggcgaggacaccggcagagtgcacctgagccagatgaagatcatcacccccctggacgagcacctgagaagcagacccaacgaccccagccacgcccagaagcccgtggacagcggcgccccccacgccgtggtgctgcacgacttccccgccgagcaggtggacgacctgaacctgaccagcggcgagatcgtgtacctgctggagaagatcgacaccgactggtacagaggcaactgcagaaaccagatcggcatcttccccgccaactacgtgaaggtgatcatcgacatccccgagggcggcaacggcaagagagagtgcgtgagcagccactgcgtgaagggcagcagatgcgtggccagattcgagtacatcggcgagcagaaggacgagctgagcttcagcgagggcgagatcatcatcctgaaggagtacgtgaacgaggagtgggccagaggcgaggtgagaggcagaaccggcatcttccccctgaacttcgtggagcccgtggaggactaccccaccagcggcgccaacgtgctgagcaccaaggtgcccctgaagaccaagaaggaggacagcggcagcaacagccaggtgaacagcctgcccgccgagtggtgcgaggccctgcacagcttcaccgccgagaccagcgacgacctgagcttcaagagaggcgacagaatccagatcctggagagactggacagcgactggtgcagaggcagactgcaggacagagagggcatcttccccgccgtgttcgtgagaccctgccccgccgaggccaagagcatgctggccatcgtgcccaagggcagaaaggccaaggccctgtacgacttcagaggcgagaacgaggacgagctgagcttcaaggccggcgacatcatcaccgagctggagagcgtggacgacgactggatgagcggcgagctgatgggcaagagcggcatcttccccaagaactacatccagttcctgcagatcagctag

SEQ ID NO: 98767 - DNA, 2373 bp, synthetic construct; identical to SEQ ID NO: 98766
  misc_feature 1..2373: note = Description of Artificial Sequence: Synthetic coding sequence
  source 1..2373: mol_type = other DNA

SEQ ID NO: 98768 - DNA, 2304 bp, synthetic construct
  misc_feature 1..2304: note = Description of Artificial Sequence: Synthetic coding sequence
  source 1..2304: mol_type = other DNA
atgaacatcatgaacaccgagcagagccagaacagcatcgtgagcagaatcaaggtgttcgagggccagaccaacatcgagaccagcggcctgcccaagaagcccgagatcacccccagaagcctgccccccaagcccaccgtgagcagcggcaagcccagcgtggcccccaagcccgccgccaacagagccagcggcgagtgggacagcggcaccgagaacagactgaaggtgaccagcaaggagggcctgaccccctacccccccctgcaggaggccggcagcatccccgtgaccaagcccgagctgcccaagaagcccaaccccggcctgatcagaagcgtgaaccccgagatccccggcagaggccccctggccgagagcagcgacagcggcaagaaggtgcccacccccgcccccagacccctgctgctgaagaagagcgtgagcagcgagaaccccacctaccccagcgcccccctgaagcccgtgaccgtgccccccagactggccggcgccagccaggccaaggcctacaagagcctgggcgagggcccccccgccaacccccccgtgcccgtgctgcagagcaagcccctggtggacatcgacctgatcagcttcgacgacgacgtgctgcccacccccagcggcaacctggccgaggagagcgtgggcagcgagatggtgctggaccccttccagctgcccgccaagaccgagcccatcaaggagagagccgtgcagcccgcccccaccagaaagcccaccgtgatcagaatccccgccaagcccggcaagtgcctgcacgaggacccccagagccccccccccctgcccgccgagaagcccatcggcaacaccttcagcaccgtgagcggcaagctgagcaacgtggagagaaccagaaacctggagagcaaccaccccggccagaccggcggcttcgtgagagtgccccccagactgccccccagacccgtgaacggcaagaccatccccacccagcagccccccaccaaggtgccccccgagagaccccccccccccaagctgagcgccaccagaagaagcaacaagaagctgcccttcaacagaagcagcagcgacatggacctgcagaagaagcagagcaacctggccaccggcctgagcaaggccaagagccaggtgttcaagaaccaggaccccgtgctgccccccagacccaagcccggccaccccctgtacagcaagtacatgagaggcgacgtgctggtgatgctgaagcagaccgagaacaactacctggagtgccagaagggcgaggacaccggcagagtgcacctgagccagatgaagatcatcacccccctggacgagcacctgagaagcagacccaacgaccccagccacgcccagaagcccgtggacagcggcgccccccacgccgtggtgctgcacgacttccccgccgagcaggtggacgacctgaacctgaccagcggcgagatcgtgtacctgctggagaagatcgacaccgactggtacagaggcaactgcagaaaccagatcggcatcttccccgccaactacgtgaaggtgatcatcgacatccccgagggcggcaacggcaagagagagtgcgtgagcagccactgcgtgaagggcagcagatgcgtggccagattcgagtacatcggcgagcagaaggacgagctgagcttcagcgagggcgagatcatcatcctgaaggagtacgtgaacgaggagtgggccagaggcgaggtgagaggcagaaccggcatcttccccctgaacttcgtggagcccgtggaggactaccccaccagcggcgccaacgtgctgagcaccaaggtgcccctgaagaccaagaaggaggacagcggcagcaacagccaggtgaacagcctgcccgccgagtggtgcgaggccctgcacagcttcaccgccgagaccagcgacgacctgagcttcaagagaggcgacagaatccagatcctggagagactggacagcgactggtgcagaggcagactgcaggacagagagggcatcttccccgccgtgttcgtgagaccctgccccgccgaggccaagagcatgctggccatcgtgcccaagggcagaaaggccaaggccctgtacgacttcagaggcgagaacgaggacgagctgagcttcaaggccggcgacatcatcaccgagctggagagcgtggacgacgactggatgagcggcgagctgatgggcaagagcggcatcttccccaagaactacatccagttcctgcagatcagctag

SEQ ID NO: 98769 - DNA, 2196 bp, synthetic construct
  misc_feature 1..2196: note = Description of Artificial Sequence: Synthetic coding sequence
  source 1..2196: mol_type = other DNA
atgaacatcatgaacaccgagcagagccagaacagcatcgtgagcagaatcaaggtgttcgagggccagaccaacatcgagaccagcggcctgcccaagaagcccgagatcacccccagaagcctgccccccaagcccaccgtgagcagcggcaagcccagcgtggcccccaagcccgccgccaacagagccagcggcgagtgggacagcggcaccgagaacagactgaaggtgaccagcaaggagggcctgaccccctacccccccctgcaggaggccggcagcatccccgtgaccaagcccgagctgcccaagaagcccaaccccggcctgatcagaagcgtgaaccccgagatccccggcagaggccccctggccgagagcagcgacagcggcaagaaggtgcccacccccgcccccagacccctgctgctgaagaagagcgtgagcagcgagaaccccacctaccccagcgcccccctgaagcccgtgaccgtgccccccagactggccggcgccagccaggccaaggcctacaagagcctgggcgagggcccccccgccaacccccccgtgcccgtgctgcagagcaagcccctggtggacatcgacctgatcagcttcgacgacgacgtgctgcccacccccagcggcaacctggccgaggagagcgtgggcagcgagatggtgctgggcctgcacgaggacccccagagccccccccccctgcccgccgagaagcccatcggcaacaccttcagcaccgtgagcggcaagctgagcaacgtggagagaaccagaaacctggagagcaaccaccccggccagaccggcggcttcgtgagagtgccccccagactgccccccagacccgtgaacggcaagaccatccccacccagcagccccccaccaaggtgccccccgagagaccccccccccccaagctgagcgccaccagaagaagcaacaagaagctgcccttcaacagaagcagcagcgacatggacctgcagaagaagcagagcaacctggccaccggcctgagcaaggccaagagccaggtgttcaagaaccaggaccccgtgctgccccccagacccaagcccggccaccccctgtacagcaagtacatgagaggcgacgtgctggtgatgctgaagcagaccgagaacaactacctggagtgccagaagggcgaggacaccggcagagtgcacctgagccagatgaagatcatcacccccctggacgagcacctgagaagcagacccaacgaccccagccacgcccagaagcccgtggacagcggcgccccccacgccgtggtgctgcacgacttccccgccgagcaggtggacgacctgaacctgaccagcggcgagatcgtgtacctgctggagaagatcgacaccgactggtacagaggcaactgcagaaaccagatcggcatcttccccgccaactacgtgaaggtgatcatcgacatccccgagggcggcaacggcaagagagagtgcgtgagcagccactgcgtgaagggcagcagatgcgtggccagattcgagtacatcggcgagcagaaggacgagctgagcttcagcgagggcgagatcatcatcctgaaggagtacgtgaacgaggagtgggccagaggcgaggtgagaggcagaaccggcatcttccccctgaacttcgtggagcccgtggaggactaccccaccagcggcgccaacgtgctgagcaccaaggtgcccctgaagaccaagaaggaggacagcggcagcaacagccaggtgaacagcctgcccgccgagtggtgcgaggccctgcacagcttcaccgccgagaccagcgacgacctgagcttcaagagaggcgacagaatccagatcctggagagactggacagcgactggtgcagaggcagactgcaggacagagagggcatcttccccgccgtgttcgtgagaccctgccccgccgaggccaagagcatgctggccatcgtgcccaagggcagaaaggccaaggccctgtacgacttcagaggcgagaacgaggacgagctgagcttcaaggccggcgacatcatcaccgagctggagagcgtggacgacgactggatgagcggcgagctgatgggcaagagcggcatcttccccaagaactacatccagttcctgcagatcagctag

SEQ ID NO: 98770 - DNA, 2196 bp, synthetic construct; identical to SEQ ID NO: 98769
  misc_feature 1..2196: note = Description of Artificial Sequence: Synthetic coding sequence
  source 1..2196: mol_type = other DNA

SEQ ID NO: 98771 - DNA, 2304 bp, synthetic construct; identical to SEQ ID NO: 98768
  misc_feature 1..2304: note = Description of Artificial Sequence: Synthetic coding sequence
  source 1..2304: mol_type = other DNA

SEQ ID NO: 98772 - DNA, 2304 bp, synthetic construct; identical to SEQ ID NO: 98768
  misc_feature 1..2304: note = Description of Artificial Sequence: Synthetic coding sequence
  source 1..2304: mol_type = other DNA

SEQ ID NO: 98773 - DNA, 2190 bp, synthetic construct
  misc_feature 1..2190: note = Description of Artificial Sequence: Synthetic coding sequence
  source 1..2190: mol_type = other DNA
atggacgacctgaccctgctggacctgctggagtgccccgtgtgcttcgagaagctggacgtgaccgccaaggtgctgccctgccagcacaccttctgcaagccctgcctgcagagagtgttcaaggcccacaaggagctgagatgccccgagtgcagaacccccgtgttcagcaacatcgaggccctgcccgccaacctgctgctggtgagactgctggacggcgtgagaagcggccagagcagcggcagaggcggcagcttcagaagacccggcaccatgaccctgcaggacggcagaaagagcagaaccaaccccagaagactgcaggccagccccttcagactggtgcccaacgtgagaatccacatggacggcgtgcccagagccaaggccctgtgcaactacagaggccagaaccccggcgacctgagattcaacaagggcgacatcatcctgctgagaagacagctggacgagaactggtaccagggcgagatcaacggcatcagcggcaacttccccgccagcagcgtggaggtgatcaagcagctgccccagcccccccccctgtgcagagccctgtacaacttcgacctgagaggcaaggacaagagcgagaaccaggactgcctgaccttcctgaaggacgacatcatcaccgtgatcagcagagtggacgagaactgggccgagggcaagctgggcgacaaggtgggcatcttccccatcctgttcgtggagcccaacctgaccgccagacacctgctggagaagaacaagggcagacagagcagcagaaccaagaacctgagcctggtgagcagcagcagcagaggcaacaccagcaccctgagaagaggccccggcagcagaagaaaggtgcccggccagttcagcatcaccaccgccctgaacaccctgaacagaatggtgcacagccccagcggcagacacatggtggagatcagcacccccgtgctgatcagcagcagcaaccccagcgtgatcacccagcccatggagaaggccgacgtgcccagcagctgcgtgggccaggtgagcacctaccaccccgcccccgtgagccccggccacagcaccgccgtggtgagcctgcccggcagccagcagcacctgagcgccaacatgttcgtggccctgcacagctacagcgcccacggccccgacgagctggacctgcagaagggcgagggcgtgagagtgctgggcaagtgccaggacggctggctgagaggcgtgagcctggtgaccggcagagtgggcatcttccccaacaactacgtgatccccatcttcagaaagaccagcagcttccccgacagcagaagccccggcctgtacaccacctggaccctgagcaccagcagcgtgagcagccagggcagcatcagcgagggcgaccccagacagagcagacccttcaagagcgtgttcgtgcccaccgccatcgtgaaccccgtgagaagcaccgccggccccggcaccctgggccagggcagcctgagaaagggcagaagcagcatgagaaagaacggcagcctgcagagacccctgcagagcggcatccccaccctggtggtgggcagcctgagaagaagccccaccatggtgctgagaccccagcagttccagttctaccagccccagggcatccccagcagccccagcgccgtggtggtggagatgggcagcaagcccgccctgaccggcgagcccgccctgacctgcatcagcagaggcagcgaggcctggatccacagcgccgccagcagcctgatcatggaggacaaggagatccccatcaagagcgagcccctgcccaagccccccgccagcgccccccccagcatcctggtgaagcccgagaacagcagaaacggcatcgagaagcaggtgaagaccgtgagattccagaactacagccccccccccaccaagcactacaccagccaccccaccagcggcaagcccgagcagcccgccaccctgaaggccagccagcccgaggccgccagcctgggccccgagatgaccgtgctgttcgcccacagaagcggctgccacagcggccagcagaccgacctgagaagaaagagcgccctgggcaaggccaccaccctggtgagcaccgccagcggcacccagaccgtgttccccagcaagtag

SEQ ID NO: 98774 - DNA, 2190 bp, synthetic construct; identical to SEQ ID NO: 98773
  misc_feature 1..2190: note = Description of Artificial Sequence: Synthetic coding sequence
  source 1..2190: mol_type = other DNA

SEQ ID NO: 98775 - DNA, 387 bp, synthetic construct
  misc_feature 1..387: note = Description of Artificial Sequence: Synthetic coding sequence
  source 1..387: mol_type = other DNA
atggaggacaaggagatccccatcaagagcgagcccctgcccaagccccccgccagcgccccccccagcatcctggtgaagcccgagaacagcagaaacggcatcgagaagcaggtgaagaccgtgagattccagaactacagccccccccccaccaagcactacaccagccaccccaccagcggcaagcccgagcagcccgccaccctgaaggccagccagcccgaggccgccagcctgggccccgagatgaccgtgctgttcgcccacagaagcggctgccacagcggccagcagaccgacctgagaagaaagagcgccctgggcaaggccaccaccctggtgagcaccgccagcggcacccagaccgtgttccccagcaagtag

SEQ ID NO: 98776 - DNA, 1686 bp, synthetic construct
  misc_feature 1..1686: note = Description of Artificial Sequence: Synthetic coding sequence
  source 1..1686: mol_type = other DNA
atggccgccgaggagatgcactggcccgtgcccatgaaggccatcggcgcccagaacctgctgaccatgcccggcggcgtggccaaggccggctacctgcacaagaagggcggcacccagctgcagctgctgaagtggcccctgagattcgtgatcatccacaagagatgcgtgtactacttcaagagcagcaccagcgccagcccccagggcgccttcagcctgagcggctacaacagagtgatgagagccgccgaggagaccaccagcaacaacgtgttccccttcaagatcatccacatcagcaagaagcacagaacctggttcttcagcgccagcagcgaggaggagagaaagagctggatggccctgctgagaagagagatcggccacttccacgagaagaaggacctgcccctggacaccagcgacagcagcagcgacaccgacagcttctacggcgccgtggagagacccgtggacatcagcctgagcccctaccccaccgacaacgaggactacgagcacgacgacgaggacgacagctacctggagcccgacagccccgagcccggcagactggaggacgccctgatgcacccccccgcctacccccccccccccgtgcccacccccagaaagcccgccttcagcgacatgcccagagcccacagcttcaccagcaagggccccggccccctgctgcccccccccccccccaagcacggcctgcccgacgtgggcctggccgccgaggacagcaagagagaccccctgtgccccagaagagccgagccctgccccagagtgcccgccacccccagaagaatgagcgacccccccctgagcaccatgcccaccgcccccggcctgagaaagcccccctgcttcagagagagcgccagccccagccccgagccctggacccccggccacggcgcctgcagcaccagcagcgccgccatcatggccaccgccaccagcagaaactgcgacaagctgaagagcttccacctgagccccagaggcccccccaccagcgagcccccccccgtgcccgccaacaagcccaagttcctgaagatcgccgaggaggacccccccagagaggccgccatgcccggcctgttcgtgccccccgtggcccccagaccccccgccctgaagctgcccgtgcccgaggccatggccagacccgccgtgctgcccagacccgagaagccccagctgccccacctgcagagaagcccccccgacggccagagcttcagaagcttcagcttcgagaagcccagacagcccagccaggccgacaccggcggcgacgacagcgacgaggactacgagaaggtgcccctgcccaacagcgtgttcgtgaacaccaccgagagctgcgaggtggagagactgttcaaggccaccagccccagaggcgagccccaggacggcctgtactgcatcagaaacagcagcaccaagagcggcaaggtgctggtggtgtgggacgagaccagcaacaaggtgagaaactacagaatcttcgagaaggacagcaagttctacctggagggcgaggtgctgttcgtgagcgtgggcagcatggtggagcactaccacacccacgtgctgcccagccaccagagcctgctgctgagacacccctacggctacaccggccccagatag

SEQ ID NO: 98777 - DNA, 294 bp, synthetic construct
  misc_feature 1..294: note = Description of Artificial Sequence: Synthetic coding sequence
  source 1..294: mol_type = other DNA
atggccgccgaggagatgcactggcccgtgcccatgaaggccatcggcgcccagaacctgctgaccatgcccggcggcgtggccaaggccggctacctgcacaagaagggcggcacccagctgcagctgctgaagtggcccctgagattcgtgatcatccacaagagatgcgtgtactacttcaagagcagcaccagcgccagcccccagggcgccttcagcctgagcggctacaacagacagcccagaccccagcccgcccaggccctgagccagaccgaggccggcccctag

SEQ ID NO: 98778 - DNA, 1686 bp, synthetic construct; identical to SEQ ID NO: 98776
  misc_feature 1..1686: note = Description of Artificial Sequence: Synthetic coding sequence
  source 1..1686: mol_type = other DNA

SEQ ID NO: 98779 - DNA, 1770 bp, synthetic construct
  misc_feature 1..1770: note = Description of Artificial Sequence: Synthetic coding sequence
  source 1..1770: mol_type = other DNA
atggccagcctgggccccagaacccccgcccccagcagaagcagaggcagaagagccatgtgctgggtgagcaccatcagcttcatggccgccgaggagatgcactggcccgtgcccatgaaggccatcggcgcccagaacctgctgaccatgcccggcggcgtggccaaggccggctacctgcacaagaagggcggcacccagctgcagctgctgaagtggcccctgagattcgtgatcatccacaagagatgcgtgtactacttcaagagcagcaccagcgccagcccccagggcgccttcagcctgagcggctacaacagagtgatgagagccgccgaggagaccaccagcaacaacgtgttccccttcaagatcatccacatcagcaagaagcacagaacctggttcttcagcgccagcagcgaggaggagagaaagagctggatggccctgctgagaagagagatcggccacttccacgagaagaaggacctgcccctggacaccagcgacagcagcagcgacaccgacagcttctacggcgccgtggagagacccgtggacatcagcctgagcccctaccccaccgacaacgaggactacgagcacgacgacgaggacgacagctacctggagcccgacagccccgagcccggcagactggaggacgccctgatgcacccccccgcctacccccccccccccgtgcccacccccagaaagcccgccttcagcgacatgcccagagcccacagcttcaccagcaagggccccggccccctgctgcccccccccccccccaagcacggcctgcccgacgtgggcctggccgccgaggacagcaagagagaccccctgtgccccagaagagccgagccctgccccagagtgcccgccacccccagaagaatgagcgacccccccctgagcaccatgcccaccgcccccggcctgagaaagcccccctgcttcagagagagcgccagccccagccccgagccctggacccccggccacggcgcctgcagcaccagcagcgccgccatcatggccaccgccaccagcagaaactgcgacaagctgaagagcttccacctgagccccagaggcccccccaccagcgagcccccccccgtgcccgccaacaagcccaagttcctgaagatcgccgaggaggacccccccagagaggccgccatgcccggcctgttcgtgccccccgtggcccccagaccccccgccctgaagctgcccgtgcccgaggccatggccagacccgccgtgctgcccagacccgagaagccccagctgccccacctgcagagaagcccccccgacggccagagcttcagaagcttcagcttcgagaagcccagacagcccagccaggccgacaccggcggcgacgacagcgacgaggactacgagaaggtgcccctgcccaacagcgtgttcgtgaacaccaccgagagctgcgaggtggagagactgttcaaggccaccagccccagaggcgagccccaggacggcctgtactgcatcagaaacagcagcaccaagagcggcaaggtgctggtggtgtgggacgagaccagcaacaaggtgagaaactacagaatcttcgagaaggacagcaagttctacctggagggcgaggtgctgttcgtgagcgtgggcagcatggtggagcactaccacacccacgtgctgcccagccaccagagcctgctgctgagacacccctacggctacaccggccccagatag

SEQ ID NO: 98780 - DNA, 1686 bp, synthetic construct; identical to SEQ ID NO: 98776
  misc_feature 1..1686: note = Description of Artificial Sequence: Synthetic coding sequence
  source 1..1686: mol_type = other DNA

SEQ ID NO: 98781 - DNA, 429 bp, synthetic construct
  misc_feature 1..429: note = Description of Artificial Sequence: Synthetic coding sequence
  source 1..429: mol_type = other DNA
atggccgccgaggagatgcactggcccgtgcccatgaaggccatcggcgcccagaacctgctgaccatgcccggcggcgtggccaaggccggctacctgcacaagaagggcggcacccagctgcagctgctgaagtggcccctgagattcgtgatcatccacaagagatgcgtgtactacttcaagagcagcaccagcgccagcccccagggcgccttcagcctgagcggctacaacagagtgatgagagccgccgaggagaccaccagcaacaacgtgttccccttcaagatcatccacatcagcaagaagcacagaacctggttcttcagcgccagcagcgaggaggagagaaagagctggatggccctgctgagaagagagatcggccacttccacgagaagaaggacctgcccctggacacctag

SEQ ID NO: 98782 - DNA, 429 bp, synthetic construct; identical to SEQ ID NO: 98781
  misc_feature 1..429: note = Description of Artificial Sequence: Synthetic coding sequence
  source 1..429: mol_type = other DNA

SEQ ID NO: 98783 - DNA, 1857 bp, synthetic construct
  misc_feature 1..1857: note = Description of Artificial Sequence: Synthetic coding sequence
  source 1..1857: mol_type = other DNA
atggccggcagcggccccagacccagaagctggggcagaagagaggccggcgccagagacgaggccgccgccgccggcggcagaggccccggcccctgcagatgcagccagggcagaagagcctggatcgcccccggcaagcccgccatgcccgccgcctggacccccttcatggccgccgaggagatgcactggcccgtgcccatgaaggccatcggcgcccagaacctgctgaccatgcccggcggcgtggccaaggccggctacctgcacaagaagggcggcacccagctgcagctgctgaagtggcccctgagattcgtgatcatccacaagagatgcgtgtactacttcaagagcagcaccagcgccagcccccagggcgccttcagcctgagcggctacaacagagtgatgagagccgccgaggagaccaccagcaacaacgtgttccccttcaagatcatccacatcagcaagaagcacagaacctggttcttcagcgccagcagcgaggaggagagaaagagctggatggccctgctgagaagagagatcggccacttccacgagaagaaggacctgcccctggacaccagcgacagcagcagcgacaccgacagcttctacggcgccgtggagagacccgtggacatcagcctgagcccctaccccaccgacaacgaggactacgagcacgacgacgaggacgacagctacctggagcccgacagccccgagcccggcagactggaggacgccctgatgcacccccccgcctacccccccccccccgtgcccacccccagaaagcccgccttcagcgacatgcccagagcccacagcttcaccagcaagggccccggccccctgctgcccccccccccccccaagcacggcctgcccgacgtgggcctggccgccgaggacagcaagagagaccccctgtgccccagaagagccgagccctgccccagagtgcccgccacccccagaagaatgagcgacccccccctgagcaccatgcccaccgcccccggcctgagaaagcccccctgcttcagagagagcgccagccccagccccgagccctggacccccggccacggcgcctgcagcaccagcagcgccgccatcatggccaccgccaccagcagaaactgcgacaagctgaagagcttccacctgagccccagaggcccccccaccagcgagcccccccccgtgcccgccaacaagcccaagttcctgaagatcgccgaggaggacccccccagagaggccgccatgcccggcctgttcgtgccccccgtggcccccagaccccccgccctgaagctgcccgtgcccgaggccatggccagacccgccgtgctgcccagacccgagaagccccagctgccccacctgcagagaagcccccccgacggccagagcttcagaagcttcagcttcgagaagcccagacagcccagccaggccgacaccggcggcgacgacagcgacgaggactacgagaaggtgcccctgcccaacagcgtgttcgtgaacaccaccgagagctgcgaggtggagagactgttcaaggccaccagccccagaggcgagccccaggacggcctgtactgcatcagaaacagcagcaccaagagcggcaaggtgctggtggtgtgggacgagaccagcaacaaggtgagaaactacagaatcttcgagaaggacagcaagttctacctggagggcgaggtgctgttcgtgagcgtgggcagcatggtggagcactaccacacccacgtgctgcccagccaccagagcctgctgctgagacacccctacggctacaccggccccagatag

SEQ ID NO: 98784 - DNA, 519 bp, synthetic construct
  misc_feature 1..519: note = Description of Artificial Sequence: Synthetic coding sequence
  source 1..519: mol_type = other DNA
atggccgccgaggagatgcactggcccgtgcccatgaaggccatcggcgcccagaacctgctgaccatgcccggcggcgtggccaaggccggctacctgcacaagaagggcggcacccagctgcagctgctgaagtggcccctgagattcgtgatcatccacaagagatgcgtgtactacttcaagagcagcaccagcgccagcccccagggcgccttcagcctgagcggctacaacagagtgatgagagccgccgaggagaccaccagcaacaacgtgttccccttcaagatcatccacatcagcaagaagcacagaacctggttcttcagcgccagcagcgaggaggagagaaagagctggatggccctgctgagaagagagatcggccacttccacgagaagaaggacctgcccctggacaccagcgacagcagcagcgacaccgacagcttctacggcgccgtggagagacccgtggacatcagcctgagcccctaccccaccgacaacgagtag

SEQ ID NO: 98785 - DNA, 567 bp, synthetic construct
  misc_feature 1..567: note = Description of Artificial Sequence: Synthetic coding sequence
  source 1..567: mol_type = other DNA
atggccgccgaggagatgcactggcccgtgcccatgaaggccatcggcgcccagaacctgctgaccatgcccggcggcgtggccaaggccggctacctgcacaagaagggcggcacccagctgcagctgctgaagtggcccctgagattcgtgatcatccacaagagatgcgtgtactacttcaagagcagcaccagcgccagcccccagggcgccttcagcctgagcggctacaacagagtgatgagagccgccgaggagaccaccagcaacaacgtgttccccttcaagatcatccacatcagcaagaagcacagaacctggttcttcagcgccagcagcgaggaggagagaaagagctggatggccctgctgagaagagagatcggccacttccacgagaagaaggacctgcccctggacaccagcgacagcagcagcgacaccgacagcttctacggcgccgtggagagacccgtggacatcagcctgagcccctaccccaccgacaacgaggactacgagcacgacgacgaggacgacagctacctggagcccgacagctag

SEQ ID NO: 98786 - DNA, 1686 bp, synthetic construct; identical to SEQ ID NO: 98776
  misc_feature 1..1686: note = Description of Artificial Sequence: Synthetic coding sequence
  source 1..1686: mol_type = other DNA

SEQ ID NO: 98787 - DNA, 585 bp, synthetic construct
  misc_feature 1..585: note = Description of Artificial Sequence: Synthetic coding sequence
  source 1..585: mol_type = other DNA
atggccgccgaggagatgcactggcccgtgcccatgaaggccatcggcgcccagaacctgctgaccatgcccggcggcgtggccaaggccggctacctgcacaagaagggcggcacccagctgcagctgctgaagtggcccctgagattcgtgatcatccacaagagatgcgtgtactacttcaagagcagcaccagcgccagcccccagggcgccttcagcctgagcggctacaacagagtgatgagagccgccgaggagaccaccagcaacaacgtgttccccttcaagatcatccacatcagcaagaagcacagaacctggttcttcagcgccagcagcgaggaggagagaaagagctggatggccctgctgagaagagagatcggccacttccacgagaagaaggacctgcccctggacaccagcgacagcagcagcgacaccgacagcttctacggcgccgtggagagacccgtggacatcagcctgagcccctaccccaccgacaacgaggactacgagcacgacgacgaggacgacagctacctggagcccgacagccccgagcccggcagactgtag

SEQ ID NO: 98788 - DNA, 411 bp, synthetic construct
  misc_feature 1..411: note = Description of Artificial Sequence: Synthetic coding sequence
  source 1..411: mol_type = other DNA
atggccgccgaggagatgcactggcccgtgcccatgaaggccatcggcgcccagaacctgctgaccatgcccggcggcgtggccaaggccggctacctgcacaagaagggcggcacccagctgcagctgctgaagtggcccctgagattcgtgatcatccacaagagatgcgtgtactacttcaagagcagcaccagcgccagcccccagggcgccttcagcctgagcggctacaacagagtgatgagagccgccgaggagaccaccagcaacaacgtgttccccttcaagatcatccacatcagcaagaagcacagaacctggttcttcagcgccagcagcgaggaggagagaaagagctggatggccctgctgagaagagagatcggccacttccacgagaagaagtag

SEQ ID NO: 98789 - DNA, 2892 bp, synthetic construct
  misc_feature 1..2892: note = Description of Artificial Sequence: Synthetic coding sequence
  source 1..2892: mol_type = other DNA
atggccgcccagagaatcagagccgccaacagcaacggcctgcccagatgcaagagcgagggcaccctgatcgacctgagcgagggcttcagcgagaccagcttcaacgacatcaaggtgcccagccccagcgccctgctggtggacaaccccacccccttcggcaacgccaaggaggtgatcgccatcaaggactactgccccaccaacttcaccaccctgaagttcagcaagggcgaccacctgtacgtgctggacaccagcggcggcgagtggtggtacgcccacaacaccaccgagatgggctacatccccagcagctacgtgcagcccctgaactacagaaacagcaccctgagcgacagcggcatgatcgacaacctgcccgacagccccgacgaggtggccaaggagctggagctgctgggcggctggaccgacgacaagaaggtgcccggcagaatgtacagcaacaaccccttctggaacggcgtgcagaccaaccccttcctgaacggcaacgtgcccgtgatgcccagcctggacgagctgaaccccaagagcaccgtggacctgctgctgttcgacgccggcaccagcagcttcaccgagagcagcagcgccaccaccaacagcaccggcaacatcttcgacgagctgcccgtgaccaacggcctgcacgccgagccccccgtgagaagagacaaccccttcttcagaagcaagagaagctacagcctgagcgagctgagcgtgctgcaggccaagagcgacgcccccaccagcagcagcttcttcaccggcctgaagagccccgcccccgagcagttccagagcagagaggacttcagaaccgcctggctgaaccacagaaagctggccagaagctgccacgacctggacctgctgggccagagccccggctggggccagacccaggccgtggagaccaacatcgtgtgcaagctggacagcagcggcggcgccgtgcagctgcccgacaccagcatcagcatccacgtgcccgagggccacgtggcccccggcgagacccagcagatcagcatgaaggccctgctggacccccccctggagctgaacagcgacagaagctgcagcatcagccccgtgctggaggtgaagctgagcaacctggaggtgaagaccagcatcatcctggagatgaaggtgagcgccgagatcaagaacgacctgttcagcaagagcaccgtgggcctgcagtgcctgagaagcgacagcaaggagggcccctacgtgagcgtgcccctgaactgcagctgcggcgacaccgtgcaggcccagctgcacaacctggagccctgcatgtacgtggccgtggtggcccacggccccagcatcctgtaccccagcaccgtgtgggacttcatcaacaagaaggtgaccgtgggcctgtacggccccaagcacatccaccccagcttcaagaccgtggtgaccatcttcggccacgactgcgcccccaagaccctgctggtgagcgaggtgaccagacaggcccccaaccccgcccccgtggccctgcagctgtggggcaagcaccagttcgtgctgagcagaccccaggacctgaaggtgtgcatgttcagcaacatgaccaactacgaggtgaaggccagcgagcaggccaaggtggtgagaggcttccagctgaagctgggcaaggtgagcagactgatcttccccatcaccagccagaaccccaacgagctgagcgacttcaccctgagagtgcaggtgaaggacgaccaggaggccatcctgacccagttctgcgtgcagaccccccagcccccccccaagagcgccatcaagcccagcggccagagaagattcctgaagaagaacgaggtgggcaagatcatcctgagccccttcgccaccaccaccaagtaccccaccttccaggacagacccgtgagcagcctgaagttcggcaagctgctgaagaccgtggtgagacagaacaagaaccactacctgctggagtacaagaagggcgacggcatcgccctgctgagcgaggagagagtgagactgagaggccagctgtggaccaaggagtggtacatcggctactaccagggcagagtgggcctggtgcacaccaagaacgtgctggtggtgggcagagccagacccagcctgtgcagcggccccgagctgagcaccagcgtgctgctggagcagatcctgagaccctgcaagttcctgacctacatctacgccagcgtgagaaccctgctgatggagaacatcagcagctggagaagcttcgccgacgccctgggctacgtgaacctgcccctgaccttcttctgcagagccgagctggacagcgagcccgagagagtggccagcgtgctggagaagctgaaggaggactgcaacaacaccgagaacaaggagagaaagagcttccagaaggagctggtgatggccctgctgaagatggactgccagggcctggtggtgagactgatccaggacttcgtgctgctgaccaccgccgtggaggtggcccagagatggagagagctggccgagaagctggccaaggtgagcaagcagcagatggacgcctacgagagcccccacagagacagaaacggcgtggtggacagcgaggccatgtggaagcccgcctacgacttcctgctgacctggagccaccagatcggcgacagctacagagacgtgatccaggagctgcacctgggcctggacaagatgaagaaccccatcaccaagagatggaagcacctgaccggcaccctgatcctggtgaacagcctggacgtgctgagagccgccgccttcagccccgccgaccaggacgacttcgtgatctag

SEQ ID NO: 98790 - DNA, 2892 bp, synthetic construct; identical to SEQ ID NO: 98789
  misc_feature 1..2892: note = Description of Artificial Sequence: Synthetic coding sequence
  source 1..2892: mol_type = other DNA

SEQ ID NO: 98791 - DNA, 2892 bp, synthetic construct; identical to SEQ ID NO: 98789
  misc_feature 1..2892: note = Description of Artificial Sequence: Synthetic coding sequence
  source 1..2892: mol_type = other DNA

SEQ ID NO: 98792 - DNA, 369 bp, synthetic construct
  misc_feature 1..369: note = Description of Artificial Sequence: Synthetic coding sequence
  source 1..369: mol_type = other DNA
atggccgcccagagaatcagagccgccaacagcaacggcctgcccagatgcaagagcgagggcaccctgatcgacctgagcgagggcttcagcgagaccagcttcaacgacatcaaggtgcccagccccagcgccctgctggtggacaaccccacccccttcggcaacgccaaggaggtgatcgccatcaaggactactgccccaccaacttcaccaccctgaagttcagcaagggcgaccacctgtacgtgctggacaccagcggcggcgagtggtggtacgcccacaacaccaccgagatgggctacatccccagcagctacgtgcagcccctgaactacagaaacagcaccctgagcgacagctag

SEQ ID NO: 98793 - DNA, 1662 bp, synthetic construct
  misc_feature 1..1662: note = Description of Artificial Sequence: Synthetic coding sequence
  source 1..1662: mol_type = other DNA
atggccgcccagagaatcagagccgccaacagcaacggcctgcccagatgcaagagcgagggcaccctgatcgacctgagcgagggcttcagcgagaccagcttcaacgacatcaaggtgcccagccccagcgccctgctggtggacaaccccacccccttcggcaacgccaaggaggtgatcgccatcaaggactactgccccaccaacttcaccaccctgaagttcagcaagggcgaccacctgtacgtgctggacaccagcggcggcgagtggtggtacgcccacaacaccaccgagatgggctacatccccagcagctacgtgcagcccctgaactacagaaacagcaccctgagcgacagcggcatgatcgacaacctgcccgacagccccgacgaggtggccaaggagctggagctgctgggcggctggaccgacgacaagaaggtgcccggcagaatgtacagcaacaaccccttctggaacggcgtgcagaccaaccccttcctgaacggcaacgtgcccgtgatgcccagcctggacgagctgaaccccaagagcaccgtggacctgctgctgttcgacgccggcaccagcagcttcaccgagagcagcagcgccaccaccaacagcaccggcaacatcttcgacgagctgcccgtgaccaacggcctgcacgccgagccccccgtgagaagagacaaccccttcttcagaagcaagagaagctacagcctgagcgagctgagcgtgctgcaggccaagagcgacgcccccaccagcagcagcttcttcaccggcctgaagagccccgcccccgagcagttccagagcagagaggacttcagaaccgcctggctgaaccacagaaagctggccagaagctgccacgacctggacctgctgggccagagccccggctggggccagacccaggccgtggagaccaacatcgtgtgcaagctggacagcagcggcggcgccgtgcagctgcccgacaccagcatcagcatccacgtgcccgagggccacgtggcccccggcgagacccagcagatcagcatgaaggccctgctggacccccccctggagctgaacagcgacagaagctgcagcatcagccccgtgctggaggtgaagctgagcaacctggaggtgaagaccagcatcatcctggagatgaaggtgagcgccgagatcaagaacgacctgttcagcaagagcaccgtgggcctgcagtgcctgagaagcgacagcaaggagggcccctacgtgagcgtgcccctgaactgcagctgcggcgacaccgtgcaggcccagctgcacaacctggagccctgcatgtacgtggccgtggtggcccacggccccagcatcctgtaccccagcaccgtgtgggacttcatcaacaagaaggtgaccgtgggcctgtacggccccaagcacatccaccccagcttcaagaccgtggtgaccatcttcggccacgactgcgcccccaagaccctgctggtgagcgaggtgaccagacaggcccccaacccccccatcaccaagagatggaagcacctgaccggcaccctgatcctggtgaacagcctggacgtgctgagagccgccgccttcagccccgccgaccaggacgacttcgtgatctag

SEQ ID NO: 98794 - DNA, 171 bp, synthetic construct
  misc_feature 1..171: note = Description of Artificial Sequence: Synthetic coding sequence
  source 1..171: mol_type = other DNA
atggccgcccagagaatcagagccgccaacagcaacggcctgcccagatgcaagagcgagggcaccctgatcgacctgagcgagggcttcagcgagaccagcttcaacgacatcaaggtgcccagccccagcgccctgctggtggacaaccccacccccttcggcaactag

SEQ ID NO: 98795 - DNA, 522 bp, synthetic construct
  misc_feature 1..522: note = Description of Artificial Sequence: Synthetic coding sequence
  source 1..522: mol_type = other DNA
atggccgcccagagaatcagagccgccaacagcaacggcctgcccagatgcaagagcgagggcaccctgatcgacctgagcgagggcttcagcgagaccagcttcaacgacatcaaggtgcccagccccagcgccctgctggtggacaaccccacccccttcggcaacgccaaggaggtgatcgccatcaaggactactgccccaccaacttcaccaccctgaagttcagcaagggcgaccacctgtacgtgctggacaccagcggcggcgagtggtggtacgcccacaacaccaccgagatgggctacatccccagcagctacgtgcagcccctgaactacagaaacagcaccctgagcgacagcggcatgatcgacaacctgcccgacagccccgacgaggtggccaaggagctggagctgctgggcggctggaccgacgacaagaaggtgcccggcagaatgtacagcaacaaccccttctggaacggcgtgcagaccaaccccttcctgaacggctag

SEQ ID NO: 98796 - DNA, 174 bp, synthetic construct
  misc_feature 1..174: note = Description of Artificial Sequence: Synthetic coding sequence
  source 1..174: mol_type = other DNA
atggccgcccagagaatcagagccgccaacagcaacggcctgcccagatgcaagagcgagggcaccctgatcgacctgagcgagggcttcagcgagaccagcttcaacgacatcaaggtgcccagccccagcgccctgctggtggacaaccccacccccttcggcaacgcctag

SEQ ID NO: 98797 - DNA, 606 bp, synthetic construct
  misc_feature 1..606: note = Description of Artificial Sequence: Synthetic coding sequence
  source 1..606: mol_type = other DNA
atggagaacatcagcagctggagaagcttcgccgacgccctgggctacgtgaacctgcccctgaccttcttctgcagagccgagctggacagcgagcccgagagagtggccagcgtgctggagaagctgaaggaggactgcaacaacaccgagaacaaggagagaaagagcttccagaaggagctggtgatggccctgctgaagatggactgccagggcctggtggtgagactgatccaggacttcgtgctgctgaccaccgccgtggaggtggcccagagatggagagagctggccgagaagctggccaaggtgagcaagcagcagatggacgcctacgagagcccccacagagacagaaacggcgtggtggacagcgaggccatgtggaagcccgcctacgacttcctgctgacctggagccaccagatcggcgacagctacagagacgtgatccaggagctgcacctgggcctggacaagatgaagaaccccatcaccaagagatggaagcacctgaccggcaccctgatcctggtgaacagcctggacgtgctgagagccgccgccttcagccccgccgaccaggacgacttcgtgatctag

SEQ ID NO: 98798 - DNA, 897 bp, synthetic construct
  misc_feature 1..897: note = Description of Artificial Sequence: Synthetic coding sequence
  source 1..897: mol_type = other DNA
atgctgaaccacgccacccagagagtgatggaggccgagcagaccaagaccagaagcgagctggtgcacaaggagaccgccgccagatacaacgccgccatgggcagaatgagacagctggagaagaagctgaagagagccatcaacaagagcaagccctacttcgagctgaaggccaagtactacgtgcagctggagcagctgaagaagaccgtggacgacctgcaggccaagctgaccctggccaagggcgagtacaagatggccctgaagaacctggagatgatcagcgacgagatccacgagagaagaagaagcagcgccatgggccccagaggctgcggcgtgggcgccgagggcagcagcaccagcgtggaggacctgcccggcagcaagcccgagcccgacgccatcagcgtggccagcgaggccttcgaggacgacagctgcagcaacttcgtgagcgaggacgacagcgagacccagagcgtgagcagcttcagcagcggccccaccagccccagcgagatgcccgaccagttccccgccgtggtgagacccggcagcctggacctgcccagccccgtgagcctgagcgagttcggcatgatgttccccgtgctgggccccagaagcgagtgcagcggcgccagcagccccgagtgcgaggtggagagaggcgacagagccgagggcgccgagaacaagaccagcgacaaggccaacaacaacagaggcctgagcagcagcagcggcagcggcggcagcagcaagagccagagcagcaccagccccgagggccaggccctggagaacagaatgaagcagctgagcctgcagtgcagcaagggcagagacggcatcatcgccgacatcaagatggtgcagatcggctag

SEQ ID NO: 98799 - DNA, 387 bp, synthetic construct
  misc_feature 1..387: note = Description of Artificial Sequence: Synthetic coding sequence
  source 1..387: mol_type = other DNA
atgctgaaccacgccacccagagagtgatggaggccgagcagaccaagaccagaagcgagctggtgcacaaggagaccgccgccagatacaacgccgccatgggcagaatgagacagctggagaagaagctgaagagagccatcaacaagagcaagccctacttcgagctgaaggccaagtactacgtgcagctggagcagctgaagaagaccgtggacgacctgcaggccaagctgaccctggccaagggcgagtacaagatggccctgaagaacctggagatgatcagcgacgagatccacgagagaagaagaagcagcgccatgggccccagaggctgcggcgtgggcgccgagggcagcagcaccagcgtggaggacctgtag

SEQ ID NO: 98800 - DNA, 1368 bp, synthetic construct
  misc_feature 1..1368: note = Description of Artificial Sequence: Synthetic coding sequence
  source 1..1368: mol_type = other DNA
atggacgccgccctgaagagaagcagaagcgaggagcccgccgagatcctgccccccgccagagacgaggaggaggaggaggaggagggcatggagcagggcctggaggaggaggaggaggtggaccccagaatccagggcgagctggagaagctgaaccagagcaccgacgacatcaacagaagagagaccgagctggaggacgccagacagaagttcagaagcgtgctggtggaggccaccgtgaagctggacgagctggtgaagaagatcggcaaggccgtggaggacagcaagccctactgggaggccagaagagtggccagacaggcccagctggaggcccagaaggccacccaggacttccagagagccaccgaggtgctgagagccgccaaggagaccatcagcctggccgagcagagactgctggaggacgacaagagacagttcgacagcgcctggcaggagatgctgaaccacgccacccagagagtgatggaggccgagcagaccaagaccagaagcgagctggtgcacaaggagaccgccgccagatacaacgccgccatgggcagaatgagacagctggagaagaagctgaagagagccatcaacaagagcaagccctacttcgagctgaaggccaagtactacgtgcagctggagcagctgaagaagaccgtggacgacctgcaggccaagctgaccctggccaagggcgagtacaagatggccctgaagaacctggagatgatcagcgacgagatccacgagagaagaagaagcagcgccatgggccccagaggctgcggcgtgggcgccgagggcagcagcaccagcgtggaggacctgcccggcagcaagcccgagcccgacgccatcagcgtggccagcgaggccttcgaggacgacagctgcagcaacttcgtgagcgaggacgacagcgagacccagagcgtgagcagcttcagcagcggccccaccagccccagcgagatgcccgaccagttccccgccgtggtgagacccggcagcctggacctgcccagccccgtgagcctgagcgagttcggcatgatgttccccgtgctgggccccagaagcgagtgcagcggcgccagcagccccgagtgcgaggtggagagaggcgacagagccgagggcgccgagaacaagaccagcgacaaggccaacaacaacagaggcctgagcagcagcagcggcagcggcggcagcagcaagagccagagcagcaccagccccgagggccaggccctggagaacagaatgaagcagctgagcctgcagtgcagcaagggcagagacggcatcatcgccgacatcaagatggtgcagatcggctag

SEQ ID NO: 98801 - DNA, 897 bp, synthetic construct; identical to SEQ ID NO: 98798
  misc_feature 1..897: note = Description of Artificial Sequence: Synthetic coding sequence
  source 1..897: mol_type = other DNA

SEQ ID NO: 98802 - DNA, 156 bp, synthetic construct
  misc_feature 1..156: note = Description of Artificial Sequence: Synthetic coding sequence
  source 1..156: mol_type = other DNA
atgctgaaccacgccacccagagagtgatggaggccgagcagaccaagaccagaagcgagctggtgcacaaggagaccgccgccagatacaacgccgccatgggcagaatgagacagctggagaagaagctgaagagagccatcaacaagagctag

SEQ ID NO: 98803 - DNA, 897 bp, synthetic construct; identical to SEQ ID NO: 98798
  misc_feature 1..897: note = Description of Artificial Sequence: Synthetic coding sequence
  source 1..897: mol_type = other DNA

SEQ ID NO: 98804 - DNA, 2580 bp, synthetic construct
  misc_feature 1..2580: note = Description of Artificial Sequence: Synthetic coding sequence
  source 1..2580: mol_type = other DNA
atgatggagggcctgaagaagagaaccagaaaggccttcggcatcagaaagaaggagaaggacaccgacagcaccggcagccccgacagagacggcatccagggcaagaagaagacccagaagacccagctgctgctgaccagctgcttctggctgagagccctgagcctgaccctgagccagaagaagagcaacggcgcccccaacggcttctacgccgagatcgactgggagagatacaacagccccgagctggacgaggagggctacagcatcagacccgaggagcccggcagcaccaagggcaagcacttctacagcagcagcgagagcgaggaggaggaggagagccacaagaagttcaacatcaagatcaagcccctgcagagcaaggacatcctgaagaacgccgccaccgtggacgagctgaaggccagcatcggcaacatcgccctgagccccagccccgtgagaaagagccccagaagaagccccggcgccatcaagagaaacctgagcagcgaggaggtggccagacccagaagaagcacccccacccccgagctgatcagcaagaagccccccgacgacaccaccgccctggcccccctgttcggcccccccctggagagcgccttcgacgagcagaagaccgaggtgctgctggaccagcccgagatctggggcagcggccagcccatcaaccccagcatggagagccccaagctgaccagacccttccccaccggcacccccccccccctgccccccaagaacgtgcccgccaccccccccagaaccggcagccccctgaccatcggccccggcaacgaccagagcgccaccgaggtgaagatcgagaagctgcccagcatcaacgacctggacagcatcttcggccccgtgctgagccccaagagcgtggccgtgaacgccgaggagaagtgggtgcacttcagcgacaccagccccgagcacgtgacccccgagctgacccccagagagaaggtggtgagcccccccgccacccccgacaaccccgccgacagccccgcccccggccccctgggcccccccggccccaccggcccccccggcccccccggcccccccagaaacgtgctgagccccctgaacctggaggaggtgcagaagaaggtggccgagcagaccttcatcaaggacgactacctggagaccatcagcagccccaaggacttcggcctgggccagagagccacccccccccccccccccccccccacctacagaaccgtggtgagcagccccggccccggcagcggccccggccccggcaccaccagcgacggcaagaccgaggcccagagataccaggtgatctgccccagcctgcaggccggcggcaacgagctggacagctacagcggcgccagcagccccgccagacccgccacccccctggtgccctgcagaagcaccaccccccccccccccccccccagaccccccagcagacccaagctgccccccggcaagcccggcgtgggcgacgtgagcagacccttcagcccccccatccacagcagcagccccccccccatcgcccccctggccagagccgagagcaccagcagcatcagcagcaccaacagcctgagcgccgccaccacccccaccgtggagaacgagcagcccagcctggtgtggttcgacagaggcaagttctacctgaccttcgagggcagcagcagaggccccagccccctgaccatgggcgcccaggacaccctgcccgtggccgccgccttcaccgagaccgtgaacgcctacttcaagggcgccgaccccagcaagtgcatcgtgaagatcaccggcgagatggtgctgagcttccccgccggcatcaccagacacttcgccaacaaccccagccccgccgccctgaccttcagagtgatcaacttcagcagactggagcacgtgctgcccaacccccagctgctgtgctgcgacaacacccagaacgacgccaacaccaaggagttctgggtgaacatgcccaacctgatgacccacctgaagaaggtgagcgagcagaagccccaggccacctactacaacgtggacatgctgaagtaccaggtgagcgcccagggcatccagagcacccccctgaacctggccgtgaactggagatgcgagcccagcagcaccgacctgagaatcgactacaagtacaacaccgacgccatgaccaccgccgtggccctgaacaacgtgcagttcctggtgcccatcgacggcggcgtgaccaagctgcaggccgtgctgccccccgccgtgtggaacgccgagcagcagagaatcctgtggaagatccccgacatcagccagaagagcgagaacggcggcgtgggcagcctgctggccagattccagctgagcgagggccccagcaagcccagccccctggtggtgcagttcaccagcgagggcagcaccctgagcggctgcgacatcgagctggtgggcgccggctacagattcagcctgatcaagaagagattcgccgccggcaagtacctggccgacaactag

SEQ ID NO: 98805 - DNA, 1857 bp, synthetic construct
  misc_feature 1..1857: note = Description of Artificial Sequence: Synthetic coding sequence
  source 1..1857: mol_type = other DNA
atgatggagggcctgaagaagagaaccagaaaggccttcggcatcagaaagaaggagaaggacaccgacagcaccggcagccccgacagagacggcatcaacagccccgagctggacgaggagggctacagcatcagacccgaggagcccggcagcaccaagggcaagcacttctacagcagcagcgagagcgaggaggaggaggagagccacaagaagttcaacatcaagatcaagcccctgcagagcaaggacatcctgaagaacgccgccaccgtggacgagctgaaggccagcatcggcaacatcgccctgagccccagccccgtgagaaagagccccagaagaagccccggcgccatcaagagaaacctgagcagcgaggaggtggccagacccagaagaagcacccccacccccgagctgatcagcaagaagccccccgacgacaccaccgccctggcccccctgttcggcccccccctggagagcgccttcgacgagcagaagaccgaggtgctgctggaccagcccgagatctggggcagcggccagcccatcaaccccagcatggagagccccaagctgaccagacccttccccaccggcacccccccccccctgccccccaagaacgtgcccgccaccccccccagaaccggcagccccctgaccatcggccccggcgccagcagccccgccagacccgccacccccctggtgccctgcagaagcaccaccccccccccccccccccccagaccccccagcagacccaagctgccccccggcaagcccggcgtgggcgacgtgagcagacccttcagcccccccatccacagcagcagccccccccccatcgcccccctggccagagccgagagcaccagcagcatcagcagcaccaacagcctgagcgccgccaccacccccaccgtggagaacgagcagcccagcctggtgtggttcgacagaggcaagttctacctgaccttcgagggcagcagcagaggccccagccccctgaccatgggcgcccaggacaccctgcccgtggccgccgccttcaccgagaccgtgaacgcctacttcaagggcgccgaccccagcaagtgcatcgtgaagatcaccggcgagatggtgctgagcttccccgccggcatcaccagacacttcgccaacaaccccagccccgccgccctgaccttcagagtgatcaacttcagcagactggagcacgtgctgcccaacccccagctgctgtgctgcgacaacacccagaacgacgccaacaccaaggagttctgggtgaacatgcccaacctgatgacccacctgaagaaggtgagcgagcagaagccccaggccacctactacaacgtggacatgctgaagtaccaggtgagcgcccagggcatccagagcacccccctgaacctggccgtgaactggagatgcgagcccagcagcaccgacctgagaatcgactacaagtacaacaccgacgccatgaccaccgccgtggccctgaacaacgtgcagttcctggtgcccatcgacggcggcgtgaccaagctgcaggccgtgctgccccccgccgtgtggaacgccgagcagcagagaatcctgtggaagatccccgacatcagccagaagagcgagaacggcggcgtgggcagcctgctggccagattccagctgagcgagggccccagcaagcccagccccctggtggtgcagttcaccagcgagggcagcaccctgagcggctgcgacatcgagctggtgggcgccggctacagattcagcctgatcaagaagagattcgccgccggcaagtacctggccgacaactag

SEQ ID NO: 98806 - DNA, 1893 bp, synthetic construct
  misc_feature 1..1893: note = Description of Artificial Sequence: Synthetic coding sequence
  source 1..1893: mol_type = other DNA
atggagggcctgaagaagagaaccagaaaggccttcggcatcagaaagaaggagaaggacaccgacagcaccggcagccccgacagagacggcatcaagaagagcaacggcgcccccaacggcttctacgccgagatcgactgggagagatacaacagccccgagctggacgaggagggctacagcatcagacccgaggagcccggcagcaccaagggcaagcacttctacagcagcagcgagagcgaggaggaggaggagagccacaagaagttcaacatcaagatcaagcccctgcagagcaaggacatcctgaagaacgccgccaccgtggacgagctgaaggccagcatcggcaacatcgccctgagccccagccccgtgggcgccatcaagagaaacctgagcagcgaggaggtggccagacccagaagaagcacccccacccccgagctgatcagcaagaagccccccgacgacaccaccgccctggcccccctgttcggcccccccctggagagcgccttcgacgagcagaagaccgaggtgctgctggaccagcccgagatctggggcagcggccagcccatcaaccccagcatggagagccccaagctgaccagacccttccccaccggcacccccccccccctgccccccaagaacgtgcccgccaccccccccagaaccggcagccccctgaccatcggccccggcgccagcagccccgccagacccgccacccccctggtgccctgcagaagcaccaccccccccccccccccccccagaccccccagcagacccaagctgccccccggcaagcccggcgtgggcgacgtgagcagacccttcagcccccccatccacagcagcagccccccccccatcgcccccctggccagagccgagagcaccagcagcatcagcagcaccaacagcctgagcgccgccaccacccccaccgtggtgagcgaggacgacgtgttctacgacaagctgcccagcttcgagagaagatgcgagacccccgccggcagcagcagaggccccagccccctgaccatgggcgcccaggacaccctgcccgtggccgccgccttcaccgagaccgtgaacgcctacttcaagggcgccgaccccagcaagtgcatcgtgaagatcaccggcgagatggtgctgagcttccccgccggcatcaccagacacttcgccaacaaccccagccccgccgccctgaccttcagagtgatcaacttcagcagactggagcacgtgctgcccaacccccagctgctgtgctgcgacaacacccagaacgacgccaacaccaaggagttctgggtgaacatgcccaacctgatgacccacctgaagaaggtgagcgagcagaagccccaggccacctactacaacgtggacatgctgaagtaccaggtgagcgcccagggcatccagagcacccccctgaacctggccgtgaactggagatgcgagcccagcagcaccgacctgagaatcgactacaagtacaacaccgacgccatgaccaccgccgtggccctgaacaacgtgcagttcctggtgcccatcgacggcggcgtgaccaagctgcaggccgtgctgccccccgccgtgtggaacgccgagcagcagagaatcctgtggaagatccccgacatcagccagaagagcgagaacggcggcgtgggcagcctgctggccagattccagctgagcgagggccccagcaagcccagccccctggtggtgcagttcaccagcgagggcagcaccctgagcggctgcgacatcgagctggtgggcgccggctacagattcagcctgatcaagaagagattcgccgccggcaagtacctggccgacaactag

SEQ ID NO: 98807 - DNA, 2487 bp, synthetic construct
  misc_feature 1..2487: note = Description of Artificial Sequence: Synthetic coding sequence
  source 1..2487: mol_type = other DNA
atgatggagggcctgaagaagagaaccagaaaggccttcggcatcagaaagaaggagaaggacaccgacagcaccggcagccccgacagagacggcatccagcccagcccccacgagcccccctacaacagcaaggccgagtgcgccagagagggcggcaagaaggtgagcaagaagagcaacggcgcccccaacggcttctacgccgagatcgactgggagagatacaacagccccgagctggacgaggagggctacagcatcagacccgaggagcccggcagcaccaagggcaagcacttctacagcagcagcgagagcgaggaggaggaggagagccacaagaagttcaacatcaagatcaagcccctgcagagcaaggacatcctgaagaacgccgccaccgtggacgagctgaaggccagcatcggcaacatcgccctgagccccagccccgtgagaaagagccccagaagaagccccggcgccatcaagagaaacctgagcagcgaggaggtggccagacccagaagaagcacccccacccccgagctgatcagcaagaagccccccgacgacaccaccgccctggcccccctgttcggcccccccctggagagcgccttcgacgagcagaagaccgaggtgctgctggaccagcccgagatctggggcagcggccagcccatcaaccccagcatggagagccccaagctgaccagacccttccccaccggcacccccccccccctgccccccaagaacgtgcccgccaccccccccagaaccggcagccccctgaccatcggccccggcaacgaccagagcgccaccgaggtgaagatcgagaagctgcccagcatcaacgacctggacagcatcttcggccccgtgctgagccccaagagcgtggccgtgaacgccgaggagaagtgggtgcacttcagcgacaccagccccgagcacgtgacccccgagctgacccccagagagaaggtggtgagcccccccgccacccccgacaaccccgccgacagccccgcccccggccccctgggcccccccggccccaccggcccccccggcccccccggcccccccagaaacgtgctgagccccctgaacctggaggaggtgcagaagaaggtggccgagcagaccttcatcaaggacgactacctggagaccatcagcagccccaaggacttcggcctgggccagagagccacccccccccccccccccccccccacctacagaaccgtggtgagcagccccggccccggcagcggccccggccccggcaccaccagcggcgccagcagccccgccagacccgccacccccctggtgccctgcagaagcaccaccccccccccccccccccccagaccccccagcagacccaagctgccccccggcaagcccggcgtgggcgacgtgagcagacccttcagcccccccatccacagcagcagccccccccccatcgcccccctggccagagccgagagcaccagcagcatcagcagcaccaacagcctgagcgccgccaccacccccaccgtggagaacgagcagcccagcctggtgtggttcgacagaggcaagttctacctgaccttcgagggcagcagcagaggccccagccccctgaccatgggcgcccaggacaccctgcccgtggccgccgccttcaccgagaccgtgaacgcctacttcaagggcgccgaccccagcaagtgcatcgtgaagatcaccggcgagatggtgctgagcttccccgccggcatcaccagacacttcgccaacaaccccagccccgccgccctgaccttcagagtgatcaacttcagcagactggagcacgtgctgcccaacccccagctgctgtgctgcgacaacacccagaacgacgccaacaccaaggagttctgggtgaacatgcccaacctgatgacccacctgaagaaggtgagcgagcagaagccccaggccacctactacaacgtggacatgctgaagtaccaggtgagcgcccagggcatccagagcacccccctgaacctggccgtgaactggagatgcgagcccagcagcaccgacctgagaatcgactacaagtacaacaccgacgccatgaccaccgccgtggccctgaacaacgtgcagttcctggtgcccatcgacggcggcgtgaccaagctgcaggccgtgctgccccccgccgtgtggaacgccgagcagcagagaatcctgtggaagatccccgacatcagccagaagagcgagaacggcggcgtgggcagcctgctggccagattccagctgagcgagggccccagcaagcccagccccctggtggtgcagttcaccagcgagggcagcaccctgagcggctgcgacatcgagctggtgggcgccggctacagattcagcctgatcaagaagagattcgccgccggcaagtacctggccgacaactag

SEQ ID NO: 98808 - DNA, 2577 bp, synthetic construct
  misc_feature 1..2577: note = Description of Artificial Sequence: Synthetic coding sequence
  source 1..2577: mol_type = other DNA
atggagggcctgaagaagagaaccagaaaggccttcggcatcagaaagaaggagaaggacaccgacagcaccggcagccccgacagagacggcatccagggcaagaagaagacccagaagacccagctgctgctgaccagctgcttctggctgagagccctgagcctgaccctgagccagaagaagagcaacggcgcccccaacggcttctacgccgagatcgactgggagagatacaacagccccgagctggacgaggagggctacagcatcagacccgaggagcccggcagcaccaagggcaagcacttctacagcagcagcgagagcgaggaggaggaggagagccacaagaagttcaacatcaagatcaagcccctgcagagcaaggacatcctgaagaacgccgccaccgtggacgagctgaaggccagcatcggcaacatcgccctgagccccagccccgtgagaaagaaggagagaagagagaagggcgccatcaagagaaacctgagcagcgaggaggtggccagacccagaagaagcacccccacccccgagctgatcagcaagaagccccccgacgacaccaccgccctggcccccctgttcggcccccccctggagagcgccttcgacgagcagaagaccgaggtgctgctggaccagcccgagatctggggcagcggccagcccatcaaccccagcatggagagccccaagctgaccagacccttccccaccggcacccccccccccctgccccccaagaacgtgcccgccaccccccccagaaccggcagccccctgaccatcggccccggcaacgaccagagcgccaccgaggtgaagatcgagaagctgcccagcatcaacgacctggacagcatcttcggccccgtgctgagccccaagagcgtggccgtgaacgccgaggagaagtgggtgcacttcagcgacaccagccccgagcacgtgacccccgagctgacccccagagagaaggtggtgagcccccccgccacccccgacaaccccgccgacagccccgcccccggccccctgggcccccccggccccaccggcccccccggcccccccggcccccccagaaacgtgctgagccccctgaacctggaggaggtgcagaagaaggtggccgagcagaccttcatcaaggacgactacctggagaccatcagcagccccaaggacttcggcctgggccagagagccacccccccccccccccccccccccacctacagaaccgtggtgagcagccccggccccggcagcggccccggccccggcaccaccagcgacggcaagaccgaggcccagagataccaggtgatctgccccagcctgcaggccggcggcaacgagctggacagctacagcggcgccagcagccccgccagacccgccacccccctggtgccctgcagaagcaccaccccccccccccccccccccagaccccccagcagacccaagctgccccccggcaagcccggcgtgggcgacgtgagcagacccttcagcccccccatccacagcagcagccccccccccatcgcccccctggccagagccgagagcaccagcagcatcagcagcaccaacagcctgagcgccgccaccacccccaccgtggagaacgagcagcccagcctggtgtggttcgacagaggcaagttctacctgaccttcgagggcagcagcagaggccccagccccctgaccatgggcgcccaggacaccctgcccgtggccgccgccttcaccgagaccgtgaacgcctacttcaagggcgccgaccccagcaagtgcatcgtgaagatcaccggcgagatggtgctgagcttccccgccggcatcaccagacacttcgccaacaaccccagccccgccgccctgaccttcagagtgatcaacttcagcagactggagcacgtgctgcccaacccccagctgctgtgctgcgacaacacccagaacgacgccaacaccaaggagttctgggtgaacatgcccaacctgatgacccacctgaagaaggtgagcgagcagaagccccaggccacctactacaacgtggacatgctgaagtaccaggtgagcgcccagggcatccagagcacccccctgaacctggccgtgaactggagatgcgagcccagcagcaccgacctgagaatcgactacaagtacaacaccgacgccatgaccaccgccgtggccctgaacaacgtgcagttcctggtgcccatcgacggcggcgtgaccaagctgcaggccgtgctgccccccgccgtgtggaacgccgagcagcagagaatcctgtggaagatccccgacatcagccagaagagcgagaacggcggcgtgggcagcctgctggccagattccagctgagcgagggccccagcaagcccagccccctggtggtgcagttcaccagcgagggcagcaccctgagcggctgcgacatcgagctggtgggcgccggctacagattcagcctgatcaagaagagattcgccgccggcaagtacctggccgacaactag

SEQ ID NO: 98809 - DNA, 1896 bp, synthetic construct
  misc_feature 1..1896: note = Description of Artificial Sequence: Synthetic coding sequence
  source 1..1896: mol_type = other DNA
atgatggagggcctgaagaagagaaccagaaaggccttcggcatcagaaagaaggagaaggacaccgacagcaccggcagccccgacagagacggcatcaagaagagcaacggcgcccccaacggcttctacgccgagatcgactgggagagatacaacagccccgagctggacgaggagggctacagcatcagacccgaggagcccggcagcaccaagggcaagcacttctacagcagcagcgagagcgaggaggaggaggagagccacaagaagttcaacatcaagatcaagcccctgcagagcaaggacatcctgaagaacgccgccaccgtggacgagctgaaggccagcatcggcaacatcgccctgagccccagccccgtgggcgccatcaagagaaacctgagcagcgaggaggtggccagacccagaagaagcacccccacccccgagctgatcagcaagaagccccccgacgacaccaccgccctggcccccctgttcggcccccccctggagagcgccttcgacgagcagaagaccgaggtgctgctggaccagcccgagatctggggcagcggccagcccatcaaccccagcatggagagccccaagctgaccagacccttccccaccggcacccccccccccctgccccccaagaacgtgcccgccaccccccccagaaccggcagccccctgaccatcggccccggcgccagcagccccgccagacccgccacccccctggtgccctgcagaagcaccaccccccccccccccccccccagaccccccagcagacccaagctgccccccggcaagcccggcgtgggcgacgtgagcagacccttcagcccccccatccacagcagcagccccccccccatcgcccccctggccagagccgagagcaccagcagcatcagcagcaccaacagcctgagcgccgccaccacccccaccgtggtgagcgaggacgacgtgttctacgacaagctgcccagcttcgagagaagatgcgagacccccgccggcagcagcagaggccccagccccctgaccatgggcgcccaggacaccctgcccgtggccgccgccttcaccgagaccgtgaacgcctacttcaagggcgccgaccccagcaagtgcatcgtgaagatcaccggcgagatggtgctgagcttccccgccggcatcaccagacacttcgccaacaaccccagccccgccgccctgaccttcagagtgatcaacttcagcagactggagcacgtgctgcccaacccccagctgctgtgctgcgacaacacccagaacgacgccaacaccaaggagttctgggtgaacatgcccaacctgatgacccacctgaagaaggtgagcgagcagaagccccaggccacctactacaacgtggacatgctgaagtaccaggtgagcgcccagggcatccagagcacccccctgaacctggccgtgaactggagatgcgagcccagcagcaccgacctgagaatcgactacaagtacaacaccgacgccatgaccaccgccgtggccctgaacaacgtgcagttcctggtgcccatcgacggcggcgtgaccaagctgcaggccgtgctgccccccgccgtgtggaacgccgagcagcagagaatcctgtggaagatccccgacatcagccagaagagcgagaacggcggcgtgggcagcctgctggccagattccagctgagcgagggccccagcaagcccagccccctggtggtgcagttcaccagcgagggcagcaccctgagcggctgcgacatcgagctggtgggcgccggctacagattcagcctgatcaagaagagattcgccgccggcaagtacctggccgacaactag

SEQ ID NO: 98810 - DNA, 2496 bp, synthetic construct
  misc_feature 1..2496: note = Description of Artificial Sequence: Synthetic coding sequence
  source 1..2496: mol_type = other DNA
atggagggcctgaagaagagaaccagaaaggccttcggcatcagaaagaaggagaaggacaccgacagcaccggcagccccgacagagacggcatccagggcaagaagaagacccagaagacccagctgctgctgaccagctgcttctggctgagagccctgagcctgaccctgagccagaagaagagcaacggcgcccccaacggcttctacgccgagatcgactgggagagatacaacagccccgagctggacgaggagggctacagcatcagacccgaggagcccggcagcaccaagggcaagcacttctacagcagcagcgagagcgaggaggaggaggagagccacaagaagttcaacatcaagatcaagcccctgcagagcaaggacatcctgaagaacgccgccaccgtggacgagctgaaggccagcatcggcaacatcgccctgagccccagccccgtgagaaagaaggagagaagagagaagggcgccatcaagagaaacctgagcagcgaggaggtggccagacccagaagaagcacccccacccccgagctgatcagcaagaagccccccgacgacaccaccgccctggcccccctgttcggcccccccctggagagcgccttcgacgagcagaagaccgaggtgctgctggaccagcccgagatctggggcagcggccagcccatcaaccccagcatggagagccccaagctgaccagacccttccccaccggcacccccccccccctgccccccaagaacgtgcccgccaccccccccagaaccggcagccccctgaccatcggccccggcaacgaccagagcgccaccgaggtgaagatcgagaagctgcccagcatcaacgacctggacagcatcttcggccccgtgctgagccccaagagcgtggccgtgaacgccgaggagaagtgggtgcacttcagcgacaccagccccgagcacgtgacccccgagctgacccccagagagaaggtggtgagcccccccgccacccccgacaaccccgccgacagccccgcccccggccccctgggcccccccggccccaccggcccccccggcccccccggcccccccagaaacgtgctgagccccctgaacctggaggaggtgcagaagaaggtggccgagcagaccttcatcaaggacgactacctggagaccatcagcagccccaaggacttcggcctgggccagagagccacccccccccccccccccccccccacctacagaaccgtggtgagcagccccggccccggcagcggccccggccccggcaccaccagcggcgccagcagccccgccagacccgccacccccctggtgccctgcagaagcaccaccccccccccccccccccccagaccccccagcagacccaagctgccccccggcaagcccggcgtgggcgacgtgagcagacccttcagcccccccatccacagcagcagccccccccccatcgcccccctggccagagccgagagcaccagcagcatcagcagcaccaacagcctgagcgccgccaccacccccaccgtggagaacgagcagcccagcctggtgtggttcgacagaggcaagttctacctgaccttcgagggcagcagcagaggccccagccccctgaccatgggcgcccaggacaccctgcccgtggccgccgccttcaccgagaccgtgaacgcctacttcaagggcgccgaccccagcaagtgcatcgtgaagatcaccggcgagatggtgctgagcttccccgccggcatcaccagacacttcgccaacaaccccagccccgccgccctgaccttcagagtgatcaacttcagcagactggagcacgtgctgcccaacccccagctgctgtgctgcgacaacacccagaacgacgccaacaccaaggagttctgggtgaacatgcccaacctgatgacccacctgaagaaggtgagcgagcagaagccccaggccacctactacaacgtggacatgctgaagtaccaggtgagcgcccagggcatccagagcacccccctgaacctggccgtgaactggagatgcgagcccagcagcaccgacctgagaatcgactacaagtacaacaccgacgccatgaccaccgccgtggccctgaacaacgtgcagttcctggtgcccatcgacggcggcgtgaccaagctgcaggccgtgctgccccccgccgtgtggaacgccgagcagcagagaatcctgtggaagatccccgacatcagccagaagagcgagaacggcggcgtgggcagcctgctggccagattccagctgagcgagggccccagcaagcccagccccctggtggtgcagttcaccagcgagggcagcaccctgagcggctgcgacatcgagctggtgggcgccggctacagattcagcctgatcaagaagagattcgccgccggcaagtacctggccgacaactag

SEQ ID NO: 98811 - DNA, 783 bp, synthetic construct
  misc_feature 1..783: note = Description of Artificial Sequence: Synthetic coding sequence
  source 1..783: mol_type = other DNA
atgatggagggcctgaagaagagaaccagaaaggccttcggcatcagaaagaaggagaaggacaccgacagcaccggcagccccgacagagacggcatccagcccagcccccacgagcccccctacaacagcaaggccgagtgcgccagagagggcggcaagaaggtgagcaagaagagcaacggcgcccccaacggcttctacgccgagatcgactgggagagatacaacagccccgagctggacgaggagggctacagcatcagacccgaggagcccggcagcaccaagggcaagcacttctacagcagcagcgagagcgaggaggaggaggagagccacaagaagttcaacatcaagatcaagcccctgcagagcaaggacatcctgaagaacgccgccaccgtggacgagctgaaggccagcatcggcaacatcgccctgagccccagccccgtgggcgccatcaagagaaacctgagcagcgaggaggtggccagacccagaagaagcacccccacccccgagctgatcagcaagaagccccccgacgacaccaccgccctggcccccctgttcggcccccccctggagagcgccttcgacgagcagaagaccgaggtgctgctggaccagcccgagatctggggcagcggccagcccatcaaccccagcatggagagccccaagctgaccagacccttccccaccggcacccccccccccctgccccccaagaacgtgcccgccaccccccccagaaccggcagccccctgacctag

SEQ ID NO: 98812 - DNA, 1002 bp, synthetic construct
  misc_feature 1..1002: note = Description of Artificial Sequence: Synthetic coding sequence
  source 1..1002: mol_type = other DNA
atgacctgcagcgtgacccacatcgtgagcttcagcctgcccttcctgaaccccagccaccccgccagcacccccggccacaccgagaacgagcagcccagcctggtgtggttcgacagaggcaagttctacctgaccttcgagggcagcagcagaggccccagccccctgaccatgggcgcccaggacaccctgcccgtggccgccgccttcaccgagaccgtgaacgcctacttcaagggcgccgaccccagcaagtgcatcgtgaagatcaccggcgagatggtgctgagcttccccgccggcatcaccagacacttcgccaacaaccccagccccgccgccctgaccttcagagtgatcaacttcagcagactggagcacgtgctgcccaacccccagctgctgtgctgcgacaacacccagaacgacgccaacaccaaggagttctgggtgaacatgcccaacctgatgacccacctgaagaaggtgagcgagcagaagccccaggccacctactacaacgtggacatgctgaagtaccaggtgagcgcccagggcatccagagcacccccctgaacctggccgtgaactggagatgcgagcccagcagcaccgacctgagaatcgactacaagtacaacaccgacgccatgaccaccgccgtggccctgaacaacgtgcagttcctggtgcccatcgacggcggcgtgaccaagctgcaggccgtgctgccccccgccgtgtggaacgccgagcagcagagaatcctgtggaagatccccgacatcagccagaagagcgagaacggcggcgtgggcagcctgctggccagattccagctgagcgagggccccagcaagcccagccccctggtggtgcagttcaccagcgagggcagcaccctgagcggctgcgacatcgagctggtgggcgccggctacagattcagcctgatcaagaagagattcgccgccggcaagtacctggccgacaactag

SEQ ID NO: 98813 - DNA, 1107 bp, synthetic construct
  misc_feature 1..1107: note = Description of Artificial Sequence: Synthetic coding sequence
  source 1..1107: mol_type = other DNA
atgagcgtggccggcctgaagaagcagttctacaaggccagccagctggtgagcgagaaggtgggcggcgccgagggcaccaagctggacgacgacttcaaggagatggagaagaaggtggacgtgaccagcaaggccgtgaccgaggtgctggccagaaccatcgagtacctgcagcccaaccccgccagcagagccaagctgaccatgctgaacaccgtgagcaagatcagaggccaggtgaagaaccccggctacccccagagcgagggcctgctgggcgagtgcatgatcagacacggcaaggagctgggcggcgagagcaacttcggcgacgccctgctggacgccggcgagagcatgaagagactggccgaggtgaaggacagcctggacatcgaggtgaagcagaacttcatcgaccccctgcagaacctgtgcgagaaggacctgaaggagatccagcaccacctgaagaagctggagggcagaagactggacttcgactacaagaagaagagacagggcaagatccccgacgaggagctgagacaggccctggagaagttcgaggagagcaaggaggtggccgagaccagcatgcacaacctgctggagaccgacatcgagcaggtgagccagctgagcgccctggtggacgcccagctggactaccacagacaggccgtgcagatcctggacgagctggccgagaagctgaagagaagaatgagagaggccagcagcagacccaagagagagtacaagcccaagcccagagagcccttcgacctgggcgagcccgagcagagcaacggcggcttcccctgcaccaccgcccccaagatcgccgccagcagcagcttcagaagcagcgacaagcccatcagaacccccagcagaagcatgccccccctggaccagcccagctgcaaggccctgtacgacttcgagcccgagaacgacggcgagctgggcttccacgagggcgacgtgatcaccctgaccaaccagatcgacgagaactggtacgagggcatgctggacggccagagcggcttcttccccctgagctacgtggaggtgctggtgcccctgccccagtag

SEQ ID NO: 98814 - DNA, 963 bp, synthetic construct
  misc_feature 1..963: note = Description of Artificial Sequence: Synthetic coding sequence
  source 1..963: mol_type = other DNA
atgagcgtggccggcctgaagaagcagttctacaaggccagccagctggtgagcgagaaggtgggcggcgccgagggcaccaagctggacgacgacttcaaggagatggagaagaaggtggacgtgaccagcaaggccgtgaccgaggtgctggccagaaccatcgagtacctgcagcccaaccccggcgacgccctgctggacgccggcgagagcatgaagagactggccgaggtgaaggacagcctggacatcgaggtgaagcagaacttcatcgaccccctgcagaacctgtgcgagaaggacctgaaggagatccagcaccacctgaagaagctggagggcagaagactggacttcgactacaagaagaagagacagggcaagatccccgacgaggagctgagacaggccctggagaagttcgaggagagcaaggaggtggccgagaccagcatgcacaacctgctggagaccgacatcgagcaggtgagccagctgagcgccctggtggacgcccagctggactaccacagacaggccgtgcagatcctggacgagctggccgagaagctgaagagaagaatgagagaggccagcagcagacccaagagagagtacaagcccaagcccagagagcccttcgacctgggcgagcccgagcagagcaacggcggcttcccctgcaccaccgcccccaagatcgccgccagcagcagcttcagaagcagcgacaagcccatcagaacccccagcagaagcatgccccccctggaccagcccagctgcaaggccctgtacgacttcgagcccgagaacgacggcgagctgggcttccacgagggcgacgtgatcaccctgaccaaccagatcgacgagaactggtacgagggcatgctggacggccagagcggcttcttccccctgagctacgtggaggtgctggtgcccctgccccagtag

SEQ ID NO: 98815 - DNA, 915 bp, synthetic construct
  misc_feature 1..915: note = Description of Artificial Sequence: Synthetic coding sequence
  source 1..915: mol_type = other DNA
atgagcgtggccggcctgaagaagcagttctacaaggccagccagctggtgagcgagaaggtgggcggcgccgagggcaccaagctggacgacgacttcaaggagatggagaagaaggtggacgtgaccagcaaggccgtgaccgaggtgctggccagaaccatcgagtacctgcagcccaaccccgccagcagagccaagctgaccatgctgaacaccgtgagcaagatcagaggccagaacctgtgcgagaaggacctgaaggagatccagcaccacctgaagaagctggagggcagaagactggacttcgactacaagaagaagagacagggcaagatccccgacgaggagctgagacaggccctggagaagttcgaggagagcaaggaggtggccgagaccagcatgcacaacctgctggagaccgacatcgagcaggtgagccagctgagcgccctggtggacgcccagctggactaccacagacaggccgtgcagatcctggacgagctggccgagaagctgaagagaagaatgagagaggccagcagcagacccaagagagagtacaagcccaagcccagagagcccttcgacctgggcgagcccgagcagagcaacggcggcttcccctgcaccaccgcccccaagatcgccgccagcagcagcttcagaagcagcgacaagcccatcagaacccccagcagaagcatgccccccctggaccagcccagctgcaaggccctgtacgacttcgagcccgagaacgacggcgagctgggcttccacgagggcgacgtgatcaccctgaccaaccagatcgacgagaactggtacgagggcatgctggacggccagagcggcttcttccccctgagctacgtggaggtgctggtgcccctgccccagtag

SEQ ID NO: 98816 - DNA, 1059 bp, synthetic construct
  misc_feature 1..1059: note = Description of Artificial Sequence: Synthetic coding sequence
  source 1..1059: mol_type = other DNA
atgagcgtggccggcctgaagaagcagttccacaaggccacccagaaggtgagcgagaaggtgggcggcgccgagggcaccaagctggacgacgacttcaaggagatggagagaaaggtggacgtgaccagcagagccgtgatggagatcatgaccaagaccatcgagtacctgcagcccaaccccgccagcagagccaagctgagcatgatcaacaccatgagcaagatcagaggccaggagaagggccccggctacccccaggccgaggccctgctggccgaggccatgctgaagttcggcagagagctgggcgacgactgcaacttcggccccgccctgggcgaggtgggcgaggccatgagagagctgagcgaggtgaaggacagcctggacatcgaggtgaagcagaacttcatcgaccccctgcagaacctgcacgacaaggacctgagagagatccagcaccacctgaagaagctggagggcagaagactggacttcgactacaagaagaagagacagggcaagatccccgacgaggagctgagacaggccctggagaagttcgacgagagcaaggagatcgccgagagcagcatgttcaacctgctggagatggacatcgagcaggtgagccagctgagcgccctggtgcaggcccagctggagtaccacaagcaggccgtgcagatcctgcagcaggtgaccgtgagactggaggagagaatcagacaggccagcagccagcccagaagagagtaccagcccaagcccagaatgagcctggagttccccaccggcgacagcacccagcccaacggcggcctgagccacaccggcacccccaagcccagcggcgtgcagatggaccagccctgctgcagagccctgtacgacttcgagcccgagaacgagggcgagctgggcttcaaggagggcgacatcatcaccctgaccaaccagatcgacgagaactggtacgagggcatgctgcacggccacagcggcttcttccccatcaactacgtggagatcctggtggccctgccccactag

SEQ ID NO: 98817 - DNA, 678 bp, synthetic construct
  misc_feature 1..678: note = Description of Artificial Sequence: Synthetic coding sequence
  source 1..678: mol_type = other DNA
atgagcgtggccggcctgaagaagcagttccacaaggccacccagaaggtgagcgagaaggtgggcggcgccgagggcaccaagctggacgacgacttcaaggagatggagagaaaggtggacgtgaccagcagagccgtgatggagatcatgaccaagaccatcgagtacctgcagcccaaccccggcagcctggaggccgaggccctgctggccgaggccatgctgaagttcggcagagagctgggcgacgactgcaacttcggccccgccctgggcgaggtgggcgaggccatgagagagctgagcgaggtgaaggacagcctggacatcgaggtgaagcagaacttcatcgaccccctgcagaacctgcacgacaaggacctgagagagatccagcaccacctgaagaagctggagggcagaagactggacttcgactacaagaagaagagacagggcaagatccccgacgaggagctgagacaggccctggagaagttcgacgagagcaaggagatcgccgagagcagcatgttcaacctgctggagatggacatcgagcaggtgagccagctgagcgccctggtgcaggcccagctggagtaccacaagcaggccgtgcagatcctgcagcaggtgaccgtgagactggaggagagaatcagacaggcctag

SEQ ID NO: 98818 - DNA, 918 bp, synthetic construct
  misc_feature 1..918: note = Description of Artificial Sequence: Synthetic coding sequence
  source 1..918: mol_type = other DNA
atggagatcatgaccaagaccatcgagtacctgcagcccaaccccgccagcagagccaagctgagcatgatcaacaccatgagcaagatcagaggccaggagaagggccccggctacccccaggccgaggccctgctggccgaggccatgctgaagttcggcagagagctgggcgacgactgcaacttcggccccgccctgggcgaggtgggcgaggccatgagagagctgagcgaggtgaaggacagcctggacatcgaggtgaagcagaacttcatcgaccccctgcagaacctgcacgacaaggacctgagagagatccagcaccacctgaagaagctggagggcagaagactggacttcgactacaagaagaagagacagggcaagatccccgacgaggagctgagacaggccctggagaagttcgacgagagcaaggagatcgccgagagcagcatgttcaacctgctggagatggacatcgagcaggtgagccagctgagcgccctggtgcaggcccagctggagtaccacaagcaggccgtgcagatcctgcagcaggtgaccgtgagactggaggagagaatcagacaggccagcagccagcccagaagagagtaccagcccaagcccagaatgagcctggagttccccaccggcgacagcacccagcccaacggcggcctgagccacaccggcacccccaagcccagcggcgtgcagatggaccagccctgctgcagagccctgtacgacttcgagcccgagaacgagggcgagctgggcttcaaggagggcgacatcatcaccctgaccaaccagatcgacgagaactggtacgagggcatgctgcacggccacagcggcttcttccccatcaactacgtggagatcctggtggccctgccccactag

SEQ ID NO: 98819 - DNA, 546 bp, synthetic construct
  misc_feature 1..546: note = Description of Artificial Sequence: Synthetic coding sequence
  source 1..546: mol_type = other DNA
atgagcgtggccggcctgaagaagcagttccacaaggccacccagaaggtgagcgagaaggtgggcggcgccgagggcaccaagctggacgacgacttcaaggagatggagatcgagcaggtgagccagctgagcgccctggtgcaggcccagctggagtaccacaagcaggccgtgcagatcctgcagcaggtgaccgtgagactggaggagagaatcagacaggccagcagccagcccagaagagagtaccagcccaagcccagaatgagcctggagttccccaccggcgacagcacccagcccaacggcggcctgagccacaccggcacccccaagcccagcggcgtgcagatggaccagccctgctgcagagccctgtacgacttcgagcccgagaacgagggcgagctgggcttcaaggagggcgacatcatcaccctgaccaaccagatcgacgagaactggtacgagggcatgctgcacggccacagcggcttcttccccatcaactacgtggagatcctggtggccctgccccactag

SEQ ID NO: 98820 - DNA, 1068 bp, synthetic construct
  misc_feature 1..1068: note = Description of Artificial Sequence: Synthetic coding sequence
  source 1..1068: mol_type = other DNA
atggacggcatcttcgccggcatcatctgcaaccaggccaacagatgcctgacctggaccagccagcagctgttcagcgagaagatcagcggcgccgagggcaccaagctggacgacgagttcctggacatggagagaaagatcgacgtgaccaacaaggtggtggccgagatcctgagcaagaccaccgagtacctgcagcccaaccccgcctacagagccaagctgggcatgctgaacaccgtgagcaagatcagaggccaggtgaagaccaccggctacccccagaccgagggcctgctgggcgactgcatgctgaagtacggcaaggagctgggcgaggacagcaccttcggcaacgccctgatcgaggtgggcgagagcatgaagctgatggccgaggtgaaggacagcctggacatcaacgtgaagcagaccttcatcgaccccctgcagctgctgcaggacaaggacctgaaggagatcggccaccacctgaagaagctggagggcagaagactggactacgactacaagaagaagagagtgggcaagatccccgacgaggaggtgagacaggccgtggagaagttcgaggagagcaaggagctggccgagagaagcatgttcaacttcctggagaacgacgtggagcaggtgagccagctggccgtgttcatcgaggccgccctggactaccacagacagagcaccgagatcctgcaggagctgcagagcaagctgcagatgagaatcagcgccgccagcagcgtgcccagaagagagtacaagcccagacccgtgaagagaagcagcagcgagctgaacggcgtgagcaccaccagcgtggtgaagaccaccggcagcaacatccccatggaccagccctgctgcagaggcctgtacgacttcgagcccgagaaccagggcgagctgggcttcaaggagggcgacatcatcaccctgaccaaccagatcgacgagaactggtacgagggcatgatccacggcgagagcggcttcttccccatcaactacgtggaggtgatcgtgcccctgccccagtag

SEQ ID NO: 98821 - DNA, 1044 bp, synthetic construct
  misc_feature 1..1044: note = Description of Artificial Sequence: Synthetic coding sequence
  source 1..1044: mol_type = other DNA
atgagcgtggccggcctgaagaagcagttccacaaggccagccagctgttcagcgagaagatcagcggcgccgagggcaccaagctggacgacgagttcctggacatggagagaaagatcgacgtgaccaacaaggtggtggccgagatcctgagcaagaccaccgagtacctgcagcccaaccccgcctacagagccaagctgggcatgctgaacaccgtgagcaagatcagaggccaggtgaagaccaccggctacccccagaccgagggcctgctgggcgactgcatgctgaagtacggcaaggagctgggcgaggacagcaccttcggcaacgccctgatcgaggtgggcgagagcatgaagctgatggccgaggtgaaggacagcctggacatcaacgtgaagcagaccttcatcgaccccctgcagctgctgcaggacaaggacctgaaggagatcggccaccacctgaagaagctggagggcagaagactggactacgactacaagaagaagagagtgggcaagatccccgacgaggaggtgagacaggccgtggagaagttcgaggagagcaaggagctggccgagagaagcatgttcaacttcctggagaacgacgtggagcaggtgagccagctggccgtgttcatcgaggccgccctggactaccacagacagagcaccgagatcctgcaggagctgcagagcaagctgcagatgagaatcagcgccgccagcagcgtgcccagaagagagtacaagcccagacccgtgaagagaagcagcagcgagctgaacggcgtgagcaccaccagcgtggtgaagaccaccggcagcaacatccccatggaccagccctgctgcagaggcctgtacgacttcgagcccgagaaccagggcgagctgggcttcaaggagggcgacatcatcaccctgaccaaccagatcgacgagaactggtacgagggcatgatccacggcgagagcggcttcttccccatcaactacgtggaggtgatcgtgcccctgccccagtag

SEQ ID NO: 98822 - DNA, 1068 bp, synthetic construct; identical to SEQ ID NO: 98820
  misc_feature 1..1068: note = Description of Artificial Sequence: Synthetic coding sequence
  source 1..1068: mol_type = other DNA

SEQ ID NO: 98823 - DNA, 867 bp, synthetic construct
  misc_feature 1..867: note = Description of Artificial Sequence: Synthetic coding sequence
  source 1..867: mol_type = other DNA
atgagcgtggccggcctgaagaagcagttccacaaggccagccagctgttcagcgagaagatcagcggcgccgagggcaccaagctggacgacgagttcctggacatggagagaaagatcgacgtgaccaacaaggtggtggccgagatcctgagcaagaccaccgagtacctgcagcccaaccccgcctacagagccaagctgggcatgctgaacaccgtgagcaagatcagaggccaggtgaagaccaccggctacccccagaccgagggcctgctgggcgactgcatgctgaagtacggcaaggagctgggcgaggacagcaccttcggcaacgccctgatcgaggtgggcgagagcatgaagctgatggccgaggtgaaggacagcctggacatcaacgtgaagcagaccttcatcgaccccctgcagctgctgcaggacaaggacctgaaggagatcggccaccacctgaagaagctggagggcagaagactggactacgactacaagaagaagagagtgggcaagatccccgacgaggaggtgagacaggccgtggagaagttcgaggagagcaaggagctggccgagagaagcatgttcaacttcctggagaacgacgtggagcaggtgagccagctggccgtgttcatcgaggccgccctggactaccacagacagagcaccgagatcctgcaggagctgcagagcaagctgcagatgagaatcagcgccgccagcagcgtgcccagaagagagtacaagcccagacccgtgaagagaagcagcagcgagctgaacggcgtgagcaccaccagcgtggtgaagaccaccgcctacagcagactggagcccgccgactag

SEQ ID NO: 98824 - DNA, 1662 bp, synthetic construct
  misc_feature 1..1662: note = Description of Artificial Sequence: Synthetic coding sequence
  source 1..1662: mol_type = other DNA
atggtggaggccatcgtggagttcgactaccaggcccagcacgacgacgagctgaccatcagcgtgggcgagatcatcaccaacatcagaaaggaggacggcggctggtgggagggccagatcaacggcagaagaggcctgttccccgacaacttcgtgagagagatcaagaaggagatgaagaaggaccccctgaccaacaaggcccccgagaagcccctgcacgaggtgcccagcggcaacagcctgctgagcagcgagaccatcctgagaaccaacaagagaggcgagagaagaagaagaagatgccaggtggccttcagctacctgccccagaacgacgacgagctggagctgaaggtgggcgacatcatcgaggtggtgggcgaggtggaggagggctggtgggagggcgtgctgaacggcaagaccggcatgttccccagcaacttcatcaaggagctgagcggcgagagcgacgagctgggcatcagccaggacgagcagctgagcaagagcagacccgagggcctgccccccgccagcctgctgcccttccccgcccacggcgccaagggcaagaccaccttcgagggcaccatcctgtacagagccgcccccggcaagaccgagggccacagaagatactacagcctgagagagaccaccggcagcgagagcgacggcggcgacagcagcagcaccaagagcgagggcgccaacggcaccgtggccaccgccgccatccagcccaagaaggtgaagggcgtgggcttcggcgacatcttcaaggacaagcccatcaagctgagacccagaagcatcgaggtggagaacgacttcctgcccgtggagaagaccatcggcaagaagctgcccgccaccaccgccacccccgacagcagcaagaccgagatggacagcagaaccaagagcaaggactactgcaaggtgatcttcccctacgaggcccagaacgacgacgagctgaccatcaaggagggcgacatcgtgaccctgatcaacaaggactgcatcgacgtgggctggtgggagggcgagctgaacggcagaagaggcgtgttccccgacaacttcgtgaagctgctgccccccgacttcgagaaggagggcaacagacccaagaagccccccccccccagcgcccccgtgatcaagcagggcgccggcaccaccgagagaaagcacgagatcaagaagatcccccccgagagacccgagatgctgcccaacagaaccgaggagaaggagagacccgagagagagcccaagctggacctgcagaagcccagcgtgcccgccatcccccccaagaagcccagaccccccaagaccaacagcctgagcagacccggcgccctgccccccagaagacccgagagacccgtgggccccctgacccacaccagatactgctgcgccctgaccagcggcgccggcgtgggctggctgtggaaggagcacagaagaggcaccgactgccacagaccctgggaggagggcagaggcgagggcggcgcccaggccagcctgctgcacccccccgccaagctgagcgaggacaccggccacttctgcccctgcagctgcacccaggccggcgtgagcgtgagactgagaggcgccgtgtgggtgagctag

SEQ ID NO: 98825 - DNA, 1887 bp, synthetic construct
  misc_feature 1..1887: note = Description of Artificial Sequence: Synthetic coding sequence
  source 1..1887: mol_type = other DNA
atggaggtgagcgccgccaaggcccccagcgccgccgacctgagcgagatcgagatcaagaaggagatgaagaaggaccccctgaccaacaaggcccccgagaagcccctgcacgaggtgcccagcggcaacagcctgctgagcagcgagaccatcctgagaaccaacaagagaggcgagagaagaagaagaagatgccaggtggccttcagctacctgccccagaacgacgacgagctggagctgaaggtgggcgacatcatcgaggtggtgggcgaggtggaggagggctggtgggagggcgtgctgaacggcaagaccggcatgttccccagcaacttcatcaaggagctgagcggcgagagcgacgagctgggcatcagccaggacgagcagctgagcaagagcagcctgagagagaccaccggcagcgagagcgacggcggcgacagcagcagcaccaagagcgagggcgccaacggcaccgtggccaccgccgccatccagcccaagaaggtgaagggcgtgggcttcggcgacatcttcaaggacaagcccatcaagctgagacccagaagcatcgaggtggagaacgacttcctgcccgtggagaagaccatcggcaagaagctgcccgccaccaccgccacccccgacagcagcaagaccgagatggacagcagaaccaagagcaaggactactgcaaggtgatcttcccctacgaggcccagaacgacgacgagctgaccatcaaggagggcgacatcgtgaccctgatcaacaaggactgcatcgacgtgggctggtgggagggcgagctgaacggcagaagaggcgtgttccccgacaacttcgtgaagctgctgccccccgacttcgagaaggagggcaacagacccaagaagccccccccccccagcgcccccgtgatcaagcagggcgccggcaccaccgagagaaagcacgagatcaagaagatcccccccgagagacccgagatgctgcccaacagaaccgaggagaaggagagacccgagagagagcccaagctggacctgcagaagcccagcgtgcccgccatcccccccaagaagcccagaccccccaagaccaacagcctgagcagacccggcgccctgccccccagaagacccgagagacccgtgggccccctgacccacaccagaggcgacagccccaagatcgacctggccggcagcagcctgagcggcatcctggacaaggacctgagcgacagaagcaacgacatcgacctggagggcttcgacagcgtggtgagcagcaccgagaagctgagccaccccaccaccagcagacccaaggccaccggcagaagaccccccagccagagcctgaccagcagcagcctgagcagccccgacatcttcgacagccccagccccgaggaggacaaggaggagcacatcagcctggcccacagaggcgtggacgccagcaagaagaccagcaagaccgtgaccatcagccaggtgagcgacaacaaggccagcctgccccccaagcccggcaccatggccgccggcggcggcggccccgcccccctgagcagcgccgcccccagccccctgagcagcagcctgggcaccgccggccacagagccaacagccccagcctgttcggcaccgagggcaagcccaagatggagcccgccgccagcagccaggccgccgtggaggagctgagaacccaggtgagagagctgagaagcatcatcgagaccatgaaggaccagcagaagagagagatcaagcagctgctgagcgagctggacgaggagaagaagatcagactgagactgcagatggaggtgaacgacatcaagaaggccctgcagagcaagtag

SEQ ID NO: 98826 - DNA, 1953 bp, synthetic construct
  misc_feature 1..1953: note = Description of Artificial Sequence: Synthetic coding sequence
  source 1..1953: mol_type = other DNA
atgaagaaggaccccctgaccaacaaggcccccgagaagcccctgcacgaggtgcccagcggcaacagcctgctgagcagcgagaccatcctgagaaccaacaagagaggcgagagaagaagaagaagatgccaggtggccttcagctacctgccccagaacgacgacgagctggagctgaaggtgggcgacatcatcgaggtggtgggcgaggtggaggagggctggtgggagggcgtgctgaacggcaagaccggcatgttccccagcaacttcatcaaggagctgagcggcgagagcgacgagctgggcatcagccaggacgagcagctgagcaagagcagacccgagggcctgccccccgccagcctgctgcccttccccgcccacggcgccaagggcaagaccaccttcgagggcaccatcctgtacagagccgcccccggcaagaccgagggccacagaagatactacagcctgagagagaccaccggcagcgagagcgacggcggcgacagcagcagcaccaagagcgagggcgccaacggcaccgtggccaccgccgccatccagcccaagaaggtgaagggcgtgggcttcggcgacatcttcaaggacaagcccatcaagctgagacccagaagcatcgaggtggagaacgacttcctgcccgtggagaagaccatcggcaagaagctgcccgccaccaccgccacccccgacagcagcaagaccgagatggacagcagaaccaagagcaaggactactgcaaggtgatcttcccctacgaggcccagaacgacgacgagctgaccatcaaggagggcgacatcgtgaccctgatcaacaaggactgcatcgacgtgggctggtgggagggcgagctgaacggcagaagaggcgtgttccccgacaacttcgtgaagctgctgccccccgacttcgagaaggagggcaacagacccaagaagccccccccccccagcgcccccgtgatcaagcagggcgccggcaccaccgagagaaagcacgagatcaagaagatcccccccgagagacccgagatgctgcccaacagaaccgaggagaaggagagacccgagagagagcccaagctggacctgcagaagcccagcgtgcccgccatcccccccaagaagcccagaccccccaagaccaacagcctgagcagacccggcgccctgccccccagaagacccgagagacccgtgggccccctgacccacaccagaggcgacagccccaagatcgacctggccggcagcagcctgagcggcatcctggacaaggacctgagcgacagaagcaacgacatcgacctggagggcttcgacagcgtggtgagcagcaccgagaagctgagccaccccaccaccagcagacccaaggccaccggcagaagaccccccagccagagcctgaccagcagcagcctgagcagccccgacatcttcgacagccccagccccgaggaggacaaggaggagcacatcagcctggcccacagaggcgtggacgccagcaagaagaccagcaagaccgtgaccatcagccaggtgagcgacaacaaggccagcctgccccccaagcccggcaccatggccgccggcggcggcggccccgcccccctgagcagcgccgcccccagccccctgagcagcagcctgggcaccgccggccacagagccaacagccccagcctgttcggcaccgagggcaagcccaagatggagcccgccgccagcagccaggccgccgtggaggagctgagaacccaggtgagagagctgagaagcatcatcgagaccatgaaggaccagcagaagagagagatcaagcagctgctgagcgagctggacgaggagaagaagatcagactgagactgcagatggaggtgaacgacatcaagaaggccctgcagagcaagtag

SEQ ID NO: 98827 - DNA, 1284 bp, synthetic construct
  misc_feature 1..1284: note = Description of Artificial Sequence: Synthetic coding sequence
  source 1..1284: mol_type = other DNA
atgggcgaggagaccatcggcaagaagctgcccgccaccaccgccacccccgacagcagcaagaccgagatggacagcagaaccaagagcaaggactactgcaaggtgatcttcccctacgaggcccagaacgacgacgagctgaccatcaaggagggcgacatcgtgaccctgatcaacaaggactgcatcgacgtgggctggtgggagggcgagctgaacggcagaagaggcgtgttccccgacaacttcgtgaagctgctgccccccgacttcgagaaggagggcaacagacccaagaagccccccccccccagcgcccccgtgatcaagcagggcgccggcaccaccgagagaaagcacgagatcaagaagatcccccccgagagacccgagatgctgcccaacagaaccgaggagaaggagagacccgagagagagcccaagctggacctgcagaagcccagcgtgcccgccatcccccccaagaagcccagaccccccaagaccaacagcctgagcagacccggcgccctgccccccagaagacccgagagacccgtgggccccctgacccacaccagaggcgacagccccaagatcgacctggccggcagcagcctgagcggcatcctggacaaggacctgagcgacagaagcaacgacatcgacctggagggcttcgacagcgtggtgagcagcaccgagaagctgagccaccccaccaccagcagacccaaggccaccggcagaagaccccccagccagagcctgaccagcagcagcctgagcagccccgacatcttcgacagccccagccccgaggaggacaaggaggagcacatcagcctggcccacagaggcgtggacgccagcaagaagaccagcaagaccgtgaccatcagccaggtgagcgacaacaaggccagcctgccccccaagcccggcaccatggccgccggcggcggcggccccgcccccctgagcagcgccgcccccagccccctgagcagcagcctgggcaccgccggccacagagccaacagccccagcctgttcggcaccgagggcaagcccaagatggagcccgccgccagcagccaggccgccgtggaggagctgagaacccaggtgagagagctgagaagcatcatcgagaccatgaaggaccagcagaagagagagatcaagcagctgctgagcgagctggacgaggagaagaagatcagactgagactgcagatggaggtgaacgacatcaagaaggccctgcagagcaagtag

SEQ ID NO: 98828 - DNA, 1938 bp, synthetic construct
  misc_feature 1..1938: note = Description of Artificial Sequence: Synthetic coding sequence
  source 1..1938: mol_type = other DNA
ctgaccaacaaggcccccgagaagcccctgcacgaggtgcccagcggcaacagcctgctgagcagcgagaccatcctgagaaccaacaagagaggcgagagaagaagaagaagatgccaggtggccttcagctacctgccccagaacgacgacgagctggagctgaaggtgggcgacatcatcgaggtggtgggcgaggtggaggagggctggtgggagggcgtgctgaacggcaagaccggcatgttccccagcaacttcatcaaggagctgagcggcgagagcgacgagctgggcatcagccaggacgagcagctgagcaagagcagacccgagggcctgccccccgccagcctgctgcccttccccgcccacggcgccaagggcaagaccaccttcgagggcaccatcctgtacagagccgcccccggcaagaccgagggccacagaagatactacagcctgagagagaccaccggcagcgagagcgacggcggcgacagcagcagcaccaagagcgagggcgccaacggcaccgtggccaccgccgccatccagcccaagaaggtgaagggcgtgggcttcggcgacatcttcaaggacaagcccatcaagctgagacccagaagcatcgaggtggagaacgacttcctgcccgtggagaagaccatcggcaagaagctgcccgccaccaccgccacccccgacagcagcaagaccgagatggacagcagaaccaagagcaaggactactgcaaggtgatcttcccctacgaggcccagaacgacgacgagctgaccatcaaggagggcgacatcgtgaccctgatcaacaaggactgcatcgacgtgggctggtgggagggcgagctgaacggcagaagaggcgtgttccccgacaacttcgtgaagctgctgccccccgacttcgagaaggagggcaacagacccaagaagccccccccccccagcgcccccgtgatcaagcagggcgccggcaccaccgagagaaagcacgagatcaagaagatcccccccgagagacccgagatgctgcccaacagaaccgaggagaaggagagacccgagagagagcccaagctggacctgcagaagcccagcgtgcccgccatcccccccaagaagcccagaccccccaagaccaacagcctgagcagacccggcgccctgccccccagaagacccgagagacccgtgggccccctgacccacaccagaggcgacagccccaagatcgacctggccggcagcagcctgagcggcatcctggacaaggacctgagcgacagaagcaacgacatcgacctggagggcttcgacagcgtggtgagcagcaccgagaagctgagccaccccaccaccagcagacccaaggccaccggcagaagaccccccagccagagcctgaccagcagcagcctgagcagccccgacatcttcgacagccccagccccgaggaggacaaggaggagcacatcagcctggcccacagaggcgtggacgccagcaagaagaccagcaagaccgtgaccatcagccaggtgagcgacaacaaggccagcctgccccccaagcccggcaccatggccgccggcggcggcggccccgcccccctgagcagcgccgcccccagccccctgagcagcagcctgggcaccgccggccacagagccaacagccccagcctgttcggcaccgagggcaagcccaagatggagcccgccgccagcagccaggccgccgtggaggagctgagaacccaggtgagagagctgagaagcatcatcgagaccatgaaggaccagcagaagagagagatcaagcagctgctgagcgagctggacgaggagaagaagatcagactgagactgcagatggaggtgaacgacatcaagaaggccctgcagagcaagtag

SEQ ID NO: 98829 - DNA, 450 bp, synthetic construct
  misc_feature 1..450: note = Description of Artificial Sequence: Synthetic coding sequence
  source 1..450: mol_type = other DNA
ttcgagaccagcgagagaagaagaagaagatgccaggtggccttcagctacctgccccagaacgacgacgagctggagctgaaggtgggcgacatcatcgaggtggtgggcgaggtggaggagggctggtgggagggcgtgctgaacggcaagaccggcatgttccccagcaacttcatcaaggagctgagcggcgagagcgacgagctgggcatcagccaggacgagcagctgagcaagagcagcctgagagagaccaccggcagcgagagcgacggcggcgacagcagcagcaccaagagcgagggcgccaacggcaccgtggccaccgccgccatccagcccaagaaggtgaagggcgtgggcttcggcgacatcttcaaggacaagcccatcaagctgagacccagaagcatcgaggtggagaacgacttcctgcccgtggagtag

SEQ ID NO: 98830 - DNA, 1998 bp, synthetic construct
  misc_feature 1..1998: note = Description of Artificial Sequence: Synthetic coding sequence
  source 1..1998: mol_type = other DNA
atggtggaggccatcgtggagttcgactaccaggcccagcacgacgacgagctgaccatcagcgtgggcgagatcatcaccaacatcagaaaggaggacggcggctggtgggagggccagatcaacggcagaagaggcctgttccccgacaacttcgtgagagagatcaagaaggagatgaagaaggaccccctgaccaacaaggcccccgagaagcccctgcacgaggtgcccagcggcaacagcctgctgagcagcgagaccatcctgagaaccaacaagagaggcgagagaagaagaagaagatgccaggtggccttcagctacctgccccagaacgacgacgagctggagctgaaggtgggcgacatcatcgaggtggtgggcgaggtggaggagggctggtgggagggcgtgctgaacggcaagaccggcatgttccccagcaacttcatcaaggagctgagcggcgagagcgacgagctgggcatcagccaggacgagcagctgagcaagagcagcctgagagagaccaccggcagcgagagcgacggcggcgacagcagcagcaccaagagcgagggcgccaacggcaccgtggccaccgccgccatccagcccaagaaggtgaagggcgtgggcttcggcgacatcttcaaggacaagcccatcaagctgagacccagaagcatcgaggtggagaacgacttcctgcccgtggagaagaccatcggcaagaagctgcccgccaccaccgccacccccgacagcagcaagaccgagatggacagcagaaccaagagcaaggactactgcaaggtgatcttcccctacgaggcccagaacgacgacgagctgaccatcaaggagggcgacatcgtgaccctgatcaacaaggactgcatcgacgtgggctggtgggagggcgagctgaacggcagaagaggcgtgttccccgacaacttcgtgaagctgctgccccccgacttcgagaaggagggcaacagacccaagaagccccccccccccagcgcccccgtgatcaagcagggcgccggcaccaccgagagaaagcacgagatcaagaagatcccccccgagagacccgagatgctgcccaacagaaccgaggagaaggagagacccgagagagagcccaagctggacctgcagaagcccagcgtgcccgccatcccccccaagaagcccagaccccccaagaccaacagcctgagcagacccggcgccctgccccccagaagacccgagagacccgtgggccccctgacccacaccagaggcgacagccccaagatcgacctggccggcagcagcctgagcggcatcctggacaaggacctgagcgacagaagcaacgacatcgacctggagggcttcgacagcgtggtgagcagcaccgagaagctgagccaccccaccaccagcagacccaaggccaccggcagaagaccccccagccagagcctgaccagcagcagcctgagcagccccgacatcttcgacagccccagccccgaggaggacaaggaggagcacatcagcctggcccacagaggcgtggacgccagcaagaagaccagcaagaccgtgaccatcagccaggtgagcgacaacaaggccagcctgccccccaagcccggcaccatggccgccggcggcggcggccccgcccccctgagcagcgccgcccccagccccctgagcagcagcctgggcaccgccggccacagagccaacagccccagcctgttcggcaccgagggcaagcccaagatggagcccgccgccagcagccaggccgccgtggaggagctgagaacccaggtgagagagctgagaagcatcatcgagaccatgaaggaccagcagaagagagagatcaagcagctgctgagcgagctggacgaggagaagaagatcagactgagactgcagatggaggtgaacgacatcaagaaggccctgcagagcaagtag

SEQ ID NO: 98831 - DNA, 450 bp, synthetic construct
  misc_feature 1..450: note = Description of Artificial Sequence: Synthetic coding sequence
  source 1..450: mol_type = other DNA
atggagagaagcgagagaagaagaagaagatgccaggtggccttcagctacctgccccagaacgacgacgagctggagctgaaggtgggcgacatcatcgaggtggtgggcgaggtggaggagggctggtgggagggcgtgctgaacggcaagaccggcatgttccccagcaacttcatcaaggagctgagcggcgagagcgacgagctgggcatcagccaggacgagcagctgagcaagagcagcctgagagagaccaccggcagcgagagcgacggcggcgacagcagcagcaccaagagcgagggcgccaacggcaccgtggccaccgccgccatccagcccaagaaggtgaagggcgtgggcttcggcgacatcttcaaggacaagcccatcaagctgagacccagaagcatcgaggtggagaacgacttcctgcccgtggagtag

SEQ ID NO: 98832 - DNA, 627 bp, synthetic construct
  misc_feature 1..627: note = Description of Artificial Sequence: Synthetic coding sequence
  source 1..627: mol_type = other DNA
atggagatcaagaaggagatgaagaaggaccccctgaccaacaaggcccccgagaagcccctgcacgaggtgcccagcggcaacagcctgctgagcagcgagaccatcctgagaaccaacaagagaggcgagagaagaagaagaagatgccaggtggccttcagctacctgccccagaacgacgacgagctggagctgaaggtgggcgacatcatcgaggtggtgggcgaggtggaggagggctggtgggagggcgtgctgaacggcaagaccggcatgttccccagcaacttcatcaaggagctgagcggcgagagcgacgagctgggcatcagccaggacgagcagctgagcaagagcagcctgagagagaccaccggcagcgagagcgacggcggcgacagcagcagcaccaagagcgagggcgccaacggcaccgtggccaccgccgccatccagcccaagaaggtgaagggcgtgggcttcggcgacatcttcaaggacaagcccatcaagctgagacccagaagcatcgaggtggagaacgacttcctgcccgtggagaagaccatcggcaagaagctgcccgccaccaccgccacccccgacagcagcaagaccgagtag

SEQ ID NO: 98833 - DNA, 1215 bp, synthetic construct
  misc_feature 1..1215: note = Description of Artificial Sequence: Synthetic coding sequence
  source 1..1215: mol_type = other DNA
atggacagcagaaccaagagcaaggactactgcaaggtgatcttcccctacgaggcccagaacgacgacgagctgaccatcaaggagggcgacatcgtgaccctgatcaacaaggactgcatcgacgtgggctggtgggagggcgagctgaacggcagaagaggcgtgttccccgacaacttcgtgaagctgctgccccccgacttcgagaaggagggcaacagacccaagaagccccccccccccagcgcccccgtgatcaagcagggcgccggcaccaccgagagaaagcacgagatcaagaagatcccccccgagagacccgagatgctgcccaacagaaccgaggagaaggagagacccgagagagagcccaagctggacctgcagaagcccagcgtgcccgccatcccccccaagaagcccagaccccccaagaccaacagcctgagcagacccggcgccctgccccccagaagacccgagagacccgtgggccccctgacccacaccagaggcgacagccccaagatcgacctggccggcagcagcctgagcggcatcctggacaaggacctgagcgacagaagcaacgacatcgacctggagggcttcgacagcgtggtgagcagcaccgagaagctgagccaccccaccaccagcagacccaaggccaccggcagaagaccccccagccagagcctgaccagcagcagcctgagcagccccgacatcttcgacagccccagccccgaggaggacaaggaggagcacatcagcctggcccacagaggcgtggacgccagcaagaagaccagcaagaccgtgaccatcagccaggtgagcgacaacaaggccagcctgccccccaagcccggcaccatggccgccggcggcggcggccccgcccccctgagcagcgccgcccccagccccctgagcagcagcctgggcaccgccggccacagagccaacagccccagcctgttcggcaccgagggcaagcccaagatggagcccgccgccagcagccaggccgccgtggaggagctgagaacccaggtgagagagctgagaagcatcatcgagaccatgaaggaccagcagaagagagagatcaagcagctgctgagcgagctggacgaggagaagaagatcagactgagactgcagatggaggtgaacgacatcaagaaggccctgcagagcaagtag

SEQ ID NO: 98834 - DNA, 456 bp, synthetic construct
  misc_feature 1..456: note = Description of Artificial Sequence: Synthetic coding sequence
  source 1..456: mol_type = other DNA
atgaactgggcccccgccacctgctgggccctgctgctggccgccgccttcctgtgcgacagcggcgccgccaagggcggcagaggcggcgccagaggcagcgccagaggcggcgtgagaggcggcgccagaggcgccagcagagtgagagtgagacccgcccagagatacggcgcccccggcagcagcctgagagtggccgccgccggcgccgccgccggcgccgccgccggcgccgccgccggcctggccgccggcagcggctggagaagagccgccggccccggcgagagaggcctggaggacgaggaggacggcgtgcccggcggcaacggcaccggccccggcatctacagctacagagcctggaccagcggcgccggccccaccagaggccccagactgtgcctggtgctgggcggcgccctgggcgccctgggcctgctgagaccctag

SEQ ID NO: 98835 - DNA, 456 bp, synthetic construct; identical to SEQ ID NO: 98834
  misc_feature 1..456: note = Description of Artificial Sequence: Synthetic coding sequence
  source 1..456: mol_type = other DNA

SEQ ID NO: 98836 - DNA, 981 bp, synthetic construct
  misc_feature 1..981: note = Description of Artificial Sequence: Synthetic coding sequence
  source 1..981: mol_type = other DNA
atggccccccccgccggcggcgccgccgccgccgccagcgacctgggcagcgccgccgtgctgctggccgtgcacgccgccgtgagacccctgggcgccggccccgacgccgaggcccagctgagaagactgcagctgagcgccgaccccgagagacccggcagattcagactggagctgctgggcgccggccccggcgccgtgaacctggagtggcccctggagagcgtgagctacaccatcagaggccccacccagcacgagctgcagcccccccccggcggccccggcaccctgagcctgcacttcctgaacccccaggaggcccagagatgggccgtgctggtgagaggcgccaccgtggagggccagaacggcagcaagagcaacagcccccccgccctgggccccgaggcctgccccgtgagcctgcccagcccccccgaggccagcaccctgaagggccccccccccgaggccgacctgcccagaagccccggcaacctgaccgagagagaggagctggccggcagcctggccagagccatcgccggcggcgacgagaagggcgccgcccaggtggccgccgtgctggcccagcacagagtggccctgagcgtgcagctgcaggaggcctgcttcccccccggccccatcagactgcaggtgaccctggaggacgccgccagcgccgccagcgccgccagcagcgcccacgtggccctgcaggtgcacccccactgcaccgtggccgccctgcaggagcaggtgttcagcgagctgggcttcccccccgccgtgcagagatgggtgatcggcagatgcctgtgcgtgcccgagagaagcctggccagctacggcgtgagacaggacggcgaccccgccttcctgtacctgctgagcgcccccagagaggcccccgcccagctggtgctgagcttcctgcacctgcaccagtgccccagacccccctggctgtag

SEQ ID NO: 98837 - DNA, 1164 bp, synthetic construct
  misc_feature 1..1164: note = Description of Artificial Sequence: Synthetic coding sequence
  source 1..1164: mol_type = other DNA
atggccccccccgccggcggcgccgccgccgccgccagcgacctgggcagcgccgccgtgctgctggccgtgcacgccgccgtgagacccctgggcgccggccccgacgccgaggcccagctgagaagactgcagctgagcgccgaccccgagagacccggcagattcagactggagctgctgggcgccggccccggcgccgtgaacctggagtggcccctggagagcgtgagctacaccatcagaggccccacccagcacgagctgcagcccccccccggcggccccggcaccctgagcctgcacttcctgaacccccaggaggcccagagatgggccgtgctggtgagaggcgccaccgtggagggccagaacggcagcaagagcaacagcccccccgccctgggccccgaggcctgccccgtgagcctgcccagcccccccgaggccagcaccctgaagggccccccccccgaggccgacctgcccagaagccccggcaacctgaccgagagagaggagctggccggcagcctggccagagccatcgccggcggcgacgagaagggcgccgcccaggtggccgccgtgctggcccagcacagagtggccctgagcgtgcagctgcaggaggcctgcttcccccccggccccatcagactgcaggtgaccctggaggacgccgccagcgccgccagcgccgccagcagcgcccacgtggccctgcaggtgcacccccactgcaccgtggccgccctgcaggagcaggtgttcagcgagctgggcttcccccccgccgtgcagagatgggtgatcggcagatgcctgtgcgtgcccgagagaagcctggccagctacggcgtgagacaggacggcgaccccgccttcctgtacctgctgagcgcccccagagaggcccccgccaccggccccagcccccagcacccccagaagatggacggcgagctgggcagactgttcccccccagcctgggcctgccccccggcccccagcccgccgccagcagcctgcccagccccctgcagcccagctggagctgccccagctgcaccttcatcaacgcccccgacagacccggctgcgagatgtgcagcacccagagaccctgcacctgggaccccctggccgccgccagcacctag

SEQ ID NO: 98838 - DNA, 2019 bp, synthetic construct
  misc_feature 1..2019: note = Description of Artificial Sequence: Synthetic coding sequence
  source 1..2019: mol_type = other DNA
atggccgacggcagcctgaccggcggcggcctggaggccgccgccatggcccccgagagaatgggctgggccgtggagcaggagctggccagcctggagaagggcctgttccaggacgaggacagctgcagcgactgcagctacagagacaagcccggcagcagcctgcagagcttcatgcccgagggcaagaccttcttccccgagatcttccagaccaaccagctgctgttctacgagagattcagagcctaccaggactacatcctggccgactgcaaggccagcgaggtgcaggagttcaccgccgagttcctggagaaggtgctggagcccagcggctggagagccgtgtggcacaccaacgtgttcaaggtgctggtggagatcaccgacgtggacttcgccgccctgaaggccgtggtgagactggccgagccctacctgtgcgacagccaggtgagcaccttcaccatggagtgcatgaaggagctgctggacctgaaggagcacagactgcccctgcaggagctgtgggtggtgttcgacgacagcggcgtgttcgaccagaccgccctggccatcgagcacgtgagattcttctaccagaacatctggagaagctgggacgaggaggaggaggacgagtacgactacttcgtgagatgcgtggagcccagactgagactgcactacgacatcctggaggacagagtgcccagcggcctgatcgtggactaccacaacctgctgagccagtgcgaggagagctacagaaagttcctgaacctgagaagcagcctgagcaactgcaacagcgacagcgagcaggagaacatcagcatggtggagggcctgaagctgtacagcgagatggagcagctgaagcagaagctgaagctgatcgagaaccccctgctgagatacgtgttcggctaccagaagaacagcaacatccaggccaagggcgtgagaagcagcggccagaagatcacccacgtggtgagcagcaccatgatggccggcctgctgagaagcctgctgaccgacagactgtgccaggagcccggcgaggaggagagagagatccagttccacagcgaccccctgagcgccatcaacgcctgcttcgagggcgacaccgtgatcgtgtgccccggccactacgtggtgcacggcaccttcagcatcgccgacagcatcgagctggagggctacggcctgcccgacgacatcgtgatcgagaagagaggcaagggcgacaccttcgtggactgcaccggcgccgacatcaagatcagcggcatcaagttcgtgcagcacgacgccgtggagggcatcctgatcgtgcacagaggcaagaccaccctggagaactgcgtgctgcagtgcgagaccaccggcgtgaccgtgagaaccagcgccgagttcctgatgaagaacagcgacctgtacggcgccaagggcgccggcatcgagatctaccccggcagccagtgcaccctgagcgacaacggcatccaccactgcaaggagggcatcctgatcaaggacttcctggacgagcactacgacatccccaagatcagcatggtgaacaacatcatccacaacaacgagggctacggcgtggtgctggtgaagcccaccatcttcagcgacctgcaggagaacgccgaggacggcaccgaggagaacaaggccctgaagatccagaccagcggcgagcccgacgtggccgagagagtggacctggaggagctgatcgagtgcgccaccggcaagatggagctgtgcgccagaaccgaccccagcgagcaggtggagggcaactgcgagatcgtgaacgagctgatcgccgccagcacccagaagggccagatcaagaagaagagactgagcgagctgggcatcacccaggccgacgacaacctgatgagccaggagatgttcgtgggcatcgtgggcaaccagttcaagtggaacggcaagggcagcttcggcaccttcctgttctag

SEQ ID NO: 98839 - DNA, 723 bp, synthetic construct
  misc_feature 1..723: note = Description of Artificial Sequence: Synthetic coding sequence
  source 1..723: mol_type = other DNA
atgaccgcccccgtgcccgcccccagaatcctgctgcccctgctgctgctgctgctgctgacccccccccccggcgccagaggcgaggtgtgcatggccagcagaggcctgagcctgttccccgagagctgccccgacttctgctgcggcacctgcgacgaccagtactgctgcagcgacgtgctgaagaagttcgtgtggagcgaggagagatgcgccgtgcccgaggccagcgtgcccgccagcgtggagcccgtggagcagctgggcagcgccctgagattcagacccggctacaacgaccccatgagcggcttcggcgccaccctggccgtgggcctgaccatcttcgtgctgagcgtggtgaccatcatcatctgcttcacctgcagctgctgctgcctgtacaagacctgcagaagacccagacccgtggtgaccaccaccaccagcaccaccgtggtgcacgccccctacccccagccccccagcgtgccccccagctaccccggccccagctaccagggctaccacaccatgcccccccagcccggcatgcccgccgccccctaccccatgcagtacccccccccctaccccgcccagcccatgggcccccccgcctaccacgagaccctggccggcggcgccgccgccccctaccccgccagccagcccccctacaaccccgcctacatggacgcccccaaggccgccctgtag

SEQ ID NO: 98840 - DNA, 339 bp, synthetic construct
  misc_feature 1..339: note = Description of Artificial Sequence: Synthetic coding sequence
  source 1..339: mol_type = other DNA
atggccagcagaggcctgagcctgttccccgagagctgccccgacttctgctgcggcacctgcgacgaccagtactgctgcagcgacgtgctgaagaagttcgtgtggagcgaggagagatgcgccgtgcccgaggccagcgtgcccgccagcgtggagcccgtggagcagctgggcagcgccctgagattcagacccggctacaacgaccccatgagcggcttcggcgccaccctggccgtgggcctgaccatcttcgtgctgagcgtggtgaccatcatcatctgcttcacctgcagctgctgctgcctgtacaagacctgcagaagacccagatag

SEQ ID NO: 98841 - DNA, 414 bp, synthetic construct
  misc_feature 1..414: note = Description of Artificial Sequence: Synthetic coding sequence
  source 1..414: mol_type = other DNA
atgggcttcggcgccaccctggccgtgggcctgaccatcttcgtgctgagcgtggtgaccatcatcatctgcttcacctgcagctgctgctgcctgtacaagacctgcagaagacccagacccgtggtgaccaccaccaccagcaccaccgtggtgcacgccccctacccccagccccccagcgtgccccccagctaccccggccccagctaccagggctaccacaccatgcccccccagcccggcatgcccgccgccccctaccccatgcagtacccccccccctaccccgcccagcccatgggcccccccgcctaccacgagaccctggccggcggcgccgccgccccctaccccgccagccagcccccctacaaccccgcctacatggacgcccccaaggccgccctgtag

SEQ ID NO: 98842 - DNA, 630 bp, synthetic construct
  misc_feature 1..630: note = Description of Artificial Sequence: Synthetic coding sequence
  source 1..630: mol_type = other DNA
atggccagcagaggcctgagcctgttccccgagagctgccccgacttctgctgcggcacctgcgacgaccagtactgctgcagcgacgtgctgaagaagttcgtgtggagcgaggagagatgcgccgtgcccgaggccagcgtgcccgccagcgtggagcccgtggagcagctgggcagcgccctgagattcagacccggctacaacgaccccatgagcggcttcggcgccaccctggccgtgggcctgaccatcttcgtgctgagcgtggtgaccatcatcatctgcttcacctgcagctgctgctgcctgtacaagacctgcagaagacccagacccgtggtgaccaccaccaccagcaccaccgtggtgcacgccccctacccccagccccccagcgtgccccccagctaccccggccccagctaccagggctaccacaccatgcccccccagcccggcatgcccgccgccccctaccccatgcagtacccccccccctaccccgcccagcccatgggcccccccgcctaccacgagaccctggccggcggcgccgccgccccctaccccgccagccagcccccctacaaccccgcctacatggacgcccccaaggccgccctgtag

SEQ ID NO: 98843 - DNA, 630 bp, synthetic construct; identical to SEQ ID NO: 98842
  misc_feature 1..630: note = Description of Artificial Sequence: Synthetic coding sequence
  source 1..630: mol_type = other DNA

SEQ ID NO: 98844 - DNA, 513 bp, synthetic construct
  misc_feature 1..513: note = Description of Artificial Sequence: Synthetic coding sequence
  source 1..513: mol_type = other DNA
atgcccccccagcccggctgccagcagcaccccacccagtgcagcacccaccacctgacccagcccagcccctgggcccacagacccaccaccagaccctggctggaggagcagcccagacccaccccccccgccagcctgctgaccaccagacccacctggatgcccagaggcggccccctgagcatcccctggcccctgtggctgcccctgggctacgtggtgtgcgtgagagagtggtgcgccggcgccgtgccctacgccccctgcgtgctgtgcgtgagctgcctgtacatgtggctgcccctgatgctgaccagatggggcaccatcctggccagagtgggctgggaccagaccctgttcagcagcagccccgagatcatgctgcccaagatcagcagccagacccagagaatgggctggtggggcgccccctgcgaggtggcccccgagagatggggccccctgcagggcaccagcggcgtgctgctgcagctgaccctgggctag

SEQ ID NO: 98845 - DNA, 666 bp, synthetic construct
  misc_feature 1..666: note = Description of Artificial Sequence: Synthetic coding sequence
  source 1..666: mol_type = other DNA
atgagaagagtgctgagactgctgctgggctgcttcctgaccgagctgtgcgccagagtgtgcagagcccaggagagagccggccacggccagctggcccagctgggcggcgtgctgctgctggccggcggcaacagaagcggcgccgccagcggcgaggccagcgagggcgccgaggccagcgacgccccccccaccagagcccccacccccgacttctgcagaggctacttcgacgtgatgggccagtgggacccccccttcaactgcagcagcggcgacttcatcttctgctgcggcacctgcggcttcagattctgctgcaccttcaagaagagaagactgaaccagagcacctgcaccaactacgacacccccctgtggctgaacaccggcaagccccccgccagaaaggacgaccccctgcacgaccccaccaaggacaagaccaacctgatcgtgtacatcatctgcggcgtggtggccgtgatggtgctggtgggcatcttcaccaagctgggcctggagaaggcccacagaccccagagagagcacatgagcagactgtacgacaacctgctgttcatggaggcccagatcagcttccaggaggacgagcccgcccccggcgagtggagcgtgggcctgcagacctggaccgtgtag

SEQ ID NO: 98846 - DNA, 1275 bp, synthetic construct
  misc_feature 1..1275: note = Description of Artificial Sequence: Synthetic coding sequence
  source 1..1275: mol_type = other DNA
atgagaagagtgctgagactgctgctgggctgcttcctgaccgagctgtgcgccagagtgtgcagagcccaggagagagccggccacggccagctggcccagctgggcggcgtgctgctgctggccggcggcaacagaagcggcgccgccagcggcgaggccagcgagggcgccgaggccagcgacgccccccccaccagagcccccacccccgacttctgcagaggctacttcgacgtgatgggccagtgggacccccccttcaactgcagcagcggcgacttcatcttctgctgcggcacctgcggcttcagattctgctgcaccttcaagaagagaagactgaaccagagcacctgcaccaactacgacacccccctgtggctgaacaccggcaagccccccgccagaaaggacgaccccctgcacgaccccaccaaggacaagaccaacctgatcgtgtacatcatctgcggcgtggtggccgtgatggtgctggtgggcatcttcaccaagctgggcctggagaaggcccacagaccccagagagagcacatgagcagagccctggccgacgtgatgagaccccagggccactgcaacaccgaccacatggagagagacctgaacatcgtggtgcacgtgcagcactacgagaacatggacaccagaacccccatcaacaacctgcacgccacccagatgaacaacgccgtgcccaccagccccctgctgcagcagatgggccacccccacagctaccccaacctgggccagatcagcaacccctacgagcagcagccccccggcaaggagctgaacaagtacgccagcctgaaggccgtgggcagcagcgacggcgactgggccgtgagcaccctgaagagccccaaggccgacaaggtgaacgacgacttctacaccaagagaagacacctggccgagctggccgccaagggcaacctgcccctgcaccccgtgagagtggaggacgagcccagagccttcagccccgagcacggccccgccaagcagaacggccagaagagcagaaccaacaagatgcccccccaccccctggcctacaccagcaccaccaacttcaagggctgggaccccaacgagcagagcctgagaagacaggcctacagcaacaagggcaagctgggcaccgccgagaccggcagcagcgaccccctgggcaccagaccccagcactacccccccccccagccctacttcatcaccaacagcaagaccgaggtgaccgtgtag

SEQ ID NO: 98847 - DNA, 789 bp, synthetic construct
  misc_feature 1..789: note = Description of Artificial Sequence: Synthetic coding sequence
  source 1..789: mol_type = other DNA
atgtgcggccccagaagactggccgcccccggcagcagcctgggcagcttcggcagagccagcagaggcggcagaagaggcagcagcggcggcagagccgccgagcccggcctgggcgacaccatgagaagagtgctgagactgctgctgggctgcttcctgaccgagctgtgcgccagagtgtgcagagcccaggagagagccggccacggccagctggcccagctgggcggcgtgctgctgctggccggcggcaacagaagcggcgccgccagcggcgaggccagcgagggcgccgaggccagcgacgccccccccaccagagcccccacccccgacttctgcagaggctacttcgacgtgatgggccagtgggacccccccttcaactgcagcagcggcgacttcatcttctgctgcggcacctgcggcttcagattctgctgcaccttcaagaagagaagactgaaccagagcacctgcaccaactacgacacccccctgtggctgaacaccggcaagccccccgccagaaaggacgaccccctgcacgaccccaccaaggacaagaccaacctgatcgtgtacatcatctgcggcgtggtggccgtgatggtgctggtgggcatcttcaccaagctgggcctggagaaggcccacagaccccagagagagcacatgagcagactgtacgacaacctgctgttcatggaggcccagatcagcttccaggaggacgagcccgcccccggcgagtggagcgtgggcctgcagacctggaccgtgtag

SEQ ID NO: 98848 - DNA, 1398 bp, synthetic construct
  misc_feature 1..1398: note = Description of Artificial Sequence: Synthetic coding sequence
  source 1..1398: mol_type = other DNA
atgtgcggccccagaagactggccgcccccggcagcagcctgggcagcttcggcagagccagcagaggcggcagaagaggcagcagcggcggcagagccgccgagcccggcctgggcgacaccatgagaagagtgctgagactgctgctgggctgcttcctgaccgagctgtgcgccagagtgtgcagagcccaggagagagccggccacggccagctggcccagctgggcggcgtgctgctgctggccggcggcaacagaagcggcgccgccagcggcgaggccagcgagggcgccgaggccagcgacgccccccccaccagagcccccacccccgacttctgcagaggctacttcgacgtgatgggccagtgggacccccccttcaactgcagcagcggcgacttcatcttctgctgcggcacctgcggcttcagattctgctgcaccttcaagaagagaagactgaaccagagcacctgcaccaactacgacacccccctgtggctgaacaccggcaagccccccgccagaaaggacgaccccctgcacgaccccaccaaggacaagaccaacctgatcgtgtacatcatctgcggcgtggtggccgtgatggtgctggtgggcatcttcaccaagctgggcctggagaaggcccacagaccccagagagagcacatgagcagagccctggccgacgtgatgagaccccagggccactgcaacaccgaccacatggagagagacctgaacatcgtggtgcacgtgcagcactacgagaacatggacaccagaacccccatcaacaacctgcacgccacccagatgaacaacgccgtgcccaccagccccctgctgcagcagatgggccacccccacagctaccccaacctgggccagatcagcaacccctacgagcagcagccccccggcaaggagctgaacaagtacgccagcctgaaggccgtgggcagcagcgacggcgactgggccgtgagcaccctgaagagccccaaggccgacaaggtgaacgacgacttctacaccaagagaagacacctggccgagctggccgccaagggcaacctgcccctgcaccccgtgagagtggaggacgagcccagagccttcagccccgagcacggccccgccaagcagaacggccagaagagcagaaccaacaagatgcccccccaccccctggcctacaccagcaccaccaacttcaagggctgggaccccaacgagcagagcctgagaagacaggcctacagcaacaagggcaagctgggcaccgccgagaccggcagcagcgaccccctgggcaccagaccccagcactacccccccccccagccctacttcatcaccaacagcaagaccgaggtgaccgtgtag

SEQ ID NO: 98849 - DNA, 678 bp, synthetic construct
  misc_feature 1..678: note = Description of Artificial Sequence: Synthetic coding sequence
  source 1..678: mol_type = other DNA
atggaggagctgaccgccttcgtgagcaagagcttcgaccagaagagcaaggacggcaacggcggcggcggcggcggcggcggcaagaaggacagcatcacctacagagaggtgctggagagcggcctggccagaagcagagagctgggcaccagcgacagcagcctgcaggacatcaccgagggcggcggccactgccccgtgcacctgttcaaggaccacgtggacaacgacaaggagaagctgaaggagttcggcaccgccagagtggccgagggcatctacgagtgcaaggagaagagagaggacgtgaagagcgaggacgaggacggccagaccaagctgaagcagagaagaagcagaaccaacttcaccctggagcagctgaacgagctggagagactgttcgacgagacccactaccccgacgccttcatgagagaggagctgagccagagactgggcctgagcgaggccagagtgcaggtgtggttccagaacagaagagccaagtgcagaaagcaggagaaccagatgcacaagggcgtgatcctgggcaccgccaaccacctggacgcctgcagagtggccccctacgtgaacatgggcgccctgagaatgcccttccagcagatggagttctgcagctgcagacccggctggagcatcatggcctag

SEQ ID NO: 98850 - DNA, 678 bp, synthetic construct; identical to SEQ ID NO: 98849
  misc_feature 1..678: note = Description of Artificial Sequence: Synthetic coding sequence
  source 1..678: mol_type = other DNA

SEQ ID NO: 98851 - DNA, 879 bp, synthetic construct
  misc_feature 1..879: note = Description of Artificial Sequence: Synthetic coding sequence
  source 1..879: mol_type = other DNA
atggaggagctgaccgccttcgtgagcaagagcttcgaccagaagagcaaggacggcaacggcggcggcggcggcggcggcggcaagaaggacagcatcacctacagagaggtgctggagagcggcctggccagaagcagagagctgggcaccagcgacagcagcctgcaggacatcaccgagggcggcggccactgccccgtgcacctgttcaaggaccacgtggacaacgacaaggagaagctgaaggagttcggcaccgccagagtggccgagggcatctacgagtgcaaggagaagagagaggacgtgaagagcgaggacgaggacggccagaccaagctgaagcagagaagaagcagaaccaacttcaccctggagcagctgaacgagctggagagactgttcgacgagacccactaccccgacgccttcatgagagaggagctgagccagagactgggcctgagcgaggccagagtgcaggtgtggttccagaacagaagagccaagtgcagaaagcaggagaaccagatgcacaagggcgtgatcctgggcaccgccaaccacctggacgcctgcagagtggccccctacgtgaacatgggcgccctgagaatgcccttccagcaggtgcaggcccagctgcagctggagggcgtggcccacgcccacccccacctgcacccccacctggccgcccacgccccctacctgatgttcccccccccccccttcggcctgcccatcgccagcctggccgagagcgccagcgccgccgccgtggtggccgccgccgccaagagcaacagcaagaacagcagcatcgccgacctgagactgaaggccagaaagcacgccgaggccctgggcctgtag

SEQ ID NO: 98852 - DNA, 879 bp, synthetic construct; identical to SEQ ID NO: 98851
  misc_feature 1..879: note = Description of Artificial Sequence: Synthetic coding sequence
  source 1..879: mol_type = other DNA

SEQ ID NO: 98853 - DNA, 573 bp, synthetic construct
  misc_feature 1..573: note = Description of Artificial Sequence: Synthetic coding sequence
  source 1..573: mol_type = other DNA
atggaggacgagggccagaccaagatcaagcagagaagaagcagaaccaacttcaccctggagcagctgaacgagctggagagactgttcgacgagacccactaccccgacgccttcatgagagaggagctgagccagagactgggcctgagcgaggccagagtgcaggtgtggttccagaacagaagagccaagtgcagaaagcaggagaaccagctgcacaagggcgtgctgatcggcgccgccagccagttcgaggcctgcagagtggccccctacgtgaacgtgggcgccctgagaatgcccttccagcaggtgcaggcccagctgcagctggacagcgccgtggcccacgcccaccaccacctgcacccccacctggccgcccacgccccctacatgatgttccccgccccccccttcggcctgcccctggccaccctggccgccgacagcgccagcgccgccagcgtggtggccgccgccgccgccgccaagaccaccagcaagaacagcagcatcgccgacctgagactgaaggccaagaagcacgccgccgccctgggcctgtag

SEQ ID NO: 98854 - DNA, 996 bp, synthetic construct
  misc_feature 1..996: note = Description of Artificial Sequence: Synthetic coding sequence
  source 1..996: mol_type = other DNA
atggaggagctgaccgccttcgtgagcaagagcttcgaccagaaggtgaaggagaagaaggaggccatcacctacagagaggtgctggagagcggccccctgagaggcgccaaggagcccaccggctgcaccgaggccggcagagacgacagaagcagccccgccgtgagagccgccggcggcggcggcggcggcggcggcggcggcggcggcggcggcggcggcggcggcgtgggcggcggcggcgccggcggcggcgccggcggcggcagaagccccgtgagagagctggacatgggcgccgccgagagaagcagagagcccggcagccccagactgaccgaggtgagccccgagctgaaggacagaaaggaggacgccaagggcatggaggacgagggccagaccaagatcaagcagagaagaagcagaaccaacttcaccctggagcagctgaacgagctggagagactgttcgacgagacccactaccccgacgccttcatgagagaggagctgagccagagactgggcctgagcgaggccagagtgcaggtgtggttccagaacagaagagccaagtgcagaaagcaggagaaccagctgcacaagggcgtgctgatcggcgccgccagccagttcgaggcctgcagagtggccccctacgtgaacgtgggcgccctgagaatgcccttccagcaggacagccactgcaacgtgacccccctgagcttccaggtgcaggcccagctgcagctggacagcgccgtggcccacgcccaccaccacctgcacccccacctggccgcccacgccccctacatgatgttccccgccccccccttcggcctgcccctggccaccctggccgccgacagcgccagcgccgccagcgtggtggccgccgccgccgccgccaagaccaccagcaagaacagcagcatcgccgacctgagactgaaggccaagaagcacgccgccgccctgggcctgtag

SEQ ID NO: 98855 - DNA, 1068 bp, synthetic construct
  misc_feature 1..1068: note = Description of Artificial Sequence: Synthetic coding sequence
  source 1..1068: mol_type = other DNA
atggaggagctgaccgccttcgtgagcaagagcttcgaccagaaggtgaaggagaagaaggaggccatcacctacagagaggtgctggagagcggccccctgagaggcgccaaggagcccaccggctgcaccgaggccggcagagacgacagaagcagccccgccgtgagagccgccggcggcggcggcggcggcggcggcggcggcggcggcggcggcggcggcggcggcgtgggcggcggcggcgccggcggcggcgccggcggcggcagaagccccgtgagagagctggacatgggcgccgccgagagaagcagagagcccggcagccccagactgaccgagggcagaagaaagcccaccaaggccgaggtgcaggccaccctgctgctgcccggcgaggccttcagattcctggtgagccccgagctgaaggacagaaaggaggacgccaagggcatggaggacgagggccagaccaagatcaagcagagaagaagcagaaccaacttcaccctggagcagctgaacgagctggagagactgttcgacgagacccactaccccgacgccttcatgagagaggagctgagccagagactgggcctgagcgaggccagagtgcaggtgtggttccagaacagaagagccaagtgcagaaagcaggagaaccagctgcacaagggcgtgctgatcggcgccgccagccagttcgaggcctgcagagtggccccctacgtgaacgtgggcgccctgagaatgcccttccagcaggacagccactgcaacgtgacccccctgagcttccaggtgcaggcccagctgcagctggacagcgccgtggcccacgcccaccaccacctgcacccccacctggccgcccacgccccctacatgatgttccccgccccccccttcggcctgcccctggccaccctggccgccgacagcgccagcgccgccagcgtggtggccgccgccgccgccgccaagaccaccagcaagaacagcagcatcgccgacctgagactgaaggccaagaagcacgccgccgccctgggcctgtag

SEQ ID NO: 98856 - DNA, 573 bp, synthetic construct; identical to SEQ ID NO: 98853
  misc_feature 1..573: note = Description of Artificial Sequence: Synthetic coding sequence
  source 1..573: mol_type = other DNA

SEQ ID NO: 98857 - DNA, 573 bp, synthetic construct; identical to SEQ ID NO: 98853
  misc_feature 1..573: note = Description of Artificial Sequence: Synthetic coding sequence
  source 1..573: mol_type = other DNA

SEQ ID NO: 98858 - DNA, 1734 bp, synthetic construct
  misc_feature 1..1734: note = Description of Artificial Sequence: Synthetic coding sequence
  source 1..1734: mol_type = other DNA
atgctgacccccgccttcgacctgagccaggaccccgacttcctgaccatcgccatcagagtgccctacgccagagtgagcgagttcgacgtgtacttcgagggcagcgacttcaagttctacgccaagccctacttcctgagactgaccctgcccggcagaatcgtggagaacggcagcgagcagggcagctacgacgccgacaagggcatcttcaccatcagactgcccaaggagacccccggccagcacttcgagggcctgaacatgctgaccgccctgctggcccccagaaagagcagaaccgccaagcccctggtggaggagatcggcgccagcgagatccccgaggaggtggtggacgacgaggagttcgactgggagatcgagcagaccccctgcgaggaggtgagcgagagcgccctgaacccccagtgccactacggcttcggcaacctgagaagcggcgtgctgcagagactgcaggacgagctgagcgacgtgatcgacatcaaggaccccgacttcacccccgccgccgagagaagacagaagagactggccgccgagctggccaagttcgaccccgaccactacctggccgacttcttcgaggacgaggccatcgagcagatcctgaagtacaacccctggtggaccgacaagtacagcaagatgatggccttcctggagaagagccaggagcaggagaaccacgccaccctggtgagcttcagcgaggaggagaagtaccagctgagaaagttcgtgaacaagagctacctgctggacaagagagcctgcagacaggtgtgctacagcctgatcgacatcctgctggcctactgctacgagaccagagtgaccgagggcgagaagaacgtggagagcgcctggaacatcagaaagctgagccccaccctgtgctggttcgagacctggaccaacgtgcacgacatcatggtgagcttcggcagaagagtgctgtgctaccccctgtacagacacttcaagctggtgatgaaggcctacagagacaccatcaagatcctgcagctgggcaagagcgccgtgctgaagtgcctgctggacatccacaagatcttccaggagaacgaccccgcctacatcctgaacgacctgtacatcagcgactactgcgtgtggatccagaaggtgaagagcaagaagctggccgccctggccgaggccctgaaggaggtgagcctgaccaaggcccagctgggcctggagctggaggagctggaggccgccgccctgctggtgcaggaggaggagaccgccctgaaggccgcccacagcgtgagcggccagcagaccctgtgcagcagcagcgaggccagcgacagcgaggacagcgacagcagcgtgagcagcggcaacgaggacagcggcagcgacagcgagcaggacgagctgaaggacagccccagcgagaccgtgagcagcctgcagggccccttcctggaggagagcagcgccttcctgatcgtggacggcggcgtgagaagaaacaccgccatccaggagagcgacgccagccagggcaagcccctggccagcagctggcccctgggcgtgagcggccccctgatcgaggagctgggcgagcagctgaagaccaccgtgcaggtgagcgagcccaagggcaccaccgccgtgaacagaagcaacatccaggagagagacggctgccagacccccaacaactag

SEQ ID NO: 98859 - DNA, 4851 bp, synthetic construct
  misc_feature 1..4851: note = Description of Artificial Sequence: Synthetic coding sequence
  source 1..4851: mol_type = other DNA
atggagggcgccgagcccagagccagacccgagagactggccgaggccgagaccagagccgccgacggcggcagactggtggaggtgcagctgagcggcggcgccccctggggcttcaccctgaagggcggcagagagcacggcgagcccctggtgatcaccaagatcgaggagggcagcaaggccgccgccgtggacaagctgctggccggcgacgagatcgtgggcatcaacgacatcggcctgagcggcttcagacaggaggccatctgcctggtgaagggcagccacaagaccctgaagctggtggtgaagagaagaagcgagctgggctggagaccccacagctggcacgccaccaagttcagcgacagccaccccgagctggccgccagccccttcaccagcaccagcggctgccccagctggagcggcagacaccacgccagcagcagcagccacgacctgagcagcagctgggagcagaccaacctgcagagaaccctggaccacttcagcagcctgggcagcgtggacagcctggaccaccccagcagcagactgagcgtggccaagagcaacagcagcatcgaccacctgggcagccacagcaagagagacagcgcctacggcagcttcagcaccagcagcagcacccccgaccacaccctgagcaaggccgacaccagcagcgccgagaacatcctgtacaccgtgggcctgtgggaggcccccagacagggcggcagacaggcccaggccgccggcgacccccagggcagcgaggagaagctgagctgcttcccccccagagtgcccggcgacagcggcaagggccccagacccgagtacaacgccgagcccaagctggccgcccccggcagaagcaacttcggccccgtgtggtacgtgcccgacaagaagaaggcccccagcagccccccccccccccccccccccctgagaagcgacagcttcgccgccaccaagagccacgagaaggcccagggccccgtgttcagcgaggccgccgccgcccagcacttcaccgccctggcccaggcccagcccagaggcgacagaagacccgagctgaccgacagaccctggagaagcgcccaccccggcagcctgggcaagggcagcggcggccccggctgcccccaggaggcccacgccgacggcagctggccccccagcaaggacggcgccagcagcagactgcaggccagcctgagcagcagcgacgtgagattcccccagagcccccacagcggcagacacccccccctgtacagcgaccacagccccctgtgcgccgacagcctgggccaggagcccggcgccgccagcttccagaacgacagccccccccaggtgagaggcctgagcagctgcgaccagaagctgggcagcggctggcagggccccagaccctgcgtgcagggcgacctgcaggccgcccagctgtgggccggctgctggcccagcgacaccgccctgggcgccctggagagcctgcccccccccaccgtgggccagagccccagacaccacctgccccagcccgagggcccccccgacgccagagagaccggcagatgctaccccctggacaagggcgccgagggctgcagcgccggcgcccaggagccccccagagccagcagagccgagaaggccagccagagactggccgccagcatcacctgggccgacggcgagagcagcagaatctgcccccaggagacccccctgctgcacagcctgacccaggagggcaagagaagacccgagagcagccccgaggacagcgccaccagacccccccccttcgacgcccacgtgggcaagcccaccagaagaagcgacagattcgccaccaccctgagaaacgagatccagatgcacagagccaagctgcagaagagcagaagcaccgtggccctgaccgccgccggcgaggccgaggacggcaccggcagatggagagccggcctgggcggcggcacccaggagggccccctggccggcacctacaaggaccacctgaaggaggcccaggccagagtgctgagagccaccagcttcaagagaagagacctggaccccaaccccggcgacctgtaccccgagagcctggagcacagaatgggcgaccccgacaccgtgccccacttctgggaggccggcctggcccagccccccagcagcaccagcggcggcccccacccccccagaatcggcggcagaagaagattcaccgccgagcagaagctgaagagctacagcgagcccgagaagatgaacgaggtgggcctgaccagaggctacagcccccaccagcaccccagaaccagcgaggacaccgtgggcaccttcgccgacagatggaagttcttcgaggagaccagcaagcccgtgccccagagacccgcccagaagcaggccctgcacggcatccccagagacaagcccgagagacccagaaccgccggcagaacctgcgagggcaccgagccctggagcagaaccaccagcctgggcgacagcctgaacgcccacagcgccgccgagaaggccggcaccagcgacctgcccagaagactgggcaccttcgccgagtaccaggccagctggaaggagcagagaaagcccctggaggccagaagcagcggcagatgccacagcgccgacgacatcctggacgtgagcctggacccccaggagagaccccagcacgtgcacggcagaagcagaagcagccccagcaccgaccactacaagcaggaggccagcgtggagctgagaagacaggccggcgaccccggcgagcccagagaggagctgcccagcgccgtgagagccgaggagggccagagcacccccagacaggccgacgcccagtgcagagagggcagccccggcagccagcagcacccccccagccagaaggcccccaacccccccaccttcagcgagctgagccactgcagaggcgcccccgagctgcccagagagggcagaggcagagccggcaccctgcccagagactacagatacagcgaggagagcacccccgccgacctgggccccagagcccagagccccggcagccccctgcacgccagaggccaggacagctggcccgtgagcagcgccctgctgagcaagagacccgccccccagagaccccccccccccaagagagagcccagaagatacagagccaccgacggcgcccccgccgacgcccccgtgggcgtgctgggcagacccttccccacccccagccccgccagcctggacgtgtacgtggccagactgagcctgagccacagccccagcgtgttcagcagcgcccagccccaggacacccccaaggccaccgtgtgcgagagaggcagccagcacgtgagcggcgacgccagcagacccctgcccgaggccctgctgccccccaagcagcagcacctgagactgcagaccgccaccatggagaccagcagaagccccagcccccagttcgccccccagaagctgaccgacaagccccccctgctgatccaggacgaggacagcaccagaatcgagagagtgatggacaacaacaccaccgtgaagatggtgcccatcaagatcgtgcacagcgagagccagcccgagaaggagagcagacagagcctggcctgccccgccgagccccccgccctgccccacggcctggagaaggaccagatcaagaccctgagcaccagcgagcagttctacagcagattctgcctgtacaccagacagggcgccgagcccgaggccccccacagagcccagcccgccgagccccagcccctgggcacccaggtgccccccgagaaggacagatgcaccagcccccccggcctgagctacatgaaggccaaggagaagaccgtggaggacctgaagagcgaggagctggccagagagatcgtgggcaaggacaagagcctggccgacatcctggaccccagcgtgaagatcaagaccaccatggacctgatggagggcatcttccccaaggacgagcacctgctggaggaggcccagcagagaagaaagctgctgcccaagatccccagccccagaagcaccgaggagagaaaggaggagcccagcgtgcccgccgccgtgagcctggccaccaacagcacctactacagcaccagcgcccccaaggccgagctgctgatcaagatgaaggacctgcaggagcagcaggagcacgaggaggacagcggcagcgacctggaccacgacctgagcgtgaagaagcaggagctgatcgagagcatcagcagaaagctgcaggtgctgagagaggccagagagagcctgctggaggacgtgcaggccaacaccgtgctgggcgccgaggtggaggccatcgtgaagggcgtgtgcaagcccagcgagttcgacaagttcagaatgttcatcggcgacctggacaaggtggtgaacctgctgctgagcctgagcggcagactggccagagtggagaacgccctgaacaacctggacgacggcgccagccccggcgacagacagagcctgctggagaagcagagagtgctgatccagcagcacgaggacgccaaggagctgaaggagaacctggacagaagagagagaatcgtgttcgacatcctggccaactacctgagcgaggagagcctggccgactacgagcacttcgtgaagatgaagagcgccctgatcatcgagcagagagagctggaggacaagatccacctgggcgaggagcagctgaagtgcctgctggacagcctgcagcccgagagaggcaagtag

SEQ ID NO: 98860 - DNA, 1356 bp, synthetic construct
  misc_feature 1..1356: note = Description of Artificial Sequence: Synthetic coding sequence
  source 1..1356: mol_type = other DNA
atggagaccagcagaagccccagcccccagttcgccccccagaagctgaccgacaagccccccctgctgatccaggacgaggacagcaccagaatcgagagagtgatggacaacaacaccaccgtgaagatggtgcccatcaagatcgtgcacagcgagagccagcccgagaaggagagcagacagagcctggcctgccccgccgagccccccgccctgccccacggcctggagaaggaccagatcaagaccctgagcaccagcgagcagttctacagcagattctgcctgtacaccagacagggcgccgagcccgaggccccccacagagcccagcccgccgagccccagcccctgggcacccaggtgccccccgagaaggacagatgcaccagcccccccggcctgagctacatgaaggccaaggagaagaccgtggaggacctgaagagcgaggagctggccagagagatcgtgggcaaggacaagagcctggccgacatcctggaccccagcgtgaagatcaagaccaccatggacctgatggagggcatcttccccaaggacgagcacctgctggaggaggcccagcagagaagaaagctgctgcccaagatccccagccccagaagcaccgaggagagaaaggaggagcccagcgtgcccgccgccgtgagcctggccaccaacagcacctactacagcaccagcgcccccaaggccgagctgctgatcaagatgaaggacctgcaggagcagcaggagcacgaggaggacagcggcagcgacctggaccacgacctgagcgtgaagaagcaggagctgatcgagagcatcagcagaaagctgcaggtgctgagagaggccagagagagcctgctggaggacgtgcaggccaacaccgtgctgggcgccgaggtggaggccatcgtgaagggcgtgtgcaagcccagcgagttcgacaagttcagaatgttcatcggcgacctggacaaggtggtgaacctgctgctgagcctgagcggcagactggccagagtggagaacgccctgaacaacctggacgacggcgccagccccggcgacagacagagcctgctggagaagcagagagtgctgatccagcagcacgaggacgccaaggagctgaaggagaacctggacagaagagagagaatcgtgttcgacatcctggccaactacctgagcgaggagagcctggccgactacgagcacttcgtgaagatgaagagcgccctgatcatcgagcagagagagctggaggacaagatccacctgggcgaggagcagctgaagtgcctgctggacagcctgcagcccgagagaggcaagtag

SEQ ID NO: 98861 - DNA, 1128 bp, synthetic construct
  misc_feature 1..1128: note = Description of Artificial Sequence: Synthetic coding sequence
  source 1..1128: mol_type = other DNA
atggagaccagcagaagccccagcccccagttcgccccccagaagctgaccgacaagccccccctgctgatccaggacgaggacagcaccagaatcgagagagtgatggacaacaacaccaccgtgaagatggtgcccatcaagatcgtgcacagcgagagccagcccgagaaggagagcagacagagcctggcctgccccgccgagccccccgccctgccccacggcctggagaaggaccagatcaagaccctgagcaccagcgagcagttctacagcagattctgcctgtacaccagacagggcgccgagcccgaggccccccacagagcccagcccgccgagccccagcccctgggcacccaggtgccccccgagaaggacagatgcaccagcccccccggcctgagctacatgaaggccaaggagaagaccgtggaggacctgaagagcgaggagctggccagagagatcgtgggcaaggacaagagcctggccgacatcctggaccccagcgtgaagatcaagaccaccatggacctgatggagggcatcttccccaaggacgagcacctgctggaggaggcccagcagagaagaaagctgctgcccaagatccccagccccagaagcaccgaggagagaaaggaggagcccagcgtgcccgccgccgtgagcctggccaccaacagcacctactacagcaccagcgcccccaaggccgagctgctgatcaagatgaaggacctgcaggagcagcaggagcacgaggaggacagcggcagcgacctggaccacgacctgagcgtgaagaagcaggagctgatcgagagcatcagcagaaagctgcaggtgctgagagaggccagagagagcctgctggaggacgtgcaggccaacaccgtgctgggcgccgaggtggaggccatcgtgaagggcgtgtgcaagcccagcgagttcgacaagttcagaatgttcatcggcgacctggacaaggtggtgaacctgctgctgagcctgagcggcagactggccagagtggagaacgccctgaacaacctggacgacggcgccagccccggcgacagacagagcctgctggagaagcagagagtgctgatccagtag

SEQ ID NO: 98862 - DNA, 1203 bp, synthetic construct
  misc_feature 1..1203: note = Description of Artificial Sequence: Synthetic coding sequence
  source 1..1203: mol_type = other DNA
atggagaccagcagaagccccagcccccagttcgccccccagaagctgaccgacaagccccccctgctgatccaggacgaggacagcaccagaatcgagagagtgatggacaacaacaccaccgtgaagatggtgcccatcaagatcgtgcacagcgagagccagcccgagaaggagagcagacagagcctggcctgccccgccgagccccccgccctgccccacggcctggagaaggaccagatcaagaccctgagcaccagcgagcagttctacagcagattctgcctgtacaccagacagggcgccgagcccgaggccccccacagagcccagcccgccgagccccagcccctgggcacccaggtgccccccgagaaggacagatgcaccagcccccccggcctgagctacatgaaggccaaggagaagaccgtggaggacctgaagagcgaggagctggccagagagatcgtgggcaaggacaagagcctggccgacatcctggaccccagcgtgaagatcaagaccaccatggacctgatggagggcatcttccccaaggacgagcacctgctggaggaggcccagcagagaagaaagctgctgcccaagatccccagccccagaagcaccgaggagagaaaggaggagcccagcgtgcccgccgccgtgagcctggccaccaacagcacctactacagcaccagcgcccccaaggccgagctgctgatcaagatgaaggacctgcaggagcagcaggagcacgaggaggacagcggcagcgacctggaccacgacctgagcgtgaagaagcaggagctgatcgagagcatcagcagaaagctgcaggtgctgagagaggccagagagagcctgctggaggacgtgcaggccaacaccgtgctgggcgccgaggtggaggccatcgtgaagggcgtgtgcaagcccagcgagttcgacaagttcagaatgttcatcggcgacctggacaaggtggtgaacctgctgctgagcctgagcggcagactggccagagtggagaacgccctgaacaacctggacgacggcgccagccccggcgacagacagagcctgctggagaagcagagagtgctgatccagcagatgtgcgtggacttcatgctggacacctaccacagccccatcaacagaagcagctgcctgaccgtgaccaagtag

SEQ ID NO: 98863 - DNA, 777 bp, synthetic construct
  misc_feature 1..777: note = Description of Artificial Sequence: Synthetic coding sequence
  source 1..777: mol_type = other DNA
atgagagagagagccccccccccccccccccccagccaggagacccccgtgtacagcatggacgacttcccccccccccccccccacaccgtgtgcgaggcccagctggacagcgaggaccccgagggccccagacccagcttcaacaagctgagcaaggtgaccatcgccagagagagacacatgcccggcgccgcccacgtggtgggcagccagaccctggccagcagactgcagaccagcatcaagggcagcgaggccgagagcaccccccccagcttcatgagcgtgcacgcccagctggccggcagcctgggcggccagcccgcccccatccagacccagagcctgagccacgaccccgtgagcggcacccagggcctggagaagaaggtgagccccgacccccagaagagcagcgaggacatcagaaccgaggccctggccaaggagatcgtgcaccaggacaagagcctggccgacatcctggaccccgacagcagactgaagaccaccatggacctgatggagggcctgttccccagagacgtgaacctgctgaaggagaacagcgtgaagagaaaggccatccagagaaccgtgagcagcagcggctgcgagggcaagagaaacgaggacaaggaggccgtgagcatgctggtgaactgcccccagatcagcttccccagactgggcccctggctgtgcccccagaccagcagagtgagccccttcctgctgggcgccgtgctgagcgtggtgttcagccagcactag

SEQ ID NO: 98864 - DNA, 5991 bp, synthetic construct
  misc_feature 1..5991: note = Description of Artificial Sequence: Synthetic coding sequence
  source 1..5991: mol_type = other DNA
atgatgagaaccaccgaggacttccacaagcccagcgccaccctgaacagcaacaccgccaccaagggcagatacatctacctggaggccttcctggagggcggcgccccctggggcttcaccctgaagggcggcctggagcacggcgagcccctgatcatcagcaaggtggaggagggcggcaaggccgacaccctgagcagcaagctgcaggccggcgacgaggtggtgcacatcaacgaggtgaccctgagcagcagcagaaaggaggccgtgagcctggtgaagggcagctacaagaccctgagactggtggtgagaagagacgtgtgcaccgaccccggccacgccgacaccggcgccagcaacttcgtgagccccgagcacctgaccagcggcccccagcacagaaaggccgcctggagcggcggcgtgaagctgagactgaagcacagaagaagcgagcccgccggcagaccccacagctggcacaccaccaagagcggcgagaagcagcccgacgccagcatgatgcagatcagccagggcatgatcggccccccctggcaccagagctaccacagcagcagcagcaccagcgacctgagcaactacgaccacgcctacctgagaagaagccccgaccagtgcagcagccagggcagcatggagagcctggagcccagcggcgcctaccccccctgccacctgagccccgccaagagcaccggcagcatcgaccagctgagccacttccacaacaagagagacagcgcctacagcagcttcagcaccagcagcagcatcctggagtacccccaccccggcatcagcggcagagagagaagcggcagcatggacaacaccagcgccagaggcggcctgctggagggcatgagacaggccgacatcagatacgtgaagaccgtgtacgacaccagaagaggcgtgagcgccgagtacgaggtgaacagcagcgccctgctgctgcagggcagagaggccagagccagcgccaacggccagggctacgacaagtggagcaacatccccagaggcaagggcgtgcccccccccagctggagccagcagtgccccagcagcctggagaccgccaccgacaacctgccccccaaggtgggcgcccccctgccccccgccagaagcgacagctacgccgccttcagacacagagagagacccagcagctggagcagcctggaccagaagagactgtgcagaccccaggccaacagcctgggcagcctgaagagccccttcatcgaggagcagctgcacaccgtgctggagaagagccccgagaacagcccccccgtgaagcccaagcacaactacacccagaaggcccagcccggccagcccctgctgcccaccagcatctaccccgtgcccagcctggagccccacttcgcccaggtgccccagcccagcgtgagcagcaacggcatgctgtaccccgccctggccaaggagagcggctacatcgccccccagggcgcctgcaacaagatggccaccatcgacgagaacggcaaccagaacggcagcggcagacccggcttcgccttctgccagcccctggagcacgacctgctgagccccgtggagaagaagcccgaggccaccgccaagtacgtgcccagcaaggtgcacttctgcagcgtgcccgagaacgaggaggacgccagcctgaagagacacctgacccccccccagggcaacagcccccacagcaacgagagaaagagcacccacagcaacaagcccagcagccacccccacagcctgaagtgcccccaggcccaggcctggcaggccggcgaggacaagagaagcagcagactgagcgagccctgggagggcgacttccaggaggaccacaacgccaacctgtggagaagactggagagagagggcctgggccagagcctgagcggcaacttcggcaagaccaagagcgccttcagcagcctgcagaacatccccgagagcctgagaagacacagcagcctggagctgggcagaggcacccaggagggctaccccggcggcagacccacctgcgccgtgaacaccaaggccgaggaccccggcagaaaggccgcccccgacctgggcagccacctggacagacaggtgagctaccccagacccgagggcagaaccggcgccagcgccagcttcaacagcaccgaccccagccccgaggagccccccgcccccagccacccccacaccagcagcctgggcagaagaggccccggccccggcagcgccagcgccctgcagggcttccagtacggcaagccccactgcagcgtgctggagaaggtgagcaagttcgagcagagagagcagggcagccagagacccagcgtgggcggcagcggcttcggccacaactacagaccccacagaaccgtgagcaccagcagcaccagcggcaacgacttcgaggagaccaaggcccacatcagattcagcgagagcgccgagcccctgggcaacggcgagcagcacttcaagaacggcgagctgaagctggaggaggccagcagacagccctgcggccagcagctgagcggcggcgccagcgacagcggcagaggcccccagagacccgacgccagactgctgagaagccagagcaccttccagctgagcagcgagcccgagagagagcccgagtggagagacagacccggcagccccgagagccccctgctggacgcccccttcagcagagcctacagaaacagcatcaaggacgcccagagcagagtgctgggcgccaccagcttcagaagaagagacctggagctgggcgcccccgtggccagcagaagctggagacccagacccagcagcgcccacgtgggcctgagaagccccgaggccagcgccagcgccagcccccacacccccagagagagacacagcgtgacccccgccgagggcgacctggccagacccgtgccccccgccgccagaagaggcgccagaagaagactgacccccgagcagaagaagagaagctacagcgagcccgagaagatgaacgaggtgggcatcgtggaggaggccgagcccgcccccctgggcccccagagaaacggcatgagattccccgagagcagcgtggccgacagaagaagactgttcgagagagacggcaaggcctgcagcaccctgagcctgagcggccccgagctgaagcagttccagcagagcgccctggccgactacatccagagaaagaccggcaagagacccaccagcgccgccggctgcagcctgcaggagcccggccccctgagagagagagcccagagcgcctacctgcagcccggccccgccgccctggagggcagcggcctggccagcgccagcagcctgagcagcctgagagagcccagcctgcagcccagaagagaggccaccctgctgcccgccaccgtggccgagacccagcaggcccccagagacagaagcagcagcttcgccggcggcagaagactgggcgagagaagaagaggcgacctgctgagcggcgccaacggcggcaccagaggcacccagagaggcgacgagacccccagagagcccagcagctggggcgccagagccggcaagagcatgagcgccgaggacctgctggagagaagcgacgtgctggccggccccgtgcacgtgagaagcagaagcagccccgccaccgccgacaagagacaggacgtgctgctgggccaggacagcggcttcggcctggtgaaggacccctgctacctggccggccccggcagcagaagcctgagctgcagcgagagaggccaggaggagatgctgcccctgttccaccacctgacccccagatggggcggcagcggctgcaaggccatcggcgacagcagcgtgcccagcgagtgccccggcaccctggaccaccagagacaggccagcagaaccccctgccccagaccccccctggccggcacccagggcctggtgaccgacaccagagccgcccccctgacccccatcggcacccccctgcccagcgccatccccagcggctactgcagccaggacggccagaccggcagacagcccctgcccccctacacccccgccatgatgcacagaagcaacggccacaccctgacccagccccccggccccagaggctgcgagggcgacggccccgagcacggcgtggaggagggcaccagaaagagagtgagcctgccccagtggcccccccccagcagagccaagtgggcccacgccgccagagaggacagcctgcccgaggagagcagcgcccccgacttcgccaacctgaagcactaccagaagcagcagagcctgcccagcctgtgcagcaccagcgaccccgacacccccctgggcgcccccagcacccccggcagaatcagcctgagaatcagcgagagcgtgctgagagacagcccccccccccacgaggactacgaggacgaggtgttcgtgagagacccccaccccaaggccaccagcagccccaccttcgagcccctgccccccccccccccccccccccccagccaggagacccccgtgtacagcatggacgacttcccccccccccccccccacaccgtgtgcgaggcccagctggacagcgaggaccccgagggccccagacccagcttcaacaagctgagcaaggtgaccatcgccagagagagacacatgcccggcgccgcccacgtggtgggcagccagaccctggccagcagactgcagaccagcatcaagggcagcgaggccgagagcaccccccccagcttcatgagcgtgcacgcccagctggccggcagcctgggcggccagcccgcccccatccagacccagagcctgagccacgaccccgtgagcggcacccagggcctggagaagaaggtgagccccgacccccagaagagcagcgaggacatcagaaccgaggccctggccaaggagatcgtgcaccaggacaagagcctggccgacatcctggaccccgacagcagactgaagaccaccatggacctgatggagggcctgttccccagagacgtgaacctgctgaaggagaacagcgtgaagagaaaggccatccagagaaccgtgagcagcagcggctgcgagggcaagagaaacgaggacaaggaggccgtgagcatgctggtgaactgccccgcctactacagcgtgagcgcccccaaggccgagctgctgaacaagatcaaggagatgcccgccgaggtgaacgaggaggaggagcaggccgacgtgaacgagaagaaggccgagctgatcggcagcctgacccacaagctggagaccctgcaggaggccaagggcagcctgctgaccgacatcaagctgaacaacgccctgggcgaggaggtggaggccctgatcagcgagctgtgcaagcccaacgagttcgacaagtacagaatgttcatcggcgacctggacaaggtggtgaacctgctgctgagcctgagcggcagactggccagagtggagaacgtgctgagcggcctgggcgaggacgccagcaacgaggagagaagcagcctgtacgagaagagaaagatcctggccggccagcacgaggacgccagagagctgaaggagaacctggacagaagagagagagtggtgctgggcatcctggccaactacctgagcgaggagcagctgcaggactaccagcacttcgtgaagatgaagagcaccctgctgatcgagcagagaaagctggacgacaagatcaagctgggccaggagcaggtgaagtgcctgctggagagcctgcccagcgacttcatccccaaggccggcgccctggccctgccccccaacctgaccagcgagcccatccccgccggcggctgcaccttcagcggcatcttccccaccctgaccagccccctgtag

SEQ ID NO: 98865 - DNA, 561 bp, synthetic construct
  misc_feature 1..561: note = Description of Artificial Sequence: Synthetic coding sequence
  source 1..561: mol_type = other DNA
atggccttctacagcaccaccgagtacgacatccagctggccagaggcctgctgagcggcatgttcctgttcgccaccagaagaagcgagcccgccggcagaccccacagctggcacaccaccaagagcggcgagaagcagcccgacgccagcatgatgcagatcagccagggcatgatcggccccccctggcaccagagctaccacagcagcagcagcaccagcgacctgagcaactacgaccacgcctacctgagaagaagccccgaccagtgcagcagccagggcagcatggagagcctggagcccagcggcgcctaccccccctgccacctgagccccgccaagagcaccggcagcatcgaccagctgagccacttccacaacaagagagacagcgcctacagcagcttcagcaccagcagcagcatcctggagtacccccaccccggcaagagagtgaagaccagagacctgcccggcagccagagccccggcagagccatcagcagaaagaccaccatgcccaccagcggcggcggctggagagagaaggcctag

SEQ ID NO: 98866 - DNA, 4482 bp, synthetic construct
  misc_feature 1..4482: note = Description of Artificial Sequence: Synthetic coding sequence
  source 1..4482: mol_type = other DNA
atggagaacagacccggcagcttccagtacgtgcccgtgcagctgcagggcggcgccccctggggcttcaccctgaagggcggcctggagcactgcgagcccctgaccgtgagcaagatcgaggacggcggcaaggccgccctgagccagaagatgagaaccggcgacgagctggtgaacatcaacggcacccccctgtacggcagcagacaggaggccctgatcctgatcaagggcagcttcagaatcctgaagctgatcgtgagaagaagaaacgcccccgtgagcagaccccacagctggcacgtggccaagctgctggagggctgccccgaggccgccaccaccatgcacttccccagcgaggccttcagcctgagctggcacagcggctgcaacaccagcgacgtgtgcgtgcagtggtgccccctgagcagacactgcagcaccgagaagagcagcagcatcggcagcatggagagcctggagcagcccggccaggccacctacgagagccacctgctgcccatcgaccagaacatgtaccccaaccagagagacagcgcctacagcagcttcagcgccagcagcaacgccagcgactgcgccctgagcctgagacccgaggagcccgccagcaccgactgcatcatgcagggccccggccccaccaaggcccccagcggcagacccaacgtggccgagaccagcggcggcagcagaagaaccaacggcggccacctgacccccagcagccagatgagcagcagaccccaggagggctaccagagcggccccgccaaggccgtgagaggccccccccagccccccgtgagaagagacagcctgcaggccagcagagcccagctgctgaacggcgagcagagaagagccagcgagcccgtggtgcccctgccccagaaggagaagctgagcctggagcccgtgctgcccgccagaaaccccaacagattctgctgcctgagcggccacgaccaggtgaccagcgagggccaccagaactgcgagttcagccagccccccgagagcagccagcagggcagcgagcacctgctgatgcaggccagcaccaaggccgtgggcagccccaaggcctgcgacagagccagcagcgtggacagcaaccccctgaacgaggccagcgccgagctggccaaggccagcttcggcagacccccccacctgatcggccccaccggccacagacacagcgcccccgagcagctgctggccagccacctgcagcacgtgcacctggacaccagaggcagcaagggcatggagctgccccccgtgcaggacggccaccagtggaccctgagccccctgcacagcagccacaagggcaagaagagcccctgcccccccaccggcggcacccacgaccagagcagcaaggagagaaagaccagacaggtggacgacagaagcctggtgctgggccaccagagccagagcagccccccccacggcgaggccgacggccaccccagcgagaagggcttcctggaccccaacagaaccagcagagccgccagcgagctggccaaccagcagcccagcgccagcggcagcctggtgcagcaggccaccgactgcagcagcaccaccaaggccgccagcggcaccgaggccggcgaggagggcgacagcgagcccaaggagtgcagcagaatgggcggcagaagaagcggcggcaccagaggcagaagcatccagaacagaagaaagagcgagagattcgccaccaacctgagaaacgagatccagagaagaaaggcccagctgcagaagagcaagggccccctgagccagctgtgcgacaccaaggagcccgtggaggagacccaggagccccccgagagcccccccctgaccgccagcaacaccagcctgctgagcagctgcaagaagccccccagccccagagacaagctgttcaacaagagcatgatgctgagagccagaagcagcgagtgcctgagccaggcccccgagagccacgagagcagaaccggcctggagggcagaatcagccccggccagagacccggccagagcagcctgggcctgaacacctggtggaaggcccccgaccccagcagcagcgaccccgagaaggcccacgcccactgcggcgtgagaggcggccactggagatggagccccgagcacaacagccagcccctggtggccgccgccatggagggccccagcaaccccggcgacaacaaggagctgaaggccagcaccgcccaggccggcgaggacgccatcctgctgcccttcgccgacagaagaaagttcttcgaggagagcagcaagagcctgagcaccagccacctgcccggcctgaccacccacagcaacaagaccttcacccagagacccaagcccatcgaccagaacttccagcccatgagcagcagctgcagagagctgagaagacaccccatggaccagagctaccacagcgccgaccagccctaccacgccaccgaccagagctaccacagcatgagccccctgcagagcgagacccccacctacagcgagtgcttcgccagcaagggcctggagaacagcatgtgctgcaagcccctgcactgcggcgacttcgactaccacagaacctgcagctacagctgcagcgtgcagggcgccctggtgcacgacccctgcatctactgcagcggcgagatctgccccgccctgctgaagagaaacatgatgcccaactgctacaactgcagatgccaccaccaccagtgcatcagatgcagcgtgtgctaccacaacccccagcacagcgccctggaggacagcagcctggcccccggcaacacctggaagcccagaaagctgaccgtgcaggagttccccggcgacaagtggaaccccatcaccggcaacagaaagaccagccagagcggcagagagatggcccacagcaagaccagcttcagctgggccacccccttccacccctgcctggagaaccccgccctggacctgagcagctacagagccatcagcagcctggacctgctgggcgacttcaagcacgccctgaagaagagcgaggagaccagcgtgtacgaggagggcagcagcctggccagcatgccccaccccctgagaagcagagccttcagcgagagccacatcagcctggccccccagagcaccagagcctggggccagcacagaagagagctgttcagcaagggcgacgagacccagagcgacctgctgggcgccagaaagaaggccttccccccccccagaccccccccccccaactgggagaagtacagactgttcagagccgcccagcagcagaagcagcagcagcagcagcagaagcagcaggaggaggaggaggaggaggaggaggaggaggaggaggaggaggaggaggaggaggaggaggccgaggaggaggaggaggagctgcccccccagtacttcagcagcgagaccagcggcagctgcgccctgaaccccgaggaggtgctggagcagccccagcccctgagcttcggccacctggagggcagcagacagggcagccagagcgtgcccgccgagcaggagagcttcgccctgcacagcagcgacttcctgccccccatcagaggccacctgggcagccagcccgagcaggcccagcccccctgctactacggcatcggcggcctgtggagaaccagcggccaggaggccaccgagagcgccaagcaggagttccagcacttcagcccccccagcggcgcccccggcatccccaccagctacagcgcctactacaacatcagcgtggccaaggccgagctgctgaacaagctgaaggaccagcccgagatggccgagatcggcctgggcgaggaggaggtggaccacgagctggcccagaagaagatccagctgatcgagagcatcagcagaaagctgagcgtgctgagagaggcccagagaggcctgctggaggacatcaacgccaacagcgccctgggcgaggaggtggaggccaacctgaaggccgtgtgcaagagcaacgagttcgagaagtaccacctgttcgtgggcgacctggacaaggtggtgaacctgctgctgagcctgagcggcagactggccagagtggagaacgccctgaacagcatcgacagcgaggccaaccaggagaagctggtgctgatcgagaagaagcagcagctgaccggccagctggccgacgccaaggagctgaaggagcacgtggacagaagagagaagctggtgttcggcatggtgagcagatacctgccccaggaccagctgcaggactaccagcacttcgtgaagatgaagagcgccctgatcatcgagcagagagagctggaggagaagatcaagctgggcgaggagcagctgaagtgcctgagagagagcctgctgctgggccccagcaacttctag

SEQ ID NO: 98867 - DNA, 4482 bp, synthetic construct; identical to SEQ ID NO: 98866
  misc_feature 1..4482: note = Description of Artificial Sequence: Synthetic coding sequence
  source 1..4482: mol_type = other DNA

SEQ ID NO: 98868 - DNA, 4134 bp, synthetic construct
  misc_feature 1..4134: note = Description of Artificial Sequence: Synthetic coding sequence
  source 1..4134: mol_type = other DNA
atgcacttccccagcgaggccttcagcctgagctggcacagcggctgcaacaccagcgacgtgtgcgtgcagtggtgccccctgagcagacactgcagcaccgagaagagcagcagcatcggcagcatggagagcctggagcagcccggccaggccacctacgagagccacctgctgcccatcgaccagaacatgtaccccaaccagagagacagcgcctacagcagcttcagcgccagcagcaacgccagcgactgcgccctgagcctgagacccgaggagcccgccagcaccgactgcatcatgcagggccccggccccaccaaggcccccagcggcagacccaacgtggccgagaccagcggcggcagcagaagaaccaacggcggccacctgacccccagcagccagatgagcagcagaccccaggagggctaccagagcggccccgccaaggccgtgagaggccccccccagccccccgtgagaagagacagcctgcaggccagcagagcccagctgctgaacggcgagcagagaagagccagcgagcccgtggtgcccctgccccagaaggagaagctgagcctggagcccgtgctgcccgccagaaaccccaacagattctgctgcctgagcggccacgaccaggtgaccagcgagggccaccagaactgcgagttcagccagccccccgagagcagccagcagggcagcgagcacctgctgatgcaggccagcaccaaggccgtgggcagccccaaggcctgcgacagagccagcagcgtggacagcaaccccctgaacgaggccagcgccgagctggccaaggccagcttcggcagacccccccacctgatcggccccaccggccacagacacagcgcccccgagcagctgctggccagccacctgcagcacgtgcacctggacaccagaggcagcaagggcatggagctgccccccgtgcaggacggccaccagtggaccctgagccccctgcacagcagccacaagggcaagaagagcccctgcccccccaccggcggcacccacgaccagagcagcaaggagagaaagaccagacaggtggacgacagaagcctggtgctgggccaccagagccagagcagccccccccacggcgaggccgacggccaccccagcgagaagggcttcctggaccccaacagaaccagcagagccgccagcgagctggccaaccagcagcccagcgccagcggcagcctggtgcagcaggccaccgactgcagcagcaccaccaaggccgccagcggcaccgaggccggcgaggagggcgacagcgagcccaaggagtgcagcagaatgggcggcagaagaagcggcggcaccagaggcagaagcatccagaacagaagaaagagcgagagattcgccaccaacctgagaaacgagatccagagaagaaaggcccagctgcagaagagcaagggccccctgagccagctgtgcgacaccaaggagcccgtggaggagacccaggagccccccgagagcccccccctgaccgccagcaacaccagcctgctgagcagctgcaagaagccccccagccccagagacaagctgttcaacaagagcatgatgctgagagccagaagcagcgagtgcctgagccaggcccccgagagccacgagagcagaaccggcctggagggcagaatcagccccggccagagacccggccagagcagcctgggcctgaacacctggtggaaggcccccgaccccagcagcagcgaccccgagaaggcccacgcccactgcggcgtgagaggcggccactggagatggagccccgagcacaacagccagcccctggtggccgccgccatggagggccccagcaaccccggcgacaacaaggagctgaaggccagcaccgcccaggccggcgaggacgccatcctgctgcccttcgccgacagaagaaagttcttcgaggagagcagcaagagcctgagcaccagccacctgcccggcctgaccacccacagcaacaagaccttcacccagagacccaagcccatcgaccagaacttccagcccatgagcagcagctgcagagagctgagaagacaccccatggaccagagctaccacagcgccgaccagccctaccacgccaccgaccagagctaccacagcatgagccccctgcagagcgagacccccacctacagcgagtgcttcgccagcaagggcctggagaacagcatgtgctgcaagcccctgcactgcggcgacttcgactaccacagaacctgcagctacagctgcagcgtgcagggcgccctggtgcacgacccctgcatctactgcagcggcgagatctgccccgccctgctgaagagaaacatgatgcccaactgctacaactgcagatgccaccaccaccagtgcatcagatgcagcgtgtgctaccacaacccccagcacagcgccctggaggacagcagcctggcccccggcaacacctggaagcccagaaagctgaccgtgcaggagttccccggcgacaagtggaaccccatcaccggcaacagaaagaccagccagagcggcagagagatggcccacagcaagaccagcttcagctgggccacccccttccacccctgcctggagaaccccgccctggacctgagcagctacagagccatcagcagcctggacctgctgggcgacttcaagcacgccctgaagaagagcgaggagaccagcgtgtacgaggagggcagcagcctggccagcatgccccaccccctgagaagcagagccttcagcgagagccacatcagcctggccccccagagcaccagagcctggggccagcacagaagagagctgttcagcaagggcgacgagacccagagcgacctgctgggcgccagaaagaaggccttccccccccccagaccccccccccccaactgggagaagtacagactgttcagagccgcccagcagcagaagcagcagcagcagcagcagaagcagcaggaggaggaggaggaggaggaggaggaggaggaggaggaggaggaggaggaggaggaggaggccgaggaggaggaggaggagctgcccccccagtacttcagcagcgagaccagcggcagctgcgccctgaaccccgaggaggtgctggagcagccccagcccctgagcttcggccacctggagggcagcagacagggcagccagagcgtgcccgccgagcaggagagcttcgccctgcacagcagcgacttcctgccccccatcagaggccacctgggcagccagcccgagcaggcccagcccccctgctactacggcatcggcggcctgtggagaaccagcggccaggaggccaccgagagcgccaagcaggagttccagcacttcagcccccccagcggcgcccccggcatccccaccagctacagcgcctactacaacatcagcgtggccaaggccgagctgctgaacaagctgaaggaccagcccgagatggccgagatcggcctgggcgaggaggaggtggaccacgagctggcccagaagaagatccagctgatcgagagcatcagcagaaagctgagcgtgctgagagaggcccagagaggcctgctggaggacatcaacgccaacagcgccctgggcgaggaggtggaggccaacctgaaggccgtgtgcaagagcaacgagttcgagaagtaccacctgttcgtgggcgacctggacaaggtggtgaacctgctgctgagcctgagcggcagactggccagagtggagaacgccctgaacagcatcgacagcgaggccaaccaggagaagctggtgctgatcgagaagaagcagcagctgaccggccagctggccgacgccaaggagctgaaggagcacgtggacagaagagagaagctggtgttcggcatggtgagcagatacctgccccaggaccagctgcaggactaccagcacttcgtgaagatgaagagcgccctgatcatcgagcagagagagctggaggagaagatcaagctgggcgaggagcagctgaagtgcctgagagagagcctgctgctgggccccagcaacttctag

SEQ ID NO: 98869 - DNA, 1686 bp, synthetic construct
  misc_feature 1..1686: note = Description of Artificial Sequence: Synthetic coding sequence
  source 1..1686: mol_type = other DNA
atggccaaggagagatgcctgaagaagagcttccaggacagcctggaggacatcaagaagagaatgaaggagaagagaaacaagaacctggccgagatcggcaagagaagaagcttcatcgccgccccctgccagatcatcaccaacaccagcaccctgctgaagaactaccaggacaacaacaagatgctggtgctggccctggagaacgagaagagcaaggtgaaggaggcccaggacatcatcctgcagctgagaaaggagtgctactacctgacctgccagctgtacgccctgaagggcaagctgaccagccagcagaccgtggagcccgcccagaaccaggagatctgcagcagcggcatggaccccaacagcgacgacagcagcagaaacctgttcgtgaaggacctgccccagatccccctggaggagaccgagctgcccggccagggcgagagcttccagatcgaggaccagatccccaccatcccccaggacaccctgggcgtggacttcgacagcggcgaggccaagagcaccgacaacgtgctgcccagaaccgtgagcgtgagaagcagcctgaagaagcactgcaacagcatctgccagttcgacagcctggacgacttcgagaccagccacctggccggcaagagcttcgagttcgagagagtgggcttcctggaccccctggtgaacatgcacatccccgagaacgtgcagcacaacgcctgccagtggagcaaggaccaggtgaacctgagccccaagctgatccagcccggcaccttcaccaagaccaaggaggacatcctggagagcaagagcgagcagaccaagagcaagcagagagacacccaggagagaaagagagaggagaagagaaaggccaacagaagaaagagcaagagaatgagcaagtacaaggagaacaagagcgagaacaagaagaccgtgccccagaagaagatgcacaagagcgtgagcagcaacgacgcctacaacttcaacctggaggagggcgtgcacctgacccccttcagacagaaggtgagcaacgacagcaacagagaggagaacaacgagagcgaggtgagcctgtgcgagagcagcggcagcggcgacgacagcgacgacctgtacctgcccacctgcaagtacatccagaaccccaccagcaacagcgacagacccgtgaccagacccctggccaagagagccctgaagtacaccgacgagaaggagaccgagggcagcaagcccaccaagacccccaccaccaccccccccgagacccagcagagcccccacctgagcctgaaggacatcaccaacgtgagcctgtaccccgtggtgaagatcagaagactgagcctgagccccaagaagaacaaggccagccccgccgtggccctgcccaagagaagatgcaccgccagcgtgaactacaaggagcccaccctggccagcaagctgagaagaggcgaccccttcaccgacctgtgcttcctgaacagccccatcttcaagcagaagaaggacctgagaagaagcaagaagagagccctggaggtgagccccgccaaggaggccatcttcatcctgtactacgtgagagagttcgtgagcagattccccgactgcagaaagtgcaagctggagacccacatctgcctgagatag

SEQ ID NO: 98870 - DNA, 879 bp, synthetic construct
  misc_feature 1..879: note = Description of Artificial Sequence: Synthetic coding sequence
  source 1..879: mol_type = other DNA
atggccaaggagagatgcctgaagaagagcttccaggacagcctggaggacatcaagaagagaatgaaggagaagagaaacaagaacctggccgagatcggcaagagaagaagcttcatcgccgccccctgccagatcatcaccaacaccagcaccctgctgaagaactaccaggacaacaacaagatgctggtgctggccctggagaacgagaagagcaaggtgaaggaggcccaggacatcatcctgcagctgagaaaggagtgctactacctgacctgccagctgtacgccctgaagggcaagctgaccagccagcagaccgtggagcccgcccagaaccaggagatctgcagcagcggcatggaccccaacagcgacgacagcagcagaaacctgttcgtgaaggacctgccccagatccccctggaggagaccgagctgcccggccagggcgagagcttccagatcgaggccaccccccccgagacccagcagagcccccacctgagcctgaaggacatcaccaacgtgagcctgtaccccgtggtgaagatcagaagactgagcctgagccccaagaagaacaaggccagccccgccgtggccctgcccaagagaagatgcaccgccagcgtgaactacaaggagcccaccctggccagcaagctgagaagaggcgaccccttcaccgacctgtgcttcctgaacagccccatcttcaagcagaagaaggacctgagaagaagcaagaagagagccctggaggtgagccccgccaaggaggccatcttcatcctgtactacgtgagagagttcgtgagcagattccccgactgcagaaagtgcaagctggagacccacatctgcctgagatag

SEQ ID NO: 98871 - DNA, 648 bp, synthetic construct
  misc_feature 1..648: note = Description of Artificial Sequence: Synthetic coding sequence
  source 1..648: mol_type = other DNA
atggccaaggagagatgcctgaagaagagcttccaggacagcctggaggacatcaagaagagaatgaaggagaagagaaacaagaacctggccgagatcggcaagagaagaagcttcatcgccgccccctgccagatcatcaccaacaccagcaccctgctgaagaactaccaggacaacaacaagatgctggtgctggccctggagaacgagaagagcaaggtgaaggaggcccaggacatcatcctgcagctgagaaaggagtgctactacctgacctgccagctgtacgccctgaagggcaagctgaccagccagcagaccgtggagcccgcccagaaccaggagatctgcagcagcggcatggaccccaacagcgacgacagcagcagaaacctgttcgtgaaggacctgccccagatccccctggaggagaccgagctgcccggccagggcgagagcttccagatcgaggaccagatccccaccatcccccaggacaccctgggcgtggacttcgacagcggcgccctggaggtgagccccgccaaggaggccatcttcatcctgtactacgtgagagagttcgtgagcagattccccgactgcagaaagtgcaagctggagacccacatctgcctgagatag

SEQ ID NO: 98872 - DNA, 1584 bp, synthetic construct
  misc_feature 1..1584: note = Description of Artificial Sequence: Synthetic coding sequence
  source 1..1584: mol_type = other DNA
atggccaaggagagatgcctgaagaagagcttccaggacagcctggaggacatcaagaagagaatgaaggagaagagaaacaagaacctggccgagatcggcaagagaagaagcttcatcgccgccccctgccagatcatcaccaacaccagcaccctgctgaagaactaccaggacaacaacaagatgctggtgctggccctggagaacgagaagagcaaggtgaaggaggcccaggacatcatcctgcagctgagaaaggagtgctactacctgacctgccagctgtacgccctgaagggcaagctgaccagccagcagaccgtggagcccgcccagaaccaggagatctgcagcagcggcatggaccccaacagcgacgacagcagcagaaacctgttcgtgaaggacctgccccagatccccctggaggagaccgagctgcccggccagggcgagagcttccagatcgaggaccagatccccaccatcccccaggacaccctgggcgtggacttcgacagcggcgaggccaagagcaccgacaacgtgctgcccagaaccgtgagcgtgagaagcagcctgaagaagcactgcaacagcatctgccagttcgacagcctggacgacttcgagaccagccacctggccggcaagagcttcgagttcgagagagtgggcttcctggaccccctggtgaacatgcacatccccgagaacgtgcagcacaacgcctgccagtggagcaaggaccaggtgaacctgagccccaagctgatccagcccggcaccttcaccaagaccaaggaggacatcctggagagcaagagcgagcagaccaagagcaagcagagagacacccaggagagaaagagagaggagaagagaaaggccaacagaagaaagagcaagagaatgagcaagtacaaggagaacaagagcgagaacaagaagaccgtgccccagaagaagatgcacaagagcgtgagcagcaacgacgcctacaacttcaacctggaggagggcgtgcacctgacccccttcagacagaaggtgagcaacgacagcaacagagaggagaacaacgagagcgaggtgagcctgtgcgagagcagcggcagcggcgacgacagcgacgacctgtacctgcccacctgcaagtacatccagaaccccaccagcaacagcgacagacccgtgaccagacccctggccaagagagccctgaagtacaccgacgagaaggagaccgagggcagcaagcccaccaagacccccaccaccaccccccccgagacccagcagagcccccacctgagcctgaaggacatcaccaacgtgagcctgtaccccgtggtgaagatcagaagactgagcctgagccccaagaagaacaaggccagccccgccgtggccctgcccaagagaagatgcaccgccagcgtgaactacaaggagcccaccctggccagcaagctgagaagaggcgaccccttcaccgacctgtgcttcctgaacagccccatcttcaagcagaagaaggacctgagaagaagcaagaagagcatgaagcagatccagtag

SEQ ID NO: 98873 - DNA, 1584 bp, synthetic construct; identical to SEQ ID NO: 98872
  misc_feature 1..1584: note = Description of Artificial Sequence: Synthetic coding sequence
  source 1..1584: mol_type = other DNA

SEQ ID NO: 98874 - DNA, 828 bp, synthetic construct
  misc_feature 1..828: note = Description of Artificial Sequence: Synthetic coding sequence
  source 1..828: mol_type = other DNA
atggccaaggagagatgcctgaagaagagcttccaggacagcctggaggacatcaagaagagaatgaaggagaagagaaacaagaacctggccgagatcggcaagagaagaagcttcatcgccgccccctgccagatcatcaccaacaccagcaccctgctgaagaactaccaggacaacaacaagatgctggtgctggccctggagaacgagaagagcaaggtgaaggaggcccaggacatcatcctgcagctgagaaaggagtgctactacctgacctgccagctgtacgccctgaagggcaagctgaccagccagcagaccgtggagcccgcccagaaccaggagatctgcagcagcggcatggaccccaacagcgacgacagcagcagaaacctgttcgtgaaggacctgccccagatccccctggaggagaccgagctgcccggccagggcgagagcttccagatcgaggaccagatccccaccatcccccaggacaccctgggcgtggacttcgacagcgccaccccccccgagacccagcagagcccccacctgagcctgaaggacatcaccaacgtgagcctgtaccccgtggtgaagatcagaagactgagcctgagccccaagaagaacaaggccagccccgccgtggccctgcccaagagaagatgcaccgccagcgtgaactacaaggagcccaccctggccagcaagctgagaagaggcgaccccttcaccgacctgtgcttcctgaacagccccatcttcaagcagaagaaggacctgagaagaagcaagaagagcatgaagcagatccagtag

SEQ ID NO: 98875 - DNA, 930 bp, synthetic construct
  misc_feature 1..930: note = Description of Artificial Sequence: Synthetic coding sequence
  source 1..930: mol_type = other DNA
atggccaaggagagatgcctgaagaagagcttccaggacagcctggaggacatcaagaagagaatgaaggagaagagaaacaagaacctggccgagatcggcaagagaagaagcttcatcgccgccccctgccagatcatcaccaacaccagcaccctgctgaagaactaccaggacaacaacaagatgctggtgctggccctggagaacgagaagagcaaggtgaaggaggcccaggacatcatcctgcagctgagaaaggagtgctactacctgacctgccagctgtacgccctgaagggcaagctgaccagccagcagaccgtggagcccgcccagaaccaggagatctgcagcagcggcatggaccccaacagcgacgacagcagcagaaacctgttcgtgaaggacctgccccagatccccctggaggagaccgagctgcccggccagggcgagagcttccagatcgaggaccagatccccaccatcccccaggacaccctgggcgtggacttcgacagcgccaccccccccgagacccagcagagcccccacctgagcctgaaggacatcaccaacgtgagcctgtaccccgtggtgaagatcagaagactgagcctgagccccaagaagaacaaggccagccccgccgtggccctgcccaagagaagatgcaccgccagcgtgaactacaaggagcccaccctggccagcaagctgagaagaggcgaccccttcaccgacctgtgcttcctgaacagccccatcttcaagcagaagaaggacctgagaagaagcaagaagagagccctggaggtgagccccgccaaggaggccatcttcatcctgtactacgtgagagagttcgtgagcagattccccgactgcagaaagtgcaagctggagacccacatctgcctgagatag

SEQ ID NO: 98876 - DNA, 1686 bp, synthetic construct; identical to SEQ ID NO: 98869
  misc_feature 1..1686: note = Description of Artificial Sequence: Synthetic coding sequence
  source 1..1686: mol_type = other DNA

SEQ ID NO: 98877 - DNA, 930 bp, synthetic construct; identical to SEQ ID NO: 98875
  misc_feature 1..930: note = Description of Artificial Sequence: Synthetic coding sequence
  source 1..930: mol_type = other DNA

SEQ ID NO: 98878 - DNA, 777 bp, synthetic construct
  misc_feature 1..777: note = Description of Artificial Sequence: Synthetic coding sequence
  source 1..777: mol_type = other DNA
atggccaaggagagatgcctgaagaagagcttccaggacagcctggaggacatcaagaagagaatgaaggagaagagaaacaagaacctggccgagatcggcaagagaagaagcttcatcgccgccccctgccagatcatcaccaacaccagcaccctgctgaagaactaccaggacaacaacaagatgctggtgctggccctggagaacgagaagagcaaggtgaaggaggcccaggacatcatcctgcagctgagaaaggagtgctactacctgacctgccagctgtacgccctgaagggcaagctgaccagccagcagaccgtggagcccgcccagaaccaggagatctgcagcagcggcatggaccccaacagcgacgacagcagcagaaacctgttcgtgaaggacctgccccagatccccctggaggagaccgagctgcccggccagggcgagagcttccagatcgaggccaccccccccgagacccagcagagcccccacctgagcctgaaggacatcaccaacgtgagcctgtaccccgtggtgaagatcagaagactgagcctgagccccaagaagaacaaggccagccccgccgtggccctgcccaagagaagatgcaccgccagcgtgaactacaaggagcccaccctggccagcaagctgagaagaggcgaccccttcaccgacctgtgcttcctgaacagccccatcttcaagcagaagaaggacctgagaagaagcaagaagagcatgaagcagatccagtag

SEQ ID NO: 98879 - DNA, 828 bp, synthetic construct; identical to SEQ ID NO: 98874
  misc_feature 1..828: note = Description of Artificial Sequence: Synthetic coding sequence
  source 1..828: mol_type = other DNA

SEQ ID NO: 98880 - DNA, 777 bp, synthetic construct; identical to SEQ ID NO: 98878
  misc_feature 1..777: note = Description of Artificial Sequence: Synthetic coding sequence
  source 1..777: mol_type = other DNA

SEQ ID NO: 98881 - DNA, 879 bp, synthetic construct; identical to SEQ ID NO: 98870
  misc_feature 1..879: note = Description of Artificial Sequence: Synthetic coding sequence
  source 1..879: mol_type = other DNA

SEQ ID NO: 98882 - DNA, 3798 bp, synthetic construct
  misc_feature 1..3798: note = Description of Artificial Sequence: Synthetic coding sequence
  source 1..3798: mol_type = other DNA
atggagtgccccgtgatggagaccggcagcctgttcaccagcggcatcaagagacacctgaaggacaagagaatcagcaagaccaccaagctgaacgtgagcctggccagcaagatcaagaccaagatcctgaacaacagcagcatcttcaagatcagcctgaagcacaacaacagagccctggcccaggccctgagcagagagaaggagaacagcagaagaatcaccaccgagaagatgctgctgcagaaggaggtggagaagctgaacttcgagaacaccttcctgagactgaagctgaacaacctgaacaagaagctgatcgacatcgaggccctgatgaacaacaacctgatcaccgccatcgagatgagcagcctgagcgagttccaccagagcagcttcctgctgagcgccagcaagaagaagagaatcagcaagcagtgcaagctgatgagactgcccttcgccagagtgcccctgaccagcaacgacgacgaggacgaggacaaggagaagatgcagtgcgacaacaacatcaagagcaagaccctgcccgacatccccagcagcggcagcaccacccagcccctgagcacccaggacaacagcgaggtgctgttcctgaaggagaacaaccagaacgtgtacggcctggacgacagcgagcacatcagcagcatcgtggacgtgccccccagagagagccacagccacagcgaccagagcagcaagaccagcctgatgagcgagatgagaaacgcccagagcatcggcagaagatgggagaagcccagccccagcaacgtgaccgagagaaagaagagaggcagcagctgggagagcaacaacctgagcgccgacaccccctgcgccaccgtgctggacaagcagcacatcagcagccccgagctgaactgcaacaacgagatcaacggccacaccaacgagaccaacaccgagatgcagagaaacaagcaggacctgcccggcctgagcagcgagagcgccagagagcccaacgccgagtgcatgaaccagatcgaggacaacgacgacttccagctgcagaagaccgtgtacgacgccgacatggacctgaccgccagcgaggtgagcaagatcgtgaccgtgagcaccggcatcaagaagaagagcaacaagaagaccaacgagcacggcatgaagaccttcagaaaggtgaaggacagcagcagcgagaagaagagagagagaagcaagagacagttcaagaacagcagcgacgtggacatcggcgagaagatcgagaacagaaccgagagaagcgacgtgctggacggcaagagaggcgccgaggaccccggcttcatcttcaacaacgagcagctggcccagatgaacgagcagctggcccaggtgaacgagctgaagaagatgaccctgcagaccggcttcgagcagggcgacagagagaacgtgctgtgcaacaagaaggagaagagaatcaccaacgagcaggaggagacctacagcctgagccagagcagcggcaagttccaccaggagagcaagttcgacaagggccagaacagcctgacctgcaacaagagcaaggccagcagacagaccttcgtgatccacaagctggagaaggacaacctgctgcccaaccagaaggacaaggtgaccatctacgagaacctggacgtgaccaacgagttccacaccgccaacctgagcaccaaggacaacggcaacctgtgcgactacggcacccacaacatcctggacctgaagaagtacgtgaccgacatccagcccagcgagcagaacgagagcaacatcaacaagctgagaaagaaggtgaacagaaagaccgagatcatcagcggcatgaaccacatgtacgaggacaacgacaaggacgtggtgcacggcctgaagaagggcaacttcttcttcaagacccaggaggacaaggagcccatcagcgagaacatcgaggtgagcaaggagctgcagatccccgccctgagcaccagagacaacgagaaccagtgcgactacagaacccagaacgtgctgggcctgcagaagcagatcaccaacatgtaccccgtgcagcagaacgagagcaaggtgaacaagaagctgagacagaaggtgaacagaaagaccgagatcatcagcgaggtgaaccacctggacaacgacaagagcatcgagtacaccgtgaagagccacagcctgttcctgacccagaaggacaaggagatcatccccggcaacctggaggaccccagcgagttcgagacccccgccctgagcaccaaggacagcggcaacctgtacgacagcgagatccagaacgtgctgggcgtgaagcacggccacgacatgcagcccgcctgccagaacgacagcaagatcggcaagaagcccagactgaacgtgtgccagaagagcgagatcatccccgagaccaaccagatctacgagaacgacaacaagggcgtgcacgacctggagaaggacaacttcttcagcctgacccccaaggacaaggagaccatcagcgagaacctgcaggtgaccaacgagttccagaccgtggacctgctgatcaaggacaacggcaacctgtgcgactacgacacccagaacatcctggagctgaagaagtacgtgaccgacagaaagagcgccgagcagaacgagagcaagatcaacaagctgagaaacaaggtgaactggaagaccgagatcatcagcgagatgaaccagatctacgaggacaacgacaaggacgcccacgtgcaggagagctacaccaaggacctggacttcaaggtgaacaagagcaagcagaagctggagtgccaggacatcatcaacaagcactacatggaggtgaacagcaacgagaaggagagctgcgaccagatcctggacagctacaaggtggtgaagaagagaaagaaggagagcagctgcaaggccaagaacatcctgaccaaggccaagaacaagctggccagccagctgaccgagagcagccagaccagcatcagcctggagagcgacctgaagcacatcaccagcgaggccgacagcgaccccggcaaccccgtggagctgtgcaagacccagaagcagagcaccaccaccctgaacaagaaggacctgcccttcgtggaggagatcaaggagggcgagtgccaggtgaagaaggtgaacaagatgaccagcaagagcaagaagagaaagaccagcatcgaccccagccccgagagccacgaggtgatggagagaatcctggacagcgtgcagggcaagagcaccgtgagcgagcaggccgacaaggagaacaacctggagaacgagaagatggtgaagaacaagcccgacttctacaccaaggccttcagaagcctgagcgagatccacagccccaacatccaggacagcagcttcgacagcgtgagagagggcctggtgcccctgagcgtgagcagcggcaagaacgtgatcatcaaggagaacttcgccctggagtgcagccccgccttccaggtgagcgacgacgagcacgagaagatgaacaagatgaagttcaaggtgaacagaagaacccagaagagcggcatcggcgacagacccctgcaggacctgagcaacaccagcttcgtgagcaacaacaccgccgagagcgagaacaagagcgaggacctgagcagcgagagaaccagcagaagaagaagatgcacccccttctacttcaaggagcccagcctgagagacaagatgagaagatag

SEQ ID NO: 98883 - DNA, 744 bp, synthetic construct
  misc_feature 1..744: note = Description of Artificial Sequence: Synthetic coding sequence
  source 1..744: mol_type = other DNA
atggagtgccccgtgatggagaccggcagcctgttcaccagcggcatcaagagacacctgaaggacaagagaatcagcaagaccaccaagctgaacgtgagcctggccagcaagatcaagaccaagatcctgaacaacagcagcatcttcaagatcagcctgaagcacaacaacagagccctggcccaggccctgagcagagagaaggagaacagcagaagaatcaccaccgagaagatgctgctgcagaaggaggtggagaagctgaacttcgagaacaccttcctgagactgaagctgaacaacctgaacaagaagctgatcgacatcgaggccctgatgaacaacaacctgatcaccgccatcgagatgagcagcctgagcgagttccaccagagcagcttcctgctgagcgccagcaagaagaagagaatcagcaagcagtgcaagctgatgagactgcccttcgccagagtgcccctgaccagcaacgacgacgaggacgaggacaaggagaagatgcagtgcgacaacaacatcaagagcaagaccctgcccgacatccccagcagcggcagcaccacccagcccctgagcacccaggacaacagcgaggtgctgttcctgaaggagaacaaccagaacgtgtacggcctggacgacagcgagcacatcagcagcatcgtggacgtgccccccagaggcgagatcgtgctgaagatccacttcgagtacctgtactag

SEQ ID NO: 98884 - DNA, 264 bp, synthetic construct
  misc_feature 1..264: note = Description of Artificial Sequence: Synthetic coding sequence
  source 1..264: mol_type = other DNA
atggagtgccccgtgatggagaccggcagcctgttcaccagcggcatcaagagacacctgaaggacaagagaatcagcaagaccaccaagctgaacgtgagcctggccagcaagatcaagaccaagatcctgaacaacagcagcatcttcaagatcagcctgaagcacaacaacagagccctggcccaggccctgagcagagagaaggagaacagcagaagaatcaccaccgagaagatgctgctgcagaaggaggtggagtag

SEQ ID NO: 98885 - DNA, 753 bp, synthetic construct
  misc_feature 1..753: note = Description of Artificial Sequence: Synthetic coding sequence
  source 1..753: mol_type = other DNA
atgagcatcttcacccccaccaaccagatcagactgaccaacgtggccgtggtgagaatgaagagagccggcaagagattcgagatcgcctgctacaagaacaaggtggtgggctggagaagcggcgtggagaaggacctggacgaggtgctgcagacccacagcgtgttcgtgaacgtgagcaagggccaggtggccaagaaggaggacctgatcagcgccttcggcaccgacgaccagaccgagatctgcaagcagatcctgaccaagggcgaggtgcaggtgagcgacaaggagagacacacccagctggagcagatgttcagagacatcgccaccatcgtggccgacaagtgcgtgaaccccgagaccaagagaccctacaccgtgatcctgatcgagagagccatgaaggacatccactacagcgtgaagaccaacaagagcaccaagcagcaggccctggaggtgatcaagcagctgaaggagaagatgaagatcgagagagcccacatgagactgagattcatcctgcccgtgaacgagggcaagaagctgaaggagaagctgaagcccctgatcaaggtgatcgagagcgaggactacggccagcagctggagatcgtgtgcctgatcgaccccggctgcttcagagagatcgacgagctgatcaagaaggagaccaagggcaagggcagcctggaggtgctgaacctgaaggacgtggaggagggcgacgagaagttcgagtag

SEQ ID NO: 98886 - DNA, 1572 bp, synthetic construct
  misc_feature 1..1572: note = Description of Artificial Sequence: Synthetic coding sequence
  source 1..1572: mol_type = other DNA
atggtggcccccggcctggtgctgggcctggtgctgcccctgatcctgtgggccgacagaagcgccggcatcggcttcagattcgccagctacatcaacaacgacatggtgctgcagaaggagcccgccggcgccgtgatctggggcttcggcacccccggcgccaccgtgaccgtgaccctgagacagggccaggagaccatcatgaagaaggtgaccagcgtgaaggcccacagcgacacctggatggtggtgctggaccccatgaagcccggcggccccttcgaggtgatggcccagcagaccctggagaagatcaacttcaccctgagagtgcacgacgtgctgttcggcgacgtgtggctgtgcagcggccagagcaacatgcagatgaccgtgctgcagatcttcaacgccaccagagagctgagcaacaccgccgcctaccagagcgtgagaatcctgagcgtgagccccatccaggccgagcaggagctggaggacctggtggccgtggacctgcagtggagcaagcccaccagcgagaacctgggccacggctacttcaagtacatgagcgccgtgtgctggctgttcggcagacacctgtacgacaccctgcagtaccccatcggcctgatcgccagcagctggggcggcacccccatcgaggcctggagcagcggcagaagcctgaaggcctgcggcgtgcccaagcagggcagcatcccctacgacagcgtgaccggccccagcaagcacagcgtgctgtggaacgccatgatccaccccctgtgcaacatgaccctgaagggcgtggtgtggtaccagggcgagagcaacatcaactacaacaccgacctgtacaactgcaccttccccgccctgatcgaggactggagagagaccttccacagaggcagccagggccagaccgagagattcttccccttcggcctggtgcagctgagcagcgacctgagcaagaagagcagcgacgacggcttcccccagatcagatggcaccagaccgccgacttcggctacgtgcccaaccccaagatgcccaacaccttcatggccgtggccatggacctgtgcgacagagacagccccttcggcagcatccaccccagagacaagcagaccgtggcctacagactgcacctgggcgccagagccctggcctacggcgagaagaacctgaccttcgagggccccctgcccgagaagatcgagctgctggcccacaagggcctgctgaacctgacctactaccagcagatccaggtgcagaagaaggacaacaagatcttcgagatcagctgctgcagcgaccacagatgcaagtggctgcccgccagcatgaacaccgtgagcacccagagcctgaccctggccatcgacagctgccacggcaccgtggtggccctgagatacgcctggaccacctggccctgcgagtacaagcagtgccccctgtaccaccccagcagcgccctgcccgccccccccttcatcgccttcatcaccgaccagggccccggccaccagagcaacgtggccaagtag

SEQ ID NO: 98887 - DNA, 1467 bp, synthetic construct
  misc_feature 1..1467: note = Description of Artificial Sequence: Synthetic coding sequence
  source 1..1467: mol_type = other DNA
atggtgctgcagaaggagcccgccggcgccgtgatctggggcttcggcacccccggcgccaccgtgaccgtgaccctgagacagggccaggagaccatcatgaagaaggtgaccagcgtgaaggcccacagcgacacctggatggtggtgctggaccccatgaagcccggcggccccttcgaggtgatggcccagcagaccctggagaagatcaacttcaccctgagagtgcacgacgtgctgttcggcgacgtgtggctgtgcagcggccagagcaacatgcagatgaccgtgctgcagatcttcaacgccaccagagagctgagcaacaccgccgcctaccagagcgtgagaatcctgagcgtgagccccatccaggccgagcaggagctggaggacctggtggccgtggacctgcagtggagcaagcccaccagcgagaacctgggccacggctacttcaagtacatgagcgccgtgtgctggctgttcggcagacacctgtacgacaccctgcagtaccccatcggcctgatcgccagcagctggggcggcacccccatcgaggcctggagcagcggcagaagcctgaaggcctgcggcgtgcccaagcagggcagcatcccctacgacagcgtgaccggccccagcaagcacagcgtgctgtggaacgccatgatccaccccctgtgcaacatgaccctgaagggcgtggtgtggtaccagggcgagagcaacatcaactacaacaccgacctgtacaactgcaccttccccgccctgatcgaggactggagagagaccttccacagaggcagccagggccagaccgagagattcttccccttcggcctggtgcagctgagcagcgacctgagcaagaagagcagcgacgacggcttcccccagatcagatggcaccagaccgccgacttcggctacgtgcccaaccccaagatgcccaacaccttcatggccgtggccatggacctgtgcgacagagacagccccttcggcagcatccaccccagagacaagcagaccgtggcctacagactgcacctgggcgccagagccctggcctacggcgagaagaacctgaccttcgagggccccctgcccgagaagatcgagctgctggcccacaagggcctgctgaacctgacctactaccagcagatccaggtgcagaagaaggacaacaagatcttcgagatcagctgctgcagcgaccacagatgcaagtggctgcccgccagcatgaacaccgtgagcacccagagcctgaccctggccatcgacagctgccacggcaccgtggtggccctgagatacgcctggaccacctggccctgcgagtacaagcagtgccccctgtaccaccccagcagcgccctgcccgccccccccttcatcgccttcatcaccgaccagggccccggccaccagagcaacgtggccaagtag

SEQ ID NO: 98888 - DNA, 2094 bp, synthetic construct
  misc_feature 1..2094: note = Description of Artificial Sequence: Synthetic coding sequence
  source 1..2094: mol_type = other DNA
atgctgctgcccctgctgctgagcagcctgctgggcggcagccaggccatggacggcagattctggatcagagtgcaggagagcgtgatggtgcccgagggcctgtgcatcagcgtgccctgcagcttcagctaccccagacaggactggaccggcagcacccccgcctacggctactggttcaaggccgtgaccgagaccaccaagggcgcccccgtggccaccaaccaccagagcagagaggtggagatgagcaccagaggcagattccagctgaccggcgaccccgccaagggcaactgcagcctggtgatcagagacgcccagatgcaggacgagagccagtacttcttcagagtggagagaggcagctacgtgagatacaacttcatgaacgacggcttcttcctgaaggtgaccgccctgacccagaagcccgacgtgtacatccccgagaccctggagcccggccagcccgtgaccgtgatctgcgtgttcaactgggccttcgaggagtgccccccccccagcttcagctggaccggcgccgccctgagcagccagggcaccaagcccaccaccagccacttcagcgtgctgagcttcacccccagaccccaggaccacaacaccgacctgacctgccacgtggacttcagcagaaagggcgtgagcgcccagagaaccgtgagactgagagtggcctacgcccccagagacctggtgatcagcatcagcagagacaacacccccgccctggagccccagccccagggcaacgtgccctacctggaggcccagaagggccagttcctgagactgctgtgcgccgccgacagccagccccccgccaccctgagctgggtgctgcagaacagagtgctgagcagcagccacccctggggccccagacccctgggcctggagctgcccggcgtgaaggccggcgacagcggcagatacacctgcagagccgagaacagactgggcagccagcagagagccctggacctgagcgtgcagtacccccccgagaacctgagagtgatggtgagccaggccaacagaaccgtgctggagaacctgggcaacggcaccagcctgcccgtgctggagggccagagcctgtgcctggtgtgcgtgacccacagcagcccccccgccagactgagctggacccagagaggccaggtgctgagccccagccagcccagcgaccccggcgtgctggagctgcccagagtgcaggtggagcacgagggcgagttcacctgccacgccagacaccccctgggcagccagcacgtgagcctgagcctgagcgtgcactacagccccaagctgctgggccccagctgcagctgggaggccgagggcctgcactgcagctgcagcagccaggccagccccgcccccagcctgagatggtggctgggcgaggagctgctggagggcaacagcagccaggacagcttcgaggtgacccccagcagcgccggcccctgggccaacagcagcctgagcctgcacggcggcctgagcagcggcctgagactgagatgcgaggcctggaacgtgcacggcgcccagagcggcagcatcctgcagctgcccgacaagaagggcctgatcagcaccgccttcagcaacggcgccttcctgggcatcggcatcaccgccctgctgttcctgtgcctggccctgatcatcatgaagatcctgcccaagagaagaacccagaccgagacccccagacccagattcagcagacacagcaccatcctggactacatcaacgtggtgcccaccgccggccccctggcccagaagagaaaccagaaggccacccccaacagccccagaacccccctgccccccggcgcccccagccccgagagcaagaagaaccagaagaagcagtaccagctgcccagcttccccgagcccaagagcagcacccaggcccccgagagccaggagagccaggaggagctgcactacgccaccctgaacttccccggcgtgagacccagacccgaggccagaatgcccaagggcacccaggccgactacgccgaggtgaagttccagtag

SEQ ID NO: 98889 - DNA, 1809 bp, synthetic construct
  misc_feature 1..1809: note = Description of Artificial Sequence: Synthetic coding sequence
  source 1..1809: mol_type = other DNA
atgctgctgcccctgctgctgagcagcctgctgggcggcagccaggccatggacggcagattctggatcagagtgcaggagagcgtgatggtgcccgagggcctgtgcatcagcgtgccctgcagcttcagctaccccagacaggactggaccggcagcacccccgcctacggctactggttcaaggccgtgaccgagaccaccaagggcgcccccgtggccaccaaccaccagagcagagaggtggagatgagcaccagaggcagattccagctgaccggcgaccccgccaagggcaactgcagcctggtgatcagagacgcccagatgcaggacgagagccagtacttcttcagagtggagagaggcagctacgtgagatacaacttcatgaacgacggcttcttcctgaaggtgaccgccctgacccagaagcccgacgtgtacatccccgagaccctggagcccggccagcccgtgaccgtgatctgcgtgttcaactgggccttcgaggagtgccccccccccagcttcagctggaccggcgccgccctgagcagccagggcaccaagcccaccaccagccacttcagcgtgctgagcttcacccccagaccccaggaccacaacaccgacctgacctgccacgtggacttcagcagaaagggcgtgagcgcccagagaaccgtgagactgagagtggcctacgcccccagagacctggtgatcagcatcagcagagacaacacccccgccctggagccccagccccagggcaacgtgccctacctggaggcccagaagggccagttcctgagactgctgtgcgccgccgacagccagccccccgccaccctgagctgggtgctgcagaacagagtgctgagcagcagccacccctggggccccagacccctgggcctggagctgcccggcgtgaaggccggcgacagcggcagatacacctgcagagccgagaacagactgggcagccagcagagagccctggacctgagcgtgcagtacccccccgagaacctgagagtgatggtgagccaggccaacagaaccgtgctggagaacctgggcaacggcaccagcctgcccgtgctggagggccagagcctgtgcctggtgtgcgtgacccacagcagcccccccgccagactgagctggacccagagaggccaggtgctgagccccagccagcccagcgaccccggcgtgctggagctgcccagagtgcaggtggagcacgagggcgagttcacctgccacgccagacaccccctgggcagccagcacgtgagcctgagcctgagcgtgcactacaagaagggcctgatcagcaccgccttcagcaacggcgccttcctgggcatcggcatcaccgccctgctgttcctgtgcctggccctgatcatcatgaagatcctgcccaagagaagaacccagaccgagacccccagacccagattcagcagacacagcaccatcctggactacatcaacgtggtgcccaccgccggccccctggcccagaagagaaaccagaaggccacccccaacagccccagaacccccctgccccccggcgcccccagccccgagagcaagaagaaccagaagaagcagtaccagctgcccagcttccccgagcccaagagcagcacccaggcccccgagagccaggagagccaggaggagctgcactacgccaccctgaacttccccggcgtgagacccagacccgaggccagaatgcccaagggcacccaggccgactacgccgaggtgaagttccagtag

SEQ ID NO: 98890 - DNA, 2094 bp, synthetic construct; identical to SEQ ID NO: 98888
  misc_feature 1..2094: note = Description of Artificial Sequence: Synthetic coding sequence
  source 1..2094: mol_type = other DNA

SEQ ID NO: 98891 - DNA, 1560 bp, synthetic construct
  misc_feature 1..1560: note = Description of Artificial Sequence: Synthetic coding sequence
  source 1..1560: mol_type = other DNA
atgctgctgcccctgctgctgagcagcctgctgggcggcagccaggccatggacggcagattctggatcagagtgcaggagagcgtgatggtgcccgagggcctgtgcatcagcgtgccctgcagcttcagctaccccagacaggactggaccggcagcacccccgcctacggctactggttcaaggccgtgaccgagaccaccaagggcgcccccgtggccaccaaccaccagagcagagaggtggagatgagcaccagaggcagattccagctgaccggcgaccccgccaagggcaactgcagcctggtgatcagagacgcccagatgcaggacgagagccagtacttcttcagagtggagagaggcagctacgtgagatacaacttcatgaacgacggcttcttcctgaaggtgaccgccctgacccagaagaccgtgagactgagagtggcctacgcccccagagacctggtgatcagcatcagcagagacaacacccccgccctggagccccagccccagggcaacgtgccctacctggaggcccagaagggccagttcctgagactgctgtgcgccgccgacagccagccccccgccaccctgagctgggtgctgcagaacagagtgctgagcagcagccacccctggggccccagacccctgggcctggagctgcccggcgtgaaggccggcgacagcggcagatacacctgcagagccgagaacagactgggcagccagcagagagccctggacctgagcgtgcagtacccccccgagaacctgagagtgatggtgagccaggccaacagaaccgtgctggagaacctgggcaacggcaccagcctgcccgtgctggagggccagagcctgtgcctggtgtgcgtgacccacagcagcccccccgccagactgagctggacccagagaggccaggtgctgagccccagccagcccagcgaccccggcgtgctggagctgcccagagtgcaggtggagcacgagggcgagttcacctgccacgccagacaccccctgggcagccagcacgtgagcctgagcctgagcgtgcactacaagaagggcctgatcagcaccgccttcagcaacggcgccttcctgggcatcggcatcaccgccctgctgttcctgtgcctggccctgatcatcatgaagatcctgcccaagagaagaacccagaccgagacccccagacccagattcagcagacacagcaccatcctggactacatcaacgtggtgcccaccgccggccccctggcccagaagagaaaccagaaggccacccccaacagccccagaacccccctgccccccggcgcccccagccccgagagcaagaagaaccagaagaagcagtaccagctgcccagcttccccgagcccaagagcagcacccaggcccccgagagccaggagagccaggaggagctgcactacgccaccctgaacttccccggcgtgagacccagacccgaggccagaatgcccaagggcacccaggccgactacgccgaggtgaagttccagtag

SEQ ID NO: 98892 - DNA, 1920 bp, synthetic construct
  misc_feature 1..1920: note = Description of Artificial Sequence: Synthetic coding sequence
  source 1..1920: mol_type = other DNA
atgctgctgcccctgctgctgagcagcctgctgggcggcagccaggccatggacggcagattctggatcagagtgcaggagagcgtgatggtgcccgagggcctgtgcatcagcgtgccctgcagcttcagctaccccagacaggactggaccggcagcacccccgcctacggctactggttcaaggccgtgaccgagaccaccaagggcgcccccgtggccaccaaccaccagagcagagaggtggagatgagcaccagaggcagattccagctgaccggcgaccccgccaagggcaactgcagcctggtgatcagagacgcccagatgcaggacgagagccagtacttcttcagagtggagagaggcagctacgtgagatacaacttcatgaacgacggcttcttcctgaaggtgaccgtgctgagcttcacccccagaccccaggaccacaacaccgacctgacctgccacgtggacttcagcagaaagggcgtgagcgcccagagaaccgtgagactgagagtggcctacgcccccagagacctggtgatcagcatcagcagagacaacacccccgccctggagccccagccccagggcaacgtgccctacctggaggcccagaagggccagttcctgagactgctgtgcgccgccgacagccagccccccgccaccctgagctgggtgctgcagaacagagtgctgagcagcagccacccctggggccccagacccctgggcctggagctgcccggcgtgaaggccggcgacagcggcagatacacctgcagagccgagaacagactgggcagccagcagagagccctggacctgagcgtgcagtacccccccgagaacctgagagtgatggtgagccaggccaacagaaccgtgctggagaacctgggcaacggcaccagcctgcccgtgctggagggccagagcctgtgcctggtgtgcgtgacccacagcagcccccccgccagactgagctggacccagagaggccaggtgctgagccccagccagcccagcgaccccggcgtgctggagctgcccagagtgcaggtggagcacgagggcgagttcacctgccacgccagacaccccctgggcagccagcacgtgagcctgagcctgagcgtgcactacagccccaagctgctgggccccagctgcagctgggaggccgagggcctgcactgcagctgcagcagccaggccagccccgcccccagcctgagatggtggctgggcgaggagctgctggagggcaacagcagccaggacagcttcgaggtgacccccagcagcgccggcccctgggccaacagcagcctgagcctgcacggcggcctgagcagcggcctgagactgagatgcgaggcctggaacgtgcacggcgcccagagcggcagcatcctgcagctgcccgacaagaagggcctgatcagcaccgccttcagcaacggcgccttcctgggcatcggcatcaccgccctgctgttcctgtgcctggccctgatcatcatgaagatcctgcccaagagaagaacccagaccgagacccccagacccagattcagcagacacagcaccatcctggactacatcaacgtggtgcccaccgccggccccctggcccagaagagaaaccagaaggccacccccaacagccccagaacccccctgccccccggcgcccccagccccgagagcaagaagaaccagaagaagcagtaccagctgcccagcttccccgagcccaagagcagcacccaggcccccgagagccaggagagccaggaggagctgcactacgccaccctgaacttccccggcgtgagacccagacccgaggccagaatgcccaagggcacccaggccgactacgccgaggtgaagttccagtag

SEQ ID NO: 98893 - DNA, 1635 bp, synthetic construct
  misc_feature 1..1635: note = Description of Artificial Sequence: Synthetic coding sequence
  source 1..1635: mol_type = other DNA
atgctgctgcccctgctgctgagcagcctgctgggcggcagccaggccatggacggcagattctggatcagagtgcaggagagcgtgatggtgcccgagggcctgtgcatcagcgtgccctgcagcttcagctaccccagacaggactggaccggcagcacccccgcctacggctactggttcaaggccgtgaccgagaccaccaagggcgcccccgtggccaccaaccaccagagcagagaggtggagatgagcaccagaggcagattccagctgaccggcgaccccgccaagggcaactgcagcctggtgatcagagacgcccagatgcaggacgagagccagtacttcttcagagtggagagaggcagctacgtgagatacaacttcatgaacgacggcttcttcctgaaggtgaccgtgctgagcttcacccccagaccccaggaccacaacaccgacctgacctgccacgtggacttcagcagaaagggcgtgagcgcccagagaaccgtgagactgagagtggcctacgcccccagagacctggtgatcagcatcagcagagacaacacccccgccctggagccccagccccagggcaacgtgccctacctggaggcccagaagggccagttcctgagactgctgtgcgccgccgacagccagccccccgccaccctgagctgggtgctgcagaacagagtgctgagcagcagccacccctggggccccagacccctgggcctggagctgcccggcgtgaaggccggcgacagcggcagatacacctgcagagccgagaacagactgggcagccagcagagagccctggacctgagcgtgcagtacccccccgagaacctgagagtgatggtgagccaggccaacagaaccgtgctggagaacctgggcaacggcaccagcctgcccgtgctggagggccagagcctgtgcctggtgtgcgtgacccacagcagcccccccgccagactgagctggacccagagaggccaggtgctgagccccagccagcccagcgaccccggcgtgctggagctgcccagagtgcaggtggagcacgagggcgagttcacctgccacgccagacaccccctgggcagccagcacgtgagcctgagcctgagcgtgcactacaagaagggcctgatcagcaccgccttcagcaacggcgccttcctgggcatcggcatcaccgccctgctgttcctgtgcctggccctgatcatcatgaagatcctgcccaagagaagaacccagaccgagacccccagacccagattcagcagacacagcaccatcctggactacatcaacgtggtgcccaccgccggccccctggcccagaagagaaaccagaaggccacccccaacagccccagaacccccctgccccccggcgcccccagccccgagagcaagaagaaccagaagaagcagtaccagctgcccagcttccccgagcccaagagcagcacccaggcccccgagagccaggagagccaggaggagctgcactacgccaccctgaacttccccggcgtgagacccagacccgaggccagaatgcccaagggcacccaggccgactacgccgaggtgaagttccagtag

SEQ ID NO: 98894 - DNA, 1365 bp, synthetic construct
  misc_feature 1..1365: note = Description of Artificial Sequence: Synthetic coding sequence
  source 1..1365: mol_type = other DNA
atgctgctgcccctgctgctgagcagcctgctgggcggcagccaggccatggacggcagattctggatcagagtgcaggagagcgtgatggtgcccgagggcctgtgcatcagcgtgccctgcagcttcagctaccccagacaggactggaccggcagcacccccgcctacggctactggttcaaggccgtgaccgagaccaccaagggcgcccccgtggccaccaaccaccagagcagagaggtggagatgagcaccagaggcagattccagctgaccggcgaccccgccaagggcaactgcagcctggtgatcagagacgcccagatgcaggacgagagccagtacttcttcagagtggagagaggcagctacgtgagatacaacttcatgaacgacggcttcttcctgaaggtgaccgtgctgagcttcacccccagaccccaggaccacaacaccgacctgacctgccacgtggacttcagcagaaagggcgtgagcgcccagagaaccgtgagactgagagtggcctacgcccccagagacctggtgatcagcatcagcagagacaacacccccgacccccccgagaacctgagagtgatggtgagccaggccaacagaaccgtgctggagaacctgggcaacggcaccagcctgcccgtgctggagggccagagcctgtgcctggtgtgcgtgacccacagcagcccccccgccagactgagctggacccagagaggccaggtgctgagccccagccagcccagcgaccccggcgtgctggagctgcccagagtgcaggtggagcacgagggcgagttcacctgccacgccagacaccccctgggcagccagcacgtgagcctgagcctgagcgtgcactacaagaagggcctgatcagcaccgccttcagcaacggcgccttcctgggcatcggcatcaccgccctgctgttcctgtgcctggccctgatcatcatgaagatcctgcccaagagaagaacccagaccgagacccccagacccagattcagcagacacagcaccatcctggactacatcaacgtggtgcccaccgccggccccctggcccagaagagaaaccagaaggccacccccaacagccccagaacccccctgccccccggcgcccccagccccgagagcaagaagaaccagaagaagcagtaccagctgcccagcttccccgagcccaagagcagcacccaggcccccgagagccaggagagccaggaggagctgcactacgccaccctgaacttccccggcgtgagacccagacccgaggccagaatgcccaagggcacccaggccgactacgccgaggtgaagttccagtag

SEQ ID NO: 98895 - DNA, 1665 bp, synthetic construct
  misc_feature 1..1665: note = Description of Artificial Sequence: Synthetic coding sequence
  source 1..1665: mol_type = other DNA
atgctgctgcccctgctgctgagcagcctgctgggcggcagccaggccatggacggcagattctggatcagagtgcaggagagcgtgatggtgcccgagggcctgtgcatcagcgtgccctgcagcttcagctaccccagacaggactggaccggcagcacccccgcctacggctactggttcaaggccgtgaccgagaccaccaagggcgcccccgtggccaccaaccaccagagcagagaggtggagatgagcaccagaggcagattccagctgaccggcgaccccgccaagggcaactgcagcctggtgatcagagacgcccagatgcaggacgagagccagtacttcttcagagtggagagaggcagctacgtgagatacaacttcatgaacgacggcttcttcctgaaggtgaccggcaccaagcccaccaccagccacttcagcgtgctgagcttcacccccagaccccaggaccacaacaccgacctgacctgccacgtggacttcagcagaaagggcgtgagcgcccagagaaccgtgagactgagagtggcctacgcccccagagacctggtgatcagcatcagcagagacaacacccccgccctggagccccagccccagggcaacgtgccctacctggaggcccagaagggccagttcctgagactgctgtgcgccgccgacagccagccccccgccaccctgagctgggtgctgcagaacagagtgctgagcagcagccacccctggggccccagacccctgggcctggagctgcccggcgtgaaggccggcgacagcggcagatacacctgcagagccgagaacagactgggcagccagcagagagccctggacctgagcgtgcagtacccccccgagaacctgagagtgatggtgagccaggccaacagaaccgtgctggagaacctgggcaacggcaccagcctgcccgtgctggagggccagagcctgtgcctggtgtgcgtgacccacagcagcccccccgccagactgagctggacccagagaggccaggtgctgagccccagccagcccagcgaccccggcgtgctggagctgcccagagtgcaggtggagcacgagggcgagttcacctgccacgccagacaccccctgggcagccagcacgtgagcctgagcctgagcgtgcactacaagaagggcctgatcagcaccgccttcagcaacggcgccttcctgggcatcggcatcaccgccctgctgttcctgtgcctggccctgatcatcatgaagatcctgcccaagagaagaacccagaccgagacccccagacccagattcagcagacacagcaccatcctggactacatcaacgtggtgcccaccgccggccccctggcccagaagagaaaccagaaggccacccccaacagccccagaacccccctgccccccggcgcccccagccccgagagcaagaagaaccagaagaagcagtaccagctgcccagcttccccgagcccaagagcagcacccaggcccccgagagccaggagagccaggaggagctgcactacgccaccctgaacttccccggcgtgagacccagacccgaggccagaatgcccaagggcacccaggccgactacgccgaggtgaagttccagtag

SEQ ID NO: 98896 - DNA, 2097 bp, synthetic construct
  misc_feature 1..2097: note = Description of Artificial Sequence: Synthetic coding sequence
  source 1..2097: mol_type = other DNA
atggtgcccggccaggcccagccccagagccccgagatgctgctgctgcccctgctgctgcccgtgctgggcgccggcagcctgaacaaggaccccagctacagcctgcaggtgcagagacaggtgcccgtgcccgagggcctgtgcgtgatcgtgagctgcaacctgagctaccccagagacggctgggacgagagcaccgccgcctacggctactggttcaagggcagaaccagccccaagaccggcgcccccgtggccaccaacaaccagagcagagaggtggagatgagcaccagagacagattccagctgaccggcgaccccggcaagggcagctgcagcctggtgatcagagacgcccagagagaggacgaggcctggtacttcttcagagtggagagaggcagcagagtgagacacagcttcctgagcaacgccttcttcctgaaggtgaccgccctgaccaagaagcccgacgtgtacatccccgagaccctggagcccggccagcccgtgaccgtgatctgcgtgttcaactgggccttcaagaagtgccccgcccccagcttcagctggaccggcgccgccctgagccccagaagaaccagacccagcaccagccacttcagcgtgctgagcttcacccccagcccccaggaccacgacaccgacctgacctgccacgtggacttcagcagaaagggcgtgagcgcccagagaaccgtgagactgagagtggcctacgcccccaaggacctgatcatcagcatcagccacgacaacaccagcgccctggagctgcagggcaacgtgatctacctggaggtgcagaagggccagttcctgagactgctgtgcgccgccgacagccagccccccgccaccctgagctgggtgctgcaggacagagtgctgagcagcagccacccctggggccccagaaccctgggcctggagctgagaggcgtgagagccggcgacagcggcagatacacctgcagagccgagaacagactgggcagccagcagcaggccctggacctgagcgtgcagtacccccccgagaacctgagagtgatggtgagccaggccaacagaaccgtgctggagaacctgggcaacggcaccagcctgcccgtgctggagggccagagcctgagactggtgtgcgtgacccacagcagcccccccgccagactgagctggaccagatggggccagaccgtgggccccagccagcccagcgaccccggcgtgctggagctgccccccatccagatggagcacgagggcgagttcacctgccacgcccagcaccccctgggcagccagcacgtgagcctgagcctgagcgtgcactaccccccccagctgctgggccccagctgcagctgggaggccgagggcctgcactgcagctgcagcagccaggccagccccgcccccagcctgagatggtggctgggcgaggagctgctggagggcaacagcagccagggcagcttcgaggtgacccccagcagcgccggcccctgggccaacagcagcctgagcctgcacggcggcctgagcagcggcctgagactgagatgcaaggcctggaacgtgcacggcgcccagagcggcagcgtgttccagctgctgcccggcaagctggagcacggcggcggcctgggcctgggcgccgccctgggcgccggcgtggccgccctgctggccttctgcagctgcctggtggtgttcagagtgaagatctgcagaaaggaggccagaaagagagccgccgccgagcaggacgtgcccagcaccctgggccccatcagccagggccaccagcacgagtgcagcgccggcagcagccaggaccaccccccccccggcgccgccacctacacccccggcaagggcgaggagcaggagctgcactacgccagcctgagcttccagggcctgagactgtgggagcccgccgaccaggaggcccccagcaccaccgagtacagcgagatcaagatccacaccggccagcccctgagaggccccggcttcggcctgcagctggagagagagatgagcggcatggtgcccaagtag

SEQ ID NO: 98897 - DNA, 1809 bp, synthetic construct
  misc_feature 1..1809: note = Description of Artificial Sequence: Synthetic coding sequence
  source 1..1809: mol_type = other DNA
atggtgcccggccaggcccagccccagagccccgagatgctgctgctgcccctgctgctgcccgtgctgggcgccggcagcctgaacaaggaccccagctacagcctgcaggtgcagagacaggtgcccgtgcccgagggcctgtgcgtgatcgtgagctgcaacctgagctaccccagagacggctgggacgagagcaccgccgcctacggctactggttcaagggcagaaccagccccaagaccggcgcccccgtggccaccaacaaccagagcagagaggtggagatgagcaccagagacagattccagctgaccggcgaccccggcaagggcagctgcagcctggtgatcagagacgcccagagagaggacgaggcctggtacttcttcagagtggagagaggcagcagagtgagacacagcttcctgagcaacgccttcttcctgaaggtgaccgccctgaccaagaagcccgacgtgtacatccccgagaccctggagcccggccagcccgtgaccgtgatctgcgtgttcaactgggccttcaagaagtgccccgcccccagcttcagctggaccggcgccgccctgagccccagaagaaccagacccagcaccagccacttcagcgtgctgagcttcacccccagcccccaggaccacgacaccgacctgacctgccacgtggacttcagcagaaagggcgtgagcgcccagagaaccgtgagactgagagtggcctacgcccccaaggacctgatcatcagcatcagccacgacaacaccagcgccctggagctgcagggcaacgtgatctacctggaggtgcagaagggccagttcctgagactgctgtgcgccgccgacagccagccccccgccaccctgagctgggtgctgcaggacagagtgctgagcagcagccacccctggggccccagaaccctgggcctggagctgagaggcgtgagagccggcgacagcggcagatacacctgcagagccgagaacagactgggcagccagcagcaggccctggacctgagcgtgcagtacccccccgagaacctgagagtgatggtgagccaggccaacagaaccgtgctggagaacctgggcaacggcaccagcctgcccgtgctggagggccagagcctgagactggtgtgcgtgacccacagcagcccccccgccagactgagctggaccagatggggccagaccgtgggccccagccagcccagcgaccccggcgtgctggagctgccccccatccagatggagcacgagggcgagttcacctgccacgcccagcaccccctgggcagccagcacgtgagcctgagcctgagcgtgcactggaagctggagcacggcggcggcctgggcctgggcgccgccctgggcgccggcgtggccgccctgctggccttctgcagctgcctggtggtgttcagagtgaagatctgcagaaaggaggccagaaagagagccgccgccgagcaggacgtgcccagcaccctgggccccatcagccagggccaccagcacgagtgcagcgccggcagcagccaggaccaccccccccccggcgccgccacctacacccccggcaagggcgaggagcaggagctgcactacgccagcctgagcttccagggcctgagactgtgggagcccgccgaccaggaggcccccagcaccaccgagtacagcgagatcaagatccacaccggccagcccctgagaggccccggcttcggcctgcagctggagagagagatgagcggcatggtgcccaagtag

SEQ ID NO: 98898 - DNA, 1809 bp, synthetic construct; identical to SEQ ID NO: 98897
  misc_feature 1..1809: note = Description of Artificial Sequence: Synthetic coding sequence
  source 1..1809: mol_type = other DNA

SEQ ID NO: 98899 - DNA, 1788 bp, synthetic construct
  misc_feature 1..1788: note = Description of Artificial Sequence: Synthetic coding sequence
  source 1..1788: mol_type = other DNA
atgctgctgctgctgctgctgctgccccccctgctgtgcggcagagtgggcgccaaggagcagaaggactacctgctgaccatgcagaagagcgtgaccgtgcaggagggcctgtgcgtgagcgtgctgtgcagcttcagctacccccagaacggctggaccgccagcgaccccgtgcacggctactggttcagagccggcgaccacgtgagcagaaacatccccgtggccaccaacaaccccgccagagccgtgcaggaggagaccagagacagattccacctgctgggcgacccccagaacaaggactgcaccctgagcatcagagacaccagagagagcgacgccggcacctacgtgttctgcgtggagagaggcaacatgaagtggaactacaagtacgaccagctgagcgtgaacgtgaccgccagccaggacctgctgagcagatacagactggaggtgcccgagagcgtgaccgtgcaggagggcctgtgcgtgagcgtgccctgcagcgtgctgtacccccactacaactggaccgccagcagccccgtgtacggcagctggttcaaggagggcgccgacatcccctgggacatccccgtggccaccaacacccccagcggcaaggtgcaggaggacacccacggcagattcctgctgctgggcgacccccagaccaacaactgcagcctgagcatcagagacgccagaaagggcgacagcggcaagtactacttccaggtggagagaggcagcagaaagtggaactacatctacgacaagctgagcgtgcacgtgaccgccctgacccacatgcccaccttcagcatccccggcaccctggagagcggccaccccagaaacctgacctgcagcgtgccctgggcctgcgagcagggcaccccccccaccatcacctggatgggcgccagcgtgagcagcctggaccccaccatcaccagaagcagcatgctgagcctgatcccccagccccaggaccacggcaccagcctgacctgccaggtgaccctgcccggcgccggcgtgaccatgaccagagccgtgagactgaacatcagctaccccccccagaacctgaccatgaccgtgttccagggcgacggcaccgccagcaccaccctgagaaacggcagcgccctgagcgtgctggagggccagagcctgcacctggtgtgcgccgtggacagcaacccccccgccagactgagctggacctggggcagcctgaccctgagccccagccagagcagcaacctgggcgtgctggagctgcccagagtgcacgtgaaggacgagggcgagttcacctgcagagcccagaaccccctgggcagccagcacatcagcctgagcctgagcctgcagaacgagtacaccggcaagatgagacccatcagcggcgtgaccctgggcgccttcggcggcgccggcgccaccgccctggtgttcctgtacttctgcatcatcttcgtggtggtgagaagctgcagaaagaagagcgccagacccgccgtgggcgtgggcgacaccggcatggaggacgccaacgccgtgagaggcagcgccagccagggccccctgatcgagagccccgccgacgacagccccccccaccacgccccccccgccctggccacccccagccccgaggagggcgagatccagtacgccagcctgagcttccacaaggccagaccccagtacccccaggagcaggaggccatcggctacgagtacagcgagatcaacatccccaagtag

SEQ ID NO: 98900 - DNA, 1290 bp, synthetic construct
  misc_feature 1..1290: note = Description of Artificial Sequence: Synthetic coding sequence
  source 1..1290: mol_type = other DNA
atgcccctgtgcagacccgagcacctgatgcccagagccagcagagtgcccgtggccgccagcctgcccctgagccacgccgtgatccccacccagctgcccagcagacccggccacagaccccccggcagacccagaagatgccccaaggccagctgcctgcccccccccgtgggccccagcagcacccagaccgccaagagagtgaccatgggctggcccagacccggcagagccctggtggccgtgaaggccctgctggtgctgagcctgctgcaggtgcccgcccaggccgtggtgagagccgtgctggaggacaacagcagcagcgtggacttcgccgacctgcccgccctgttcggcgtgcccctggcccccgagggcatcagaggctacctgatggaggtgaagcccgccaacgcctgccaccccatcgaggcccccagactgggcaacagaagcctgggcgccatcgtgctgatcagaagatacgactgcaccttcgacctgaaggtgctgaacgcccagagagccggcttcgaggccgccatcgtgcacaacgtgcacagcgacgacctggtgagcatgacccacgtgtacgaggacctgagaggccagatcgccatccccagcgtgttcgtgagcgaggccgccagccaggacctgagagtgatcctgggctgcaacaagagcgcccacgccctgctgctgcccgacgaccccccctgccacgacctgggctgccaccccgtgctgaccgtgagctgggtgctgggctgcaccctggccctggtggtgagcgccttcttcgtgctgaaccacctgtggctgtgggcccaggcctgctgcagccacagaagacccgtgaagaccagcacctgccagaaggcccaggtgagaaccttcacctggcacaacgacctgtgcgccatctgcctggacgagtacgaggagggcgaccagctgaagatcctgccctgcagccacacctaccactgcaagtgcatcgacccctggttcagccaggcccccagaagaagctgccccgtgtgcaagcagagcgtggccgccaccgaggacagcttcgacagcaccacctacagcttcagagacgaggaccccagcctgcccggccacagaccccccatctgggccatccaggtgcagctgagaagcagaagactggagctgctgggcagagccagcccccactgccactgcagcaccaccagcctggaggccgagtacaccaccgtgagcagcgccccccccgaggcccccggccagtag

SEQ ID NO: 98901 - DNA, 1656 bp, synthetic construct; identical to SEQ ID NO: 84855
  misc_feature 1..1656: note = Description of Artificial Sequence: Synthetic coding sequence
  source 1..1656: mol_type = other DNA

SEQ ID NO: 98902 - DNA, 1062 bp, synthetic construct
  misc_feature 1..1062: note = Description of Artificial Sequence: Synthetic coding sequence
  source 1..1062: mol_type = other DNA
atgcagggcgcccaggaggccagcgccagcgagatgctgcccctgctgctgcccctgctgtgggccggcgccctggcccaggagagaagattccagctggagggccccgagagcctgaccgtgcaggagggcctgtgcgtgctggtgccctgcagactgcccaccaccctgcccgccagctactacggctacggctactggttcctggagggcgccgacgtgcccgtggccaccaacgaccccgacgaggaggtgcaggaggagaccagaggcagattccacctgctgtgggaccccagaagaaagaactgcagcctgagcatcagagacgccagaagaagagacaacgccgcctacttcttcagactgaagagcaagtggatgaagtacggctacaccagcagcaagctgagcgtgagagtgatggccctgacccacagacccaacatcagcatccccggcaccctggagagcggccaccccagcaacctgacctgcagcgtgccctgggtgtgcgagcagggcaccccccccatcttcagctggatgagcgccgcccccaccagcctgggccccagaaccacccagagcagcgtgctgaccatcacccccagaccccaggaccacagcaccaacctgacctgccaggtgaccttccccggcgccggcgtgaccatggagagaaccatccagctgaacgtgagctacgccccccagaaggtggccatcagcatcttccagggcaacagcgccgccttcaagatcctgcagaacaccagcagcctgcccgtgctggagggccaggccctgagactgctgtgcgacgccgacggcaacccccccgcccacctgagctggttccagggcttccccgccctgaacgccacccccatcagcaacaccggcgtgctggagctgccccaggtgggcagcgccgaggagggcgacttcacctgcagagcccagcaccccctgggcagcctgcagatcagcctgagcctgttcgtgcactggagcagcgcccccgtgcccgacagacacagcttcagacccccctgctag

SEQ ID NO: 98903 - DNA, 1281 bp, synthetic construct
  misc_feature 1..1281: note = Description of Artificial Sequence: Synthetic coding sequence
  source 1..1281: mol_type = other DNA
atgctgcccctgctgctgcccctgctgtgggccggcgccctggcccaggagagaagattccagctggagggccccgagagcctgaccgtgcaggagggcctgtgcgtgctggtgccctgcagactgcccaccaccctgcccgccagctactacggctacggctactggttcctggagggcgccgacgtgcccgtggccaccaacgaccccgacgaggaggtgcaggaggagaccagaggcagattccacctgctgtgggaccccagaagaaagaactgcagcctgagcatcagagacgccagaagaagagacaacgccgcctacttcttcagactgaagagcaagtggatgaagtacggctacaccagcagcaagctgagcgtgagagtgatggccctgacccacagacccaacatcagcatccccggcaccctggagagcggccaccccagcaacctgacctgcagcgtgccctgggtgtgcgagcagggcaccccccccatcttcagctggatgagcgccgcccccaccagcctgggccccagaaccacccagagcagcgtgctgaccatcacccccagaccccaggaccacagcaccaacctgacctgccaggtgaccttccccggcgccggcgtgaccatggagagaaccatccagctgaacgtgagcagcttcaagatcctgcagaacaccagcagcctgcccgtgctggagggccaggccctgagactgctgtgcgacgccgacggcaacccccccgcccacctgagctggttccagggcttccccgccctgaacgccacccccatcagcaacaccggcgtgctggagctgccccaggtgggcagcgccgaggagggcgacttcacctgcagagcccagcaccccctgggcagcctgcagatcagcctgagcctgttcgtgcactggaagcccgagggcagagccggcggcgtgctgggcgccgtgtggggcgccagcatcaccaccctggtgttcctgtgcgtgtgcttcatcttcagagtgaagaccagaagaaagaaggccgcccagcccgtgcagaacaccgacgacgtgaaccccgtgatggtgagcggcagcagaggccaccagcaccagttccagaccggcatcgtgagcgaccaccccgccgaggccggccccatcagcgaggacgagcaggagctgcactacgccgtgctgcacttccacaaggtgcagccccaggagcccaaggtgaccgacaccgagtacagcgagatcaagatccacaagtag

SEQ ID NO: 98904 - DNA, 1314 bp, synthetic construct
  misc_feature 1..1314: note = Description of Artificial Sequence: Synthetic coding sequence
  source 1..1314: mol_type = other DNA
atgcagggcgcccaggaggccagcgccagcgagatgctgcccctgctgctgcccctgctgtgggccggcgccctggcccaggagagaagattccagctggagggccccgagagcctgaccgtgcaggagggcctgtgcgtgctggtgccctgcagactgcccaccaccctgcccgccagctactacggctacggctactggttcctggagggcgccgacgtgcccgtggccaccaacgaccccgacgaggaggtgcaggaggagaccagaggcagattccacctgctgtgggaccccagaagaaagaactgcagcctgagcatcagagacgccagaagaagagacaacgccgcctacttcttcagactgaagagcaagtggatgaagtacggctacaccagcagcaagctgagcgtgagagtgatggccctgacccacagacccaacatcagcatccccggcaccctggagagcggccaccccagcaacctgacctgcagcgtgccctgggtgtgcgagcagggcaccccccccatcttcagctggatgagcgccgcccccaccagcctgggccccagaaccacccagagcagcgtgctgaccatcacccccagaccccaggaccacagcaccaacctgacctgccaggtgaccttccccggcgccggcgtgaccatggagagaaccatccagctgaacgtgagcagcttcaagatcctgcagaacaccagcagcctgcccgtgctggagggccaggccctgagactgctgtgcgacgccgacggcaacccccccgcccacctgagctggttccagggcttccccgccctgaacgccacccccatcagcaacaccggcgtgctggagctgccccaggtgggcagcgccgaggagggcgacttcacctgcagagcccagcaccccctgggcagcctgcagatcagcctgagcctgttcgtgcactggaagcccgagggcagagccggcggcgtgctgggcgccgtgtggggcgccagcatcaccaccctggtgttcctgtgcgtgtgcttcatcttcagagtgaagaccagaagaaagaaggccgcccagcccgtgcagaacaccgacgacgtgaaccccgtgatggtgagcggcagcagaggccaccagcaccagttccagaccggcatcgtgagcgaccaccccgccgaggccggccccatcagcgaggacgagcaggagctgcactacgccgtgctgcacttccacaaggtgcagccccaggagcccaaggtgaccgacaccgagtacagcgagatcaagatccacaagtag

SEQ ID NO: 98905 - DNA, 1362 bp, synthetic construct
  misc_feature 1..1362: note = Description of Artificial Sequence: Synthetic coding sequence
  source 1..1362: mol_type = other DNA
atgcagggcgcccaggaggccagcgccagcgagatgctgcccctgctgctgcccctgctgtgggccggcgccctggcccaggagagaagattccagctggagggccccgagagcctgaccgtgcaggagggcctgtgcgtgctggtgccctgcagactgcccaccaccctgcccgccagctactacggctacggctactggttcctggagggcgccgacgtgcccgtggccaccaacgaccccgacgaggaggtgcaggaggagaccagaggcagattccacctgctgtgggaccccagaagaaagaactgcagcctgagcatcagagacgccagaagaagagacaacgccgcctacttcttcagactgaagagcaagtggatgaagtacggctacaccagcagcaagctgagcgtgagagtgatggccctgacccacagacccaacatcagcatccccggcaccctggagagcggccaccccagcaacctgacctgcagcgtgccctgggtgtgcgagcagggcaccccccccatcttcagctggatgagcgccgcccccaccagcctgggccccagaaccacccagagcagcgtgctgaccatcacccccagaccccaggaccacagcaccaacctgacctgccaggtgaccttccccggcgccggcgtgaccatggagagaaccatccagctgaacgtgagctacgccccccagaaggtggccatcagcatcttccagggcaacagcgccgccttcaagatcctgcagaacaccagcagcctgcccgtgctggagggccaggccctgagactgctgtgcgacgccgacggcaacccccccgcccacctgagctggttccagggcttccccgccctgaacgccacccccatcagcaacaccggcgtgctggagctgccccaggtgggcagcgccgaggagggcgacttcacctgcagagcccagcaccccctgggcagcctgcagatcagcctgagcctgttcgtgcactggaagcccgagggcagagccggcggcgtgctgggcgccgtgtggggcgccagcatcaccaccctggtgttcctgtgcgtgtgcttcatcttcagagtgaagaccagaagaaagaaggccgcccagcccgtgcagaacaccgacgacgtgaaccccgtgatggtgagcggcagcagaggccaccagcaccagttccagaccggcatcgtgagcgaccaccccgccgaggccggccccatcagcgaggacgagcaggagctgcactacgccgtgctgcacttccacaaggtgcagccccaggagcccaaggtgaccgacaccgagtacagcgagatcaagatccacaagtag

SEQ ID NO: 98906 - DNA, 1170 bp, synthetic construct
  misc_feature 1..1170: note = Description of Artificial Sequence: Synthetic coding sequence
  source 1..1170: mol_type = other DNA
atgcagggcgcccaggaggccagcgccagcgagatgctgcccctgctgctgcccctgctgtgggccggcgccctggcccaggagagaagattccagctggagggccccgagagcctgaccgtgcaggagggcctgtgcgtgctggtgccctgcagactgcccaccaccctgcccgccagctactacggctacggctactggttcctggagggcgccgacgtgcccgtggccaccaacgaccccgacgaggaggtgcaggaggagaccagaggcagattccacctgctgtgggaccccagaagaaagaactgcagcctgagcatcagagacgccagaagaagagacaacgccgcctacttcttcagactgaagagcaagtggatgaagtacggctacaccagcagcaagctgagcgtgagagtgatggccctgacccacagacccaacatcagcatccccggcaccctggagagcggccaccccagcaacctgacctgcagcgtgccctgggtgtgcgagcagggcaccccccccatcttcagctggatgagcgccgcccccaccagcctgggccccagaaccacccagagcagcgtgctgaccatcacccccagaccccaggaccacagcaccaacctgacctgccaggtgaccttccccggcgccggcgtgaccatggagagaaccatccagctgaacgtgagctggatgctgagaagaccccccctgagcacccccgacgccccccagaaggtggccatcagcatcttccagggcaacagcgccgccttcaagatcctgcagaacaccagcagcctgcccgtgctggagggccaggccctgagactgctgtgcgacgccgacggcaacccccccgcccacctgagctggttccagggcttccccgccctgaacgccacccccatcagcaacaccggcgtgctggagctgccccaggtgggcagcgccgaggagggcgacttcacctgcagagcccagcaccccctgggcagcctgcagatcagcctgagcctgttcgtgcactggaagcccgagggcagagccggcggcgtgctgggcgccgtgtggggcgccagcatcaccaccctggtgttcctgtgcgtgtgcttcatcttcagagtgatcagcaccagcagcagacaggcctag

SEQ ID NO: 98907 - DNA, 1206 bp, synthetic construct
  misc_feature 1..1206: note = Description of Artificial Sequence: Synthetic coding sequence
  source 1..1206: mol_type = other DNA
atgcagggcgcccaggaggccagcgccagcgagatgctgcccctgctgctgcccctgctgtgggccgccagctactacggctacggctactggttcctggagggcgccgacgtgcccgtggccaccaacgaccccgacgaggaggtgcaggaggagaccagaggcagattccacctgctgtgggaccccagaagaaagaactgcagcctgagcatcagagacgccagaagaagagacaacgccgcctacttcttcagactgaagagcaagtggatgaagtacggctacaccagcagcaagctgagcgtgagagtgatggccctgacccacagacccaacatcagcatccccggcaccctggagagcggccaccccagcaacctgacctgcagcgtgccctgggtgtgcgagcagggcaccccccccatcttcagctggatgagcgccgcccccaccagcctgggccccagaaccacccagagcagcgtgctgaccatcacccccagaccccaggaccacagcaccaacctgacctgccaggtgaccttccccggcgccggcgtgaccatggagagaaccatccagctgaacgtgagcagcttcaagatcctgcagaacaccagcagcctgcccgtgctggagggccaggccctgagactgctgtgcgacgccgacggcaacccccccgcccacctgagctggttccagggcttccccgccctgaacgccacccccatcagcaacaccggcgtgctggagctgccccaggtgggcagcgccgaggagggcgacttcacctgcagagcccagcaccccctgggcagcctgcagatcagcctgagcctgttcgtgcactggaagcccgagggcagagccggcggcgtgctgggcgccgtgtggggcgccagcatcaccaccctggtgttcctgtgcgtgtgcttcatcttcagagtgaagaccagaagaaagaaggccgcccagcccgtgcagaacaccgacgacgtgaaccccgtgatggtgagcggcagcagaggccaccagcaccagttccagaccggcatcgtgagcgaccaccccgccgaggccggccccatcagcgaggacgagcaggagctgcactacgccgtgctgcacttccacaaggtgcagccccaggagcccaaggtgaccgacaccgagtacagcgagatcaagatccacaagtag

SEQ ID NO: 98908 - DNA, 1125 bp, synthetic construct
  misc_feature 1..1125: note = Description of Artificial Sequence: Synthetic coding sequence
  source 1..1125: mol_type = other DNA
atgctgctgctgctgctgctgcccctgctgtggggcagagagagagtggagggccagaagagcaacagaaaggactacagcctgaccatgcagagcagcgtgaccgtgcaggagggcatgtgcgtgcacgtgagatgcagcttcagctaccccgtggacagccagaccgacagcgaccccgtgcacggctactggttcagagccggcaacgacatcagctggaaggcccccgtggccaccaacaaccccgcctgggccgtgcaggaggagaccagagacagattccacctgctgggcgacccccagaccaagaactgcaccctgagcatcagagacgccagaatgagcgacgccggcagatacttcttcagaatggagaagggcaacatcaagtggaactacaagtacgaccagctgagcgtgaacgtgaccgaccccccccagaacctgaccgtgaccgtgttccagggcgagggcaccgccagcaccgccctgggcaacagcagcagcctgagcgtgctggagggccagagcctgagactggtgtgcgccgtggacagcaacccccccgccagactgagctggacctggagaagcctgaccctgtaccccagccagcccagcaaccccctggtgctggagctgcaggtgcacctgggcgacgagggcgagttcacctgcagagcccagaacagcctgggcagccagcacgtgagcctgaacctgagcctgcagcaggagtacaccggcaagatgagacccgtgagcggcgtgctgctgggcgccgtgggcggcgccggcgccaccgccctggtgttcctgagcttctgcgtgatcttcatcgtggtgagaagctgcagaaagaagagcgccagacccgccgccgacgtgggcgacatcggcatgaaggacgccaacaccatcagaggcagcgccagccagggcaacctgaccgagagctgggccgacgacaaccccagacaccacggcctggccgcccacagcagcggcgaggagagagagatccagtacgcccccctgagcttccacaagggcgagccccaggacctgagcggccaggaggccaccaacaacgagtacagcgagatcaagatccccaagtag

SEQ ID NO: 98909 - DNA, 1404 bp, synthetic construct
  misc_feature 1..1404: note = Description of Artificial Sequence: Synthetic coding sequence
  source 1..1404: mol_type = other DNA
atgctgctgctgctgctgctgcccctgctgtggggcagagagagagtggagggccagaagagcaacagaaaggactacagcctgaccatgcagagcagcgtgaccgtgcaggagggcatgtgcgtgcacgtgagatgcagcttcagctaccccgtggacagccagaccgacagcgaccccgtgcacggctactggttcagagccggcaacgacatcagctggaaggcccccgtggccaccaacaaccccgcctgggccgtgcaggaggagaccagagacagattccacctgctgggcgacccccagaccaagaactgcaccctgagcatcagagacgccagaatgagcgacgccggcagatacttcttcagaatggagaagggcaacatcaagtggaactacaagtacgaccagctgagcgtgaacgtgaccgccctgacccacagacccaacatcctgatccccggcaccctggagagcggctgcttccagaacctgacctgcagcgtgccctgggcctgcgagcagggcaccccccccatgatcagctggatgggcaccagcgtgagccccctgcaccccagcaccaccagaagcagcgtgctgaccctgatcccccagccccagcaccacggcaccagcctgacctgccaggtgaccctgcccggcgccggcgtgaccaccaacagaaccatccagctgaacgtgagctaccccccccagaacctgaccgtgaccgtgttccagggcgagggcaccgccagcaccgccctgggcaacagcagcagcctgagcgtgctggagggccagagcctgagactggtgtgcgccgtggacagcaacccccccgccagactgagctggacctggagaagcctgaccctgtaccccagccagcccagcaaccccctggtgctggagctgcaggtgcacctgggcgacgagggcgagttcacctgcagagcccagaacagcctgggcagccagcacgtgagcctgaacctgagcctgcagcaggagtacaccggcaagatgagacccgtgagcggcgtgctgctgggcgccgtgggcggcgccggcgccaccgccctggtgttcctgagcttctgcgtgatcttcatcgtggtgagaagctgcagaaagaagagcgccagacccgccgccgacgtgggcgacatcggcatgaaggacgccaacaccatcagaggcagcgccagccagggcaacctgaccgagagctgggccgacgacaaccccagacaccacggcctggccgcccacagcagcggcgaggagagagagatccagtacgcccccctgagcttccacaagggcgagccccaggacctgagcggccaggaggccaccaacaacgagtacagcgagatcaagatccccaagtag

SEQ ID NO: 98910 - DNA, 438 bp, synthetic construct
  misc_feature 1..438: note = Description of Artificial Sequence: Synthetic coding sequence
  source 1..438: mol_type = other DNA
atgctgctgctgctgctgctgcccctgctgtggggcagagagagagtggagggccagaagagcaacagaaaggactacagcctgaccatgcagagcagcgtgaccgtgcaggagggcatgtgcgtgcacgtgagatgcagcttcagctaccccgtggacagccagaccgacagcgaccccgtgcacggctactggttcagagccggcaacgacatcagctggaaggcccccgtggccaccaacaaccccgcctgggccgtgcaggaggagaccagagacagattccacctgctgggcgacccccagaccaagaactgcaccctgagcatcagagacgccagaatgagcgacgccggcagatacttcttcagaatggagaagggcaacatcaagtggaactacaagtacgaccagctgagcgtgaacgtgaccgagtag

SEQ ID NO: 98911 - DNA, 1500 bp, synthetic construct
  misc_feature 1..1500: note = Description of Artificial Sequence: Synthetic coding sequence
  source 1..1500: mol_type = other DNA
atgctgctgctgctgctgctgctgcccctgctgtggggcaccaagggcatggagggcgacagacagtacggcgacggctacctgctgcaggtgcaggagctggtgaccgtgcaggagggcctgtgcgtgcacgtgccctgcagcttcagctacccccaggacggctggaccgacagcgaccccgtgcacggctactggttcagagccggcgacagaccctaccaggacgcccccgtggccaccaacaaccccgacagagaggtgcaggccgagacccagggcagattccagctgctgggcgacatctggagcaacgactgcagcctgagcatcagagacgccagaaagagagacaagggcagctacttcttcagactggagagaggcagcatgaagtggagctacaagagccagctgaactacaagaccaagcagctgagcgtgttcgtgaccgccctgacccacagacccgacatcctgatcctgggcaccctggagagcggccacagcagaaacctgacctgcagcgtgccctgggcctgcaagcagggcaccccccccatgatcagctggatcggcgccagcgtgagcagccccggccccaccaccgccagaagcagcgtgctgaccctgacccccaagccccaggaccacggcaccagcctgacctgccaggtgaccctgcccggcaccggcgtgaccaccaccagcaccgtgagactggacgtgagctaccccccctggaacctgaccatgaccgtgttccagggcgacgccaccgccagcaccgccctgggcaacggcagcagcctgagcgtgctggagggccagagcctgagactggtgtgcgccgtgaacagcaacccccccgccagactgagctggaccagaggcagcctgaccctgtgccccagcagaagcagcaaccccggcctgctggagctgcccagagtgcacgtgagagacgagggcgagttcacctgcagagcccagaacgcccagggcagccagcacatcagcctgagcctgagcctgcagaacgagggcaccggcaccagcagacccgtgagccaggtgaccctggccgccgtgggcggcgccggcgccaccgccctggccttcctgagcttctgcatcatcttcatcatcgtgagaagctgcagaaagaagagcgccagacccgccgccggcgtgggcgacaccggcatggaggacgccaaggccatcagaggcagcgccagccagggccccctgaccgagagctggaaggacggcaaccccctgaagaagcccccccccgccgtggcccccagcagcggcgaggagggcgagctgcactacgccaccctgagcttccacaaggtgaagccccaggacccccagggccaggaggccaccgacagcgagtacagcgagatcaagatccacaagagagagaccgccgagacccaggcctgcctgagaaaccacaaccccagcagcaaggaggtgagaggctag

SEQ ID NO: 98912 - DNA, 1221 bp, synthetic construct
  misc_feature 1..1221: note = Description of Artificial Sequence: Synthetic coding sequence
  source 1..1221: mol_type = other DNA
atgctgctgctgctgctgctgctgcccctgctgtggggcaccaagggcatggagggcgacagacagtacggcgacggctacctgctgcaggtgcaggagctggtgaccgtgcaggagggcctgtgcgtgcacgtgccctgcagcttcagctacccccaggacggctggaccgacagcgaccccgtgcacggctactggttcagagccggcgacagaccctaccaggacgcccccgtggccaccaacaaccccgacagagaggtgcaggccgagacccagggcagattccagctgctgggcgacatctggagcaacgactgcagcctgagcatcagagacgccagaaagagagacaagggcagctacttcttcagactggagagaggcagcatgaagtggagctacaagagccagctgaactacaagaccaagcagctgagcgtgttcgtgaccgaccccccctggaacctgaccatgaccgtgttccagggcgacgccaccgccagcaccgccctgggcaacggcagcagcctgagcgtgctggagggccagagcctgagactggtgtgcgccgtgaacagcaacccccccgccagactgagctggaccagaggcagcctgaccctgtgccccagcagaagcagcaaccccggcctgctggagctgcccagagtgcacgtgagagacgagggcgagttcacctgcagagcccagaacgcccagggcagccagcacatcagcctgagcctgagcctgcagaacgagggcaccggcaccagcagacccgtgagccaggtgaccctggccgccgtgggcggcgccggcgccaccgccctggccttcctgagcttctgcatcatcttcatcatcgtgagaagctgcagaaagaagagcgccagacccgccgccggcgtgggcgacaccggcatggaggacgccaaggccatcagaggcagcgccagccagggccccctgaccgagagctggaaggacggcaaccccctgaagaagcccccccccgccgtggcccccagcagcggcgaggagggcgagctgcactacgccaccctgagcttccacaaggtgaagccccaggacccccagggccaggaggccaccgacagcgagtacagcgagatcaagatccacaagagagagaccgccgagacccaggcctgcctgagaaaccacaaccccagcagcaaggaggtgagaggctag

SEQ ID NO: 98913 - DNA, 1173 bp, synthetic construct
  misc_feature 1..1173: note = Description of Artificial Sequence: Synthetic coding sequence
  source 1..1173: mol_type = other DNA
atgctgctgctgctgctgctgctgcccctgctgtggggcaccaagggcatggagggcgacagacagtacggcgacggctacctgctgcaggtgcaggagctggtgaccgtgcaggagggcctgtgcgtgcacgtgccctgcagcttcagctacccccaggacggctggaccgacagcgaccccgtgcacggctactggttcagagccggcgacagaccctaccaggacgcccccgtggccaccaacaaccccgacagagaggtgcaggccgagacccagggcagattccagctgctgggcgacatctggagcaacgactgcagcctgagcatcagagacgccagaaagagagacaagggcagctacttcttcagactggagagaggcagcatgaagtggagctacaagagccagctgaactacaagaccaagcagctgagcgtgttcgtgaccgccagcaccgccctgggcaacggcagcagcctgagcgtgctggagggccagagcctgagactggtgtgcgccgtgaacagcaacccccccgccagactgagctggaccagaggcagcctgaccctgtgccccagcagaagcagcaaccccggcctgctggagctgcccagagtgcacgtgagagacgagggcgagttcacctgcagagcccagaacgcccagggcagccagcacatcagcctgagcctgagcctgcagaacgagggcaccggcaccagcagacccgtgagccaggtgaccctggccgccgtgggcggcgccggcgccaccgccctggccttcctgagcttctgcatcatcttcatcatcgtgagaagctgcagaaagaagagcgccagacccgccgccggcgtgggcgacaccggcatggaggacgccaaggccatcagaggcagcgccagccagggccccctgaccgagagctggaaggacggcaaccccctgaagaagcccccccccgccgtggcccccagcagcggcgaggagggcgagctgcactacgccaccctgagcttccacaaggtgaagccccaggacccccagggccaggaggccaccgacagcgagtacagcgagatcaagatccacaagagagagaccgccgagacccaggcctgcctgagaaaccacaaccccagcagcaaggaggtgagaggctag

SEQ ID NO: 98914 - DNA, 1392 bp, synthetic construct
  misc_feature 1..1392: note = Description of Artificial Sequence: Synthetic coding sequence
  source 1..1392: mol_type = other DNA
atgctgctgctgctgctgcccctgctgtggggcagagagagagccgagggccagaccagcaagctgctgaccatgcagagcagcgtgaccgtgcaggagggcctgtgcgtgcacgtgccctgcagcttcagctaccccagccacggctggatctaccccggccccgtggtgcacggctactggttcagagagggcgccaacaccgaccaggacgcccccgtggccaccaacaaccccgccagagccgtgtgggaggagaccagagacagattccacctgctgggcgacccccacaccaagaactgcaccctgagcatcagagacgccagaagaagcgacgccggcagatacttcttcagaatggagaagggcagcatcaagtggaactacaagcaccacagactgagcgtgaacgtgaccgccctgacccacagacccaacatcctgatccccggcaccctggagagcggctgcccccagaacctgacctgcagcgtgccctgggcctgcgagcagggcaccccccccatgatcagctggatcggcaccagcgtgagccccctggaccccagcaccaccagaagcagcgtgctgaccctgatcccccagccccaggaccacggcaccagcctgacctgccaggtgaccttccccggcgccagcgtgaccaccaacaagaccgtgcacctgaacgtgagctaccccccccagaacctgaccatgaccgtgttccagggcgacggcaccgtgagcaccgtgctgggcaacggcagcagcctgagcctgcccgagggccagagcctgagactggtgtgcgccgtggacgccgtggacagcaacccccccgccagactgagcctgagctggagaggcctgaccctgtgccccagccagcccagcaaccccggcgtgctggagctgccctgggtgcacctgagagacgccgccgagttcacctgcagagcccagaaccccctgggcagccagcaggtgtacctgaacgtgagcctgcagagcaaggccaccagcggcgtgacccagggcgtggtgggcggcgccggcgccaccgccctggtgttcctgagcttctgcgtgatcttcgtggtggtgagaagctgcagaaagaagagcgccagacccgccgccggcgtgggcgacaccggcatcgaggacgccaacgccgtgagaggcagcgccagccagggccccctgaccgagccctgggccgaggacagcccccccgaccagcccccccccgccagcgccagaagcagcgtgggcgagggcgagctgcagtacgccagcctgagcttccagatggtgaagccctgggacagcagaggccaggaggccaccgacaccgagtacagcgagatcaagatccacagatag

SEQ ID NO: 98915 - DNA, 1440 bp, synthetic construct
  misc_feature 1..1440: note = Description of Artificial Sequence: Synthetic coding sequence
  source 1..1440: mol_type = other DNA
atgctgctgctgctgctgcccctgctgtggggcagagagagagccgagggccagaccagcaagctgctgaccatgcagagcagcgtgaccgtgcaggagggcctgtgcgtgcacgtgccctgcagcttcagctaccccagccacggctggatctaccccggccccgtggtgcacggctactggttcagagagggcgccaacaccgaccaggacgcccccgtggccaccaacaaccccgccagagccgtgtgggaggagaccagagacagattccacctgctgggcgacccccacaccaagaactgcaccctgagcatcagagacgccagaagaagcgacgccggcagatacttcttcagaatggagaagggcagcatcaagtggaactacaagcaccacagactgagcgtgaacgtgaccgccctgacccacagacccaacatcctgatccccggcaccctggagagcggctgcccccagaacctgacctgcagcgtgccctgggcctgcgagcagggcaccccccccatgatcagctggatcggcaccagcgtgagccccctggaccccagcaccaccagaagcagcgtgctgaccctgatcccccagccccaggaccacggcaccagcctgacctgccaggtgaccttccccggcgccagcgtgaccaccaacaagaccgtgcacctgaacgtgagctaccccccccagaacctgaccatgaccgtgttccagggcgacggcaccgtgagcaccgtgctgggcaacggcagcagcctgagcctgcccgagggccagagcctgagactggtgtgcgccgtggacgccgtggacagcaacccccccgccagactgagcctgagctggagaggcctgaccctgtgccccagccagcccagcaaccccggcgtgctggagctgccctgggtgcacctgagagacgccgccgagttcacctgcagagcccagaaccccctgggcagccagcaggtgtacctgaacgtgagcctgcagagcaaggccaccagcggcgtgacccagggcgtggtgggcggcgccggcgccaccgccctggtgttcctgagcttctgcgtgatcttcgtggtggtgagaagctgcagaaagaagagcgccagacccgccgccggcgtgggcgacaccggcatcgaggacgccaacgccgtgagaggcagcgccagccagatcctgaaccacttcatcggcttccccaccttcctgggcctgggcttcgagttcctgctgaacctgagagacctgtgctgccaccccgacagcgagttctacgtgtaccacttcagccacttcagactgatcaagaacatcgccggcgagatcgtgtggagcctggagggcaagatcctgtggctgctggacgtgagcgacttcttccactggttcttcctgatctgcgtgggctag

SEQ ID NO: 98916 - DNA, 735 bp, synthetic construct
  misc_feature 1..735: note = Description of Artificial Sequence: Synthetic coding sequence
  source 1..735: mol_type = other DNA
atggccgccgccgccagccccgccttcctgctgtgcctgcccctgctgcacctgctgagcggctggagcagagccggctgggtggacacccactgcctgtgctacgacttcatcatcacccccaagagcagacccgagccccagtggtgcgaggtgcagggcctggtggacgagagacccttcctgcactacgactgcgtgaaccacaaggccaaggccttcgccagcctgggcaagaaggtgaacgtgaccaagacctgggaggagcagaccgagaccctgagagacgtggtggacttcctgaagggccagctgctggacatccaggtggagaacctgatccccatcgagcccctgaccctgcaggccagaatgagctgcgagcacgaggcccacggccacggcagaggcagctggcagttcctgttcaacggccagaagttcctgctgttcgacagcaacaacagaaagtggaccgccctgcaccccggcgccaagaagatgaccgagaagtgggagaagaacagagacgtgaccatgttcttccagaagatcagcctgggcgactgcaagatgtggctggaggagttcctgatgtactgggagcagatgctggaccccaccaagccccccagcctggcccccggcaccacccagcccaaggccatggccaccaccctgagcccctggagcctgctgatcatcttcctgtgcttcatcctggccggcagatag

SEQ ID NO: 98917 - DNA, 1248 bp, synthetic construct
  misc_feature 1..1248: note = Description of Artificial Sequence: Synthetic coding sequence
  source 1..1248: mol_type = other DNA
atgaccggcgagagacccagcaccgccctgcccgacagaagatggggccccagaatcctgggcttctggggcggctgcagagtgtgggtgttcgccgccatcttcctgctgctgagcctggccgccagctggagcaaggccgagaacgacttcggcctggtgcagcccctggtgaccatggagcagctgctgtgggtgagcggcagacagatcggcagcgtggacaccttcagaatccccctgatcaccgccacccccagaggcaccctgctggccttcgccgaggccagaaagatgagcagcagcgacgagggcgccaagttcatcgccctgagaagaagcatggaccagggcagcacctggagccccaccgccttcatcgtgaacgacggcgacgtgcccgacggcctgaacctgggcgccgtggtgagcgacgtggagaccggcgtggtgttcctgttctacagcctgtgcgcccacaaggccggctgccaggtggccagcaccatgctggtgtggagcaaggacgacggcgtgagctggagcacccccagaaacctgagcctggacatcggcaccgaggtgttcgcccccggccccggcagcggcatccagaagcagagagagcccagaaagggcagactgatcgtgtgcggccacggcaccctggagagagacggcgtgttctgcctgctgagcgacgaccacggcgccagctggagatacggcagcggcgtgagcggcatcccctacggccagcccaagcaggagaacgacttcaaccccgacgagtgccagccctacgagctgcccgacggcagcgtggtgatcaacgccagaaaccagaacaactaccactgccactgcagaatcgtgctgagaagctacgacgcctgcgacaccctgagacccagagacgtgaccttcgaccccgagctggtggaccccgtggtggccgccggcgccgtggtgaccagcagcggcatcgtgttcttcagcaaccccgcccaccccgagttcagagtgaacctgaccctgagatggagcttcagcaacggcaccagctggagaaaggagaccgtgcagctgtggcccggccccagcggctacagcagcctggccaccctggagggcagcatggacggcgaggagcaggccccccagctgtacgtgctgtacgagaagggcagaaaccactacaccgagagcatcagcgtggccaagatcagcgtgtacggcaccctgtag

SEQ ID NO: 98918 - DNA, 1248 bp, synthetic construct; identical to SEQ ID NO: 98917
  misc_feature 1..1248: note = Description of Artificial Sequence: Synthetic coding sequence
  source 1..1248: mol_type = other DNA

SEQ ID NO: 98919 - DNA, 1248 bp, synthetic construct; identical to SEQ ID NO: 98917
  misc_feature 1..1248: note = Description of Artificial Sequence: Synthetic coding sequence
  source 1..1248: mol_type = other DNA

SEQ ID NO: 98920 - DNA, 1248 bp, synthetic construct; identical to SEQ ID NO: 98917
  misc_feature 1..1248: note = Description of Artificial Sequence: Synthetic coding sequence
  source 1..1248: mol_type = other DNA

SEQ ID NO: 98921 - DNA, 1248 bp, synthetic construct; identical to SEQ ID NO: 98917
  misc_feature 1..1248: note = Description of Artificial Sequence: Synthetic coding sequence
  source 1..1248: mol_type = other DNA

SEQ ID NO: 98922 - DNA, 1248 bp, synthetic construct; identical to SEQ ID NO: 98917
  misc_feature 1..1248: note = Description of Artificial Sequence: Synthetic coding sequence
  source 1..1248: mol_type = other DNA

SEQ ID NO: 98923 - DNA, 1248 bp, synthetic construct; identical to SEQ ID NO: 98917
  misc_feature 1..1248: note = Description of Artificial Sequence: Synthetic coding sequence
  source 1..1248: mol_type = other DNA

SEQ ID NO: 98924 - DNA, 2277 bp, synthetic construct
  misc_feature 1..2277: note = Description of Artificial Sequence: Synthetic coding sequence
  source 1..2277: mol_type = other DNA
atggccgtgagcgccggcagcgccagaaccagccccagcagcgacaaggtgcagaaggacaaggccgagctgatcagcggccccagacaggacagcagaatcggcaagctgctgggcttcgagtggaccgacctgagcagctggagaagactggtgaccctgctgaacagacccaccgaccccgccagcctggccgtgttcagattcctgttcggcttcctgatggtgctggacatcccccaggagagaggcctgagcagcctggacagaaagtacctggacggcctggacgtgtgcagattccccctgctggacgccctgagacccctgcccctggactggatgtacctggtgtacaccatcatgttcctgggcgccctgggcatgatgctgggcctgtgctacagaatcagctgcgtgctgttcctgctgccctactggtacgtgttcctgctggacaagaccagctggaacaaccacagctacctgtacggcctgctggccttccagctgaccttcatggacgccaaccactactggagcgtggacggcctgctgaacgcccacagaagaaacgcccacgtgcccctgtggaactacgccgtgctgagaggccagatcttcatcgtgtacttcatcgccggcgtgaagaagctggacgccgactgggtggagggctacagcatggagtacctgagcagacactggctgttcagccccttcaagctgctgctgagcgaggagctgaccagcctgctggtggtgcactggggcggcctgctgctggacctgagcgccggcttcctgctgttcttcgacgtgagcagaagcatcggcctgttcttcgtgagctacttccactgcatgaacagccagctgttcagcatcggcatgttcagctacgtgatgctggccagcagccccctgttctgcagccccgagtggcccagaaagctggtgagctactgccccagaagactgcagcagctgctgcccctgaaggccgccccccagcccagcgtgagctgcgtgtacaagagaagcagaggcaagagcggccagaagcccggcctgagacaccagctgggcgccgccttcaccctgctgtacctgctggagcagctgttcctgccctacagccacttcctgacccagggctacaacaactggaccaacggcctgtacggctacagctgggacatgatggtgcacagcagaagccaccagcacgtgaagatcacctacagagacggcagaaccggcgagctgggctacctgaaccccggcgtgttcacccagagcagaagatggaaggaccacgccgacatgctgaagcagtacgccacctgcctgagcagactgctgcccaagtacaacgtgaccgagccccagatctacttcgacatctgggtgagcatcaacgacagattccagcagagaatcttcgaccccagagtggacatcgtgcaggccgcctggagccccttccagagaaccagctgggtgcagcccctgctgatggacctgagcccctggagagccaagctgcaggagatcaagagcagcctggacaaccacaccgaggtggtgttcatcgccgacttccccggcctgcacctggagaacttcgtgagcgaggacctgggcaacaccagcatccagctgctgcagggcgaggtgaccgtggagctggtggccgagcagaagaaccagaccctgagagagggcgagaagatgcagctgcccgccggcgagtaccacaaggtgtacaccaccagccccagccccagctgctacatgtacgtgtacgtgaacaccaccgagctggccctggagcaggacctggcctacctgcaggagctgaaggagaaggtggagaacggcagcgagaccggccccctgccccccgagctgcagcccctgctggagggcgaggtgaagggcggccccgagcccacccccctggtgcagaccttcctgagaagacagcagagactgcaggagatcgagagaagaagaaacacccccttccacgagagattcttcagattcctgctgagaaagctgtacgtgttcagaagaagcttcctgatgacctgcatcagcctgagaaacctgatcctgggcagacccagcctggagcagctggcccaggaggtgacctacgccaacctgagacccttcgaggccgtgggcgagctgaaccccagcaacaccgacagcagccacagcaacccccccgagagcaaccccgaccccgtgcacagcgagttctag

SEQ ID NO: 98925 - DNA, 1386 bp, synthetic construct
  misc_feature 1..1386: note = Description of Artificial Sequence: Synthetic coding sequence
  source 1..1386: mol_type = other DNA
atgagacccgccgacctgccccccagacccatggaggagagccccgccagcagcagcgcccccaccgagaccgaggagcccggcagcagcgccgaggtgatggaggaggtgaccacctgcagcttcaacagccccctgttcagacaggaggacgacagaggcatcacctacagaatccccgccctgctgtacatcccccccacccacaccttcctggccttcgccgagaagagaagcaccagaagagacgaggacgccctgcacctggtgctgagaagaggcctgagaatcggccagctggtgcagtggggccccctgaagcccctgatggaggccaccctgcccggccacagaaccatgaacccctgccccgtgtgggagcagaagagcggctgcgtgttcctgttcttcatctgcgtgagaggccacgtgaccgagagacagcagatcgtgagcggcagaaacgccgccagactgtgcttcatctacagccaggacgccggctgcagctggagcgaggtgagagacctgaccgaggaggtgatcggcagcgagctgaagcactgggccaccttcgccgtgggccccggccacggcatccagctgcagagcggcagactggtgatccccgcctacacctactacatccccagctggttcttctgcttccagctgccctgcaagaccagaccccacagcctgatgatctacagcgacgacctgggcgtgacctggcaccacggcagactgatcagacccatggtgaccgtggagtgcgaggtggccgaggtgaccggcagagccggccaccccgtgctgtactgcagcgccagaacccccaacagatgcagagccgaggccctgagcaccgaccacggcgagggcttccagagactggccctgagcagacagctgtgcgagcccccccacggctgccagggcagcgtggtgagcttcagacccctggagatcccccacagatgccaggacagcagcagcaaggacgcccccaccatccagcagagcagccccggcagcagcctgagactggaggaggaggccggcacccccagcgagagctggctgctgtacagccaccccaccagcagaaagcagagagtggacctgggcatctacctgaaccagacccccctggaggccgcctgctggagcagaccctggatcctgcactgcggcccctgcggctacagcgacctggccgccctggaggaggagggcctgttcggctgcctgttcgagtgcggcaccaagcaggagtgcgagcagatcgccttcagactgttcacccacagagagatcctgagccacctgcagggcgactgcaccagccccggcagaaaccccagccagttcaagagcaactag

SEQ ID NO: 98926 - DNA, 1386 bp, synthetic construct; identical to SEQ ID NO: 98925
  misc_feature 1..1386: note = Description of Artificial Sequence: Synthetic coding sequence
  source 1..1386: mol_type = other DNA

SEQ ID NO: 98927 - DNA, 1287 bp, synthetic construct
  misc_feature 1..1287: note = Description of Artificial Sequence: Synthetic coding sequence
  source 1..1287: mol_type = other DNA
atggaggaggtgaccacctgcagcttcaacagccccctgttcagacaggaggacgacagaggcatcacctacagaatccccgccctgctgtacatcccccccacccacaccttcctggccttcgccgagaagagaagcaccagaagagacgaggacgccctgcacctggtgctgagaagaggcctgagaatcggccagctggtgcagtggggccccctgaagcccctgatggaggccaccctgcccggccacagaaccatgaacccctgccccgtgtgggagcagaagagcggctgcgtgttcctgttcttcatctgcgtgagaggccacgtgaccgagagacagcagatcgtgagcggcagaaacgccgccagactgtgcttcatctacagccaggacgccggctgcagctggagcgaggtgagagacctgaccgaggaggtgatcggcagcgagctgaagcactgggccaccttcgccgtgggccccggccacggcatccagctgcagagcggcagactggtgatccccgcctacacctactacatccccagctggttcttctgcttccagctgccctgcaagaccagaccccacagcctgatgatctacagcgacgacctgggcgtgacctggcaccacggcagactgatcagacccatggtgaccgtggagtgcgaggtggccgaggtgaccggcagagccggccaccccgtgctgtactgcagcgccagaacccccaacagatgcagagccgaggccctgagcaccgaccacggcgagggcttccagagactggccctgagcagacagctgtgcgagcccccccacggctgccagggcagcgtggtgagcttcagacccctggagatcccccacagatgccaggacagcagcagcaaggacgcccccaccatccagcagagcagccccggcagcagcctgagactggaggaggaggccggcacccccagcgagagctggctgctgtacagccaccccaccagcagaaagcagagagtggacctgggcatctacctgaaccagacccccctggaggccgcctgctggagcagaccctggatcctgcactgcggcccctgcggctacagcgacctggccgccctggaggaggagggcctgttcggctgcctgttcgagtgcggcaccaagcaggagtgcgagcagatcgccttcagactgttcacccacagagagatcctgagccacctgcagggcgactgcaccagccccggcagaaaccccagccagttcaagagcaactag

SEQ ID NO: 98928 - DNA, 1059 bp, synthetic construct
  misc_feature 1..1059: note = Description of Artificial Sequence: Synthetic coding sequence
  source 1..1059: mol_type = other DNA
atggaggccaccctgcccggccacagaaccatgaacccctgccccgtgtgggagcagaagagcggctgcgtgttcctgttcttcatctgcgtgagaggccacgtgaccgagagacagcagatcgtgagcggcagaaacgccgccagactgtgcttcatctacagccaggacgccggctgcagctggagcgaggtgagagacctgaccgaggaggtgatcggcagcgagctgaagcactgggccaccttcgccgtgggccccggccacggcatccagctgcagagcggcagactggtgatccccgcctacacctactacatccccagctggttcttctgcttccagctgccctgcaagaccagaccccacagcctgatgatctacagcgacgacctgggcgtgacctggcaccacggcagactgatcagacccatggtgaccgtggagtgcgaggtggccgaggtgaccggcagagccggccaccccgtgctgtactgcagcgccagaacccccaacagatgcagagccgaggccctgagcaccgaccacggcgagggcttccagagactggccctgagcagacagctgtgcgagcccccccacggctgccagggcagcgtggtgagcttcagacccctggagatcccccacagatgccaggacagcagcagcaaggacgcccccaccatccagcagagcagccccggcagcagcctgagactggaggaggaggccggcacccccagcgagagctggctgctgtacagccaccccaccagcagaaagcagagagtggacctgggcatctacctgaaccagacccccctggaggccgcctgctggagcagaccctggatcctgcactgcggcccctgcggctacagcgacctggccgccctggaggaggagggcctgttcggctgcctgttcgagtgcggcaccaagcaggagtgcgagcagatcgccttcagactgttcacccacagagagatcctgagccacctgcagggcgactgcaccagccccggcagaaaccccagccagttcaagagcaactag

SEQ ID NO: 98929 - DNA, 1203 bp, synthetic construct
  misc_feature 1..1203: note = Description of Artificial Sequence: Synthetic coding sequence
  source 1..1203: mol_type = other DNA
atggccaccctgctgctgctgctgggcgtgctggtggtgagccccgacgccctgggcagcaccaccgccgtgcagacccccaccagcggcgagcccctggtgagcaccagcgagcccctgagcagcaagatgtacaccaccagcatcaccagcgaccccaaggccgacagcaccggcgaccagaccagcgccctgccccccagcaccagcatcaacgagggcagccccctgtggaccagcatcggcgccagcaccggcagccccctgcccgagcccaccacctaccaggaggtgagcatcaagatgagcagcgtgccccaggagaccccccacgccaccagccaccccgccgtgcccatcaccgccaacagcctgggcagccacaccgtgaccggcggcaccatcaccaccaacagccccgagaccagcagcagaaccagcggcgcccccgtgaccaccgccgccagcagcctggagaccagcagaggcaccagcggcccccccctgaccatggccaccgtgagcctggagaccagcaagggcaccagcggcccccccgtgaccatggccaccgacagcctggagaccagcaccggcaccaccggcccccccgtgaccatgaccaccggcagcctggagcccagcagcggcgccagcggcccccaggtgagcagcgtgaagctgagcaccatgatgagccccaccaccagcaccaacgccagcaccgtgcccttcagaaaccccgacgagaacagcagaggcatgctgcccgtggccgtgctggtggccctgctggccgtgatcgtgctggtggccctgctgctgctgtggagaagaagacagaagagaagaaccggcgccctggtgctgagcagaggcggcaagagaaacggcgtggtggacgcctgggccggccccgcccaggtgcccgaggagggcgccgtgaccgtgaccgtgggcggcagcggcggcgacaagggcagcggcttccccgacggcgagggcagcagcagaagacccaccctgaccaccttcttcggcagaagaaagagcagacagggcagcctggccatggaggagctgaagagcggcagcggccccagcctgaagggcgaggaggagcccctggtggccagcgaggacggcgccgtggacgcccccgcccccgacgagcccgagggcggcgacggcgccgccccctag

SEQ ID NO: 98930 - DNA, 1203 bp, synthetic construct; identical to SEQ ID NO: 98929
  misc_feature 1..1203: note = Description of Artificial Sequence: Synthetic coding sequence
  source 1..1203: mol_type = other DNA

SEQ ID NO: 98931 - DNA, 1068 bp, synthetic construct
  misc_feature 1..1068: note = Description of Artificial Sequence: Synthetic coding sequence
  source 1..1068: mol_type = other DNA
atggccaccctgctgctgctgctgggcgtgctggtggtgagccccgacgccctgggcagcaccaccgccgtgcagacccccaccagcggcgagcccctggtgagcaccagcgagcccctgagcagcaagatgtacaccaccagcatcaccagcgaccccaaggccgacagcaccggcgaccagaccagcgccctgccccccagcaccagcatcaacgagggcagccccctgtggaccagcatcggcgccagcaccggcagccccctgcccgagcccaccacctaccaggaggtgagcatcaagatgagcagcgtgccccaggagaccccccacgccaccagccaccccgccgtgcccatcaccgccaacagcctgggcagccacaccgtgaccggcggcaccatcaccaccaacagccccgagaccagcagcagaaccagcggcgcccccgtgaccaccgccgccagcagcctggagaccagcagaggcaccagcggcccccccctgaccatggccaccgtgagcctggagaccagcaagggcaccagcggcccccccgtgaccatggccaccgacagcctggagaccagcaccggcaccaccggcccccccgtgaccatgaccaccggcagcctggagcccagcagcggcgccagcggcccccaggtgagcagcgtgaagctgagcaccatgatgagccccaccaccagcaccaacgccagcaccgtgcccttcagaaaccccgacgagaacagcagaggcatgctgcccgtggccgtgctggtggccctgctggccgtgatcgtgctggtggccctgctgctgctgtggagaagaagacagaagagaagaaccggcgccctggtgctgagcagaggcggcaagagaaacggcgtggtggacgcctgggccggccccgcccaggtgcccgaggagggcgccgtgaccgtgaccgtgggcggcagcggcggcgacaagggcagcggcttccccgacggcgagggcagcagcagaagacccaccctgaccaccttcttcggcagaagaaagagcagacagggcagctag

SEQ ID NO: 98932 - DNA, 672 bp, synthetic construct
  misc_feature 1..672: note = Description of Artificial Sequence: Synthetic coding sequence
  source 1..672: mol_type = other DNA
atgcagtgggccgtgggcagaagatgggcctgggccgccctgctgctggccgtggccgccgtgctgacccaggtggtgtggctgtggctgggcacccagagcttcgtgttccagagagaggagatcgcccagctggccagacagtacgccggcctggaccacgagctggccttcagcagactgatcgtggagctgagaagactgcaccccggccacgtgctgcccgacgaggagctgcagtgggtgttcgtgaacgccggcggctggatgggcgccatgtgcctgctgcacgccagcctgagcgagtacgtgctgctgttcggcaccgccctgggcagcagaggccacagcggcagatactgggccgagatcagcgacaccatcatcagcggcaccttccaccagtggagagagggcaccaccaagagcgaggtgttctaccccggcgagaccgtggtgcacggccccggcgaggccaccgccgtggagtggggccccaacacctggatggtggagtacggcagaggcgtgatccccagcaccctggccttcgccctggccgacaccgtgttcagcacccaggacttcctgaccctgttctacaccctgagaagctacgccagaggcctgagactggagctgaccacctacctgttcggccaggacccctag

SEQ ID NO: 98933 - DNA, 570 bp, synthetic construct
  misc_feature 1..570: note = Description of Artificial Sequence: Synthetic coding sequence
  source 1..570: mol_type = other DNA
atgcagtgggccgtgggcagaagatgggcctgggccgccctgctgctggccgtggccgccgtgctgacccaggtggtgtggctgtggctgggcctggaccacgagctggccttcagcagactgatcgaggagctgcagtgggtgttcgtgaacgccggcggctggatgggcgccatgtgcctgctgcacgccagcctgagcgagtacgtgctgctgttcggcaccgccctgggcagcagaggccacagcggcagatactgggccgagatcagcgacaccatcatcagcggcaccttccaccagtggagagagggcaccaccaagagcgaggtgttctaccccggcgagaccgtggtgcacggccccggcgaggccaccgccgtggagtggggccccaacacctggatggtggagtacggcagaggcgtgatccccagcaccctggccttcgccctggccgacaccgtgttcagcacccaggacttcctgaccctgttctacaccctgagaagctacgccagaggcctgagactggagctgaccacctacctgttcggccaggacccctag

SEQ ID NO: 98934 - DNA, 405 bp, synthetic construct
  misc_feature 1..405: note = Description of Artificial Sequence: Synthetic coding sequence
  source 1..405: mol_type = other DNA
atgggcgccatgtgcctgctgcacgccagcctgagcgagtacgtgctgctgttcggcaccgccctgggcagcagaggccacagcggcagatactgggccgagatcagcgacaccatcatcagcggcaccttccaccagtggagagagggcaccaccaagagcgaggtgttctaccccggcgagaccgtggtgcacggccccggcgaggccaccgccgtggagtggggccccaacacctggatggtggagtacggcagaggcgtgatccccagcaccctggccttcgccctggccgacaccgtgttcagcacccaggacttcctgaccctgttctacaccctgagaagctacgccagaggcctgagactggagctgaccacctacctgttcggccaggacccctag

SEQ ID NO: 98935 - DNA, 579 bp, synthetic construct
  misc_feature 1..579: note = Description of Artificial Sequence: Synthetic coding sequence
  source 1..579: mol_type = other DNA
atgcagtgggccgtgggcagaagatgggcctgggccgccctgctgctggccgtggccgccgtgctgacccaggtggtgtggctgtggctgggcacccagagcttcgtgttccagagagaggagatcgcccagctggccagacagtacgccggcctggaccacgagctggccttcagcagactgatcgtggagctgagaagactgcaccccggccacgtgctgcccgacgaggagctgcagtgggtgttcgtgaacgccggcggctggatgggcgccatgtgcctgctgcacgccagcctgagcgagtacgtgctgctgttcggcaccgccctgggcagcagaggccacagcggcgagaccgtggtgcacggccccggcgaggccaccgccgtggagtggggccccaacacctggatggtggagtacggcagaggcgtgatccccagcaccctggccttcgccctggccgacaccgtgttcagcacccaggacttcctgaccctgttctacaccctgagaagctacgccagaggcctgagactggagctgaccacctacctgttcggccaggacccctag

SEQ ID NO: 98936 - DNA, 2916 bp, synthetic construct
  misc_feature 1..2916: note = Description of Artificial Sequence: Synthetic coding sequence
  source 1..2916: mol_type = other DNA
atgggcgtggccggcagaaacagacccggcgccgcctgggccgtgctgctgctgctgctgctgctgccccccctgctgctgctggccggcgccgtgccccccggcagaggcagagccgccggcccccaggaggacgtggacgagtgcgcccagggcctggacgactgccacgccgacgccctgtgccagaacacccccaccagctacaagtgcagctgcaagcccggctaccagggcgagggcagacagtgcgaggacatcgacgagtgcggcaacgagctgaacggcggctgcgtgcacgactgcctgaacatccccggcaactacagatgcacctgcttcgacggcttcatgctggcccacgacggccacaactgcctggacgtggacgagtgcctggagaacaacggcggctgccagcacacctgcgtgaacgtgatgggcagctacgagtgctgctgcaaggagggcttcttcctgagcgacaaccagcacacctgcatccacagaagcgaggagggcctgagctgcatgaacaaggaccacggctgcagccacatctgcaaggaggcccccagaggcagcgtggcctgcgagtgcagacccggcttcgagctggccaagaaccagagagactgcatcctgacctgcaaccacggcaacggcggctgccagcacagctgcgacgacaccgccgacggccccgagtgcagctgccacccccagtacaagatgcacaccgacggcagaagctgcctggagagagaggacaccgtgctggaggtgaccgagagcaacaccaccagcgtggtggacggcgacaagagagtgaagagaagactgctgatggagacctgcgccgtgaacaacggcggctgcgacagaacctgcaaggacaccagcaccggcgtgcactgcagctgccccgtgggcttcaccctgcagctggacggcaagacctgcaaggacatcgacgagtgccagaccagaaacggcggctgcgaccacttctgcaagaacatcgtgggcagcttcgactgcggctgcaagaagggcttcaagctgctgaccgacgagaagagctgccaggacgtggacgagtgcagcctggacagaacctgcgaccacagctgcatcaaccaccccggcaccttcgcctgcgcctgcaacagaggctacaccctgtacggcttcacccactgcggcgacaccaacgagtgcagcatcaacaacggcggctgccagcaggtgtgcgtgaacaccgtgggcagctacgagtgccagtgccaccccggctacaagctgcactggaacaagaaggactgcgtggaggtgaagggcctgctgcccaccagcgtgagccccagagtgagcctgcactgcggcaagagcggcggcggcgacggctgcttcctgagatgccacagcggcatccacctgagcagcggcctgcagggcgcctacagcgtgacctgcggcagcagcagccccctgagaaacaagcagcagaagagcaacgacagcgccttcggcgacgtgaccaccatcagaaccagcgtgaccttcaagctgaacgagggcaagtgcagcctgaagaacgccgagctgttccccgagggcctgagacccgccctgcccgagaagcacagcagcgtgaaggagagcttcagatacgtgaacctgacctgcagcagcggcaagcaggtgcccggcgcccccggcagacccagcacccccaaggagatgttcatcaccgtggagttcgagctggagaccaaccagaaggaggtgaccgccagctgcgacctgagctgcatcgtgaagagaaccgagaagagactgagaaaggccatcagaaccctgagaaaggccgtgcacagagagcagttccacctgcagctgagcggcatgaacctggacgtggccaagaagccccccagaaccagcgagagacaggccgagagctgcggcgtgggccagggccacgccgagaaccagtgcggcctgtgccagcccggcgagtacagcgccgacggcttcgccccctgccacctgtgcgccctgggcaccttccagcccgaggccggcagaaccagctgcttcccctgcggcggcggcctggccaccaagcaccagggcgccaccagcttccaggactgcgagaccagagtgcagtgcagccccggccacttctacaacaccaccacccacagatgcatcagatgccccgtgggcacctaccagcccgagttcggcaagaacaactgcgtgagctgccccggcaacaccaccaccgacttcgacggcagcaccaacatcacccagtgcaagaacagaagatgcggcggcgagctgggcgacttcaccggctacatcgagagccccaactaccccggcaactaccccgccaacaccgagtgcacctggaccatcaaccccccccccaagagaagaatcctgatcgtggtgcccgagatcttcctgcccatcgaggacgactgcggcgactacctggtgatgagaaagaccagcagcagcaacagcgtgaccacctacgagacctgccagacctacgagagacccatcgccttcaccagcagaagcaagaagctgtggatccagttcaagagcaacgagggcaacagcgccagaggcttccaggtgccctacgtgacctacgacgaggactaccaggagctgatcgaggacatcgtgagagacggcagactgtacgccagcgagaaccaccaggagatcctgaaggacaagaagctgatcaaggccctgttcgacgtgctggcccacccccagaactacttcaagtacaccgcccaggagagcagagagatgttccccagaagcttcatcagactgctgagaagcaaggtgagcagattcctgagaccctacaagtag

SEQ ID NO: 98937 - DNA, 1044 bp, synthetic construct
  misc_feature 1..1044: note = Description of Artificial Sequence: Synthetic coding sequence
  source 1..1044: mol_type = other DNA
atgggcgccgccgccgtgagatggcacctgtgcgtgctgctggccctgggcaccagaggcagactggccggcggcagcggcctgcccggcagcgtggacgtggacgagtgcagcgagggcaccgacgactgccacatcgacgccatctgccagaacacccccaagagctacaagtgcctgtgcaagcccggctacaagggcgagggcaagcagtgcgaggacatcgacgagtgcgagaacgactactacaacggcggctgcgtgcacgagtgcatcaacatccccggcaactacagatgcacctgcttcgacggcttcatgctggcccacgacggccacaactgcctggacgtggacgagtgccaggacaacaacggcggctgccagcagatctgcgtgaacgccatgggcagctacgagtgccagtgccacagcggcttcttcctgagcgacaaccagcacacctgcatccacagaagcaacgagggcatgaactgcatgaacaaggaccacggctgcgcccacatctgcagagagacccccaagggcggcgtggcctgcgactgcagacccggcttcgacctggcccagaaccagaaggactgcaccctgacctgcaactacggcaacggcggctgccagcacagctgcgaggacaccgacaccggccccacctgcggctgccaccagaagtacgccctgcacagcgacggcagaacctgcatcgagaaggacgaggccgccatcgagagaagccagttcaacgccaccagcgtggccgacgtggacaagagagtgaagagaagactgctgatggagacctgcgccgtgaacaacggcggctgcgacagaacctgcaaggacaccgccaccggcgtgagatgcagctgccccgtgggcttcaccctgcagcccgacggcaagacctgcaagggccagcacgtggagctgtgcggctgcccctgcctgtactggcccggccaggagcccccctgcgcctgcatcgccggccccagagccggcctgaacggcggccacgtgtag

SEQ ID NO: 98938 - DNA, 2967 bp, synthetic construct
  misc_feature 1..2967: note = Description of Artificial Sequence: Synthetic coding sequence
  source 1..2967: mol_type = other DNA
atgggcgccgccgccgtgagatggcacctgtgcgtgctgctggccctgggcaccagaggcagactggccggcggcagcggcctgcccggcagcgtggacgtggacgagtgcagcgagggcaccgacgactgccacatcgacgccatctgccagaacacccccaagagctacaagtgcctgtgcaagcccggctacaagggcgagggcaagcagtgcgaggacatcgacgagtgcgagaacgactactacaacggcggctgcgtgcacgagtgcatcaacatccccggcaactacagatgcacctgcttcgacggcttcatgctggcccacgacggccacaactgcctggacgtggacgagtgccaggacaacaacggcggctgccagcagatctgcgtgaacgccatgggcagctacgagtgccagtgccacagcggcttcttcctgagcgacaaccagcacacctgcatccacagaagcaacgagggcatgaactgcatgaacaaggaccacggctgcgcccacatctgcagagagacccccaagggcggcgtggcctgcgactgcagacccggcttcgacctggcccagaaccagaaggactgcaccctgacctgcaactacggcaacggcggctgccagcacagctgcgaggacaccgacaccggccccacctgcggctgccaccagaagtacgccctgcacagcgacggcagaacctgcatcgagacctgcgccgtgaacaacggcggctgcgacagaacctgcaaggacaccgccaccggcgtgagatgcagctgccccgtgggcttcaccctgcagcccgacggcaagacctgcaaggacatcaacgagtgcctggtgaacaacggcggctgcgaccacttctgcagaaacaccgtgggcagcttcgagtgcggctgcagaaagggctacaagctgctgaccgacgagagaacctgccaggacatcgacgagtgcagcttcgagagaacctgcgaccacatctgcatcaacagccccggcagcttccagtgcctgtgccacagaggctacatcctgtacggcaccacccactgcggcgacgtggacgagtgcagcatgagcaacggcagctgcgaccagggctgcgtgaacaccaagggcagctacgagtgcgtgtgcccccccggcagaagactgcactggaacggcaaggactgcgtggagaccggcaagtgcctgagcagagccaagaccagccccagagcccagctgagctgcagcaaggccggcggcgtggagagctgcttcctgagctgccccgcccacaccctgttcgtgcccgacagcgagaacagctacgtgctgagctgcggcgtgcccggcccccagggcaaggccctgcagaagagaaacggcaccagcagcggcctgggccccagctgcagcgacgcccccaccacccccatcaagcagaaggccagattcaagatcagagacgccaagtgccacctgagaccccacagccaggccagagccaaggagaccgccagacagcccctgctggaccactgccacgtgaccttcgtgaccctgaagtgcgacagcagcaagaagagaagaagaggcagaaagagccccagcaaggaggtgagccacatcaccgccgagttcgagatcgagaccaagatggaggaggccagcgacacctgcgaggccgactgcctgagaaagagagccgagcagagcctgcaggccgccatcaagaccctgagaaagagcatcggcagacagcagttctacgtgcaggtgagcggcaccgagtacgaggtggcccagagacccgccaaggccctggagggccagggcgcctgcggcgccggccaggtgctgcaggacagcaagtgcgtggcctgcggccccggcacccacttcggcggcgagctgggccagtgcgtgagctgcatgcccggcacctaccaggacatggagggccagctgagctgcaccccctgccccagcagcgacggcctgggcctgcccggcgccagaaacgtgagcgagtgcggcggccagtgcagccccggcttcttcagcgccgacggcttcaagccctgccaggcctgccccgtgggcacctaccagcccgagcccggcagaaccggctgcttcccctgcggcggcggcctgctgaccaagcacgagggcaccaccagcttccaggactgcgaggccaaggtgcactgcagccccggccaccactacaacaccaccacccacagatgcatcagatgccccgtgggcacctaccagcccgagttcggccagaaccactgcatcacctgccccggcaacaccagcaccgacttcgacggcagcaccaacgtgacccactgcaagaaccagcactgcggcggcgagctgggcgactacaccggctacatcgagagccccaactaccccggcgactaccccgccaacgccgagtgcgtgtggcacatcgcccccccccccaagagaagaatcctgatcgtggtgcccgagatcttcctgcccatcgaggacgagtgcggcgacgtgctggtgatgagaaagagcgccagccccaccagcatcaccacctacgagacctgccagacctacgagagacccatcgccttcaccagcagaagcagaaagctgtggatccagttcaagagcaacgagggcaacagcggcaagggcttccaggtgccctacgtgacctacgacgaggactaccagcagctgatcgaggacatcgtgagagacggcagactgtacgccagcgagaaccaccaggagatcctgaaggacaagaagctgatcaaggccctgttcgacgtgctggcccacccccagaactacttcaagtacaccgcccaggagagcaaggagatgttccccagaagcttcatcaagctgctgagaagcaaggtgagcagattcctgagaccctacaagtag

SEQ ID NO: 98939 - DNA, 1857 bp, synthetic construct
  misc_feature 1..1857: note = Description of Artificial Sequence: Synthetic coding sequence
  source 1..1857: mol_type = other DNA
atggagaccgaggccgccagcaccgccgtgagaacccagacccaggcccccagagtggtggccaccagaagcacccccagcacccagaccgtggccagagccagcagaagagcccagagcatcaccgaggccgccaccggccacgccagaacccagcccctggcctgcgacgccgccgcccccctggacagccactgcagcagaaccggcagacacgccaagaccagcaccagcgcctggagcaccaccgaggccgccaccaccagcgccgccaccccctgggccgccagcagcgccgccgccggcagagccaccagctgcagccccaccagcgcccccgccagaaccagcaccagcgcccccagcagcggccccgtgaccaccagcgccagcaccccccaggccagagccaaggagaccgccagacagcccctgctggaccactgccacgtgaccttcgtgaccctgaagtgcgacagcagcaagaagagaagaagaggcagaaagagccccagcaaggaggtgagccacatcaccgccgagttcgagatcgagaccaagatggaggaggccagcgacacctgcgaggccgactgcctgagaaagagagccgagcagagcctgcaggccgccatcaagaccctgagaaagagcatcggcagacagcagttctacgtgcaggtgagcggcaccgagtacgaggtggcccagagacccgccaaggccctggagggccagggcgcctgcggcgccggccaggtgctgcaggacagcaagtgcgtggcctgcggccccggcacccacttcggcggcgagctgggccagtgcgtgagctgcatgcccggcacctaccaggacatggagggccagctgagctgcaccccctgccccagcagcgacggcctgggcctgcccggcgccagaaacgtgagcgagtgcggcggccagtgcagccccggcttcttcagcgccgacggcttcaagccctgccaggcctgccccgtgggcacctaccagcccgagcccggcagaaccggctgcttcccctgcggcggcggcctgctgaccaagcacgagggcaccaccagcttccaggactgcgaggccaaggtgcactgcagccccggccaccactacaacaccaccacccacagatgcatcagatgccccgtgggcacctaccagcccgagttcggccagaaccactgcatcacctgccccggcaacaccagcaccgacttcgacggcagcaccaacgtgacccactgcaagaaccagcactgcggcggcgagctgggcgactacaccggctacatcgagagccccaactaccccggcgactaccccgccaacgccgagtgcgtgtggcacatcgcccccccccccaagagaagaatcctgatcgtggtgcccgagatcttcctgcccatcgaggacgagtgcggcgacgtgctggtgatgagaaagagcgccagccccaccagcatcaccacctacgagacctgccagacctacgagagacccatcgccttcaccagcagaagcagaaagctgtggatccagttcaagagcaacgagggcaacagcggcaagggcttccaggtgccctacgtgacctacgacgaggactaccagcagctgatcgaggacatcgtgagagacggcagactgtacgccagcgagaaccaccaggagatcctgaaggacaagaagctgatcaaggccctgttcgacgtgctggcccacccccagaactacttcaagtacaccgcccaggagagcaaggagatgttccccagaagcttcatcaagctgctgagaagcaaggtgagcagattcctgagaccctacaagtag

SEQ ID NO: 98940 - DNA, 1092 bp, synthetic construct
  misc_feature 1..1092: note = Description of Artificial Sequence: Synthetic coding sequence
  source 1..1092: mol_type = other DNA
atgggcgccgccgccgtgagatggcacctgtgcgtgctgctggccctgggcaccagaggcagactggccggcggcagcggcctgcccggcagcgtggacgtggacgagtgcagcgagggcaccgacgactgccacatcgacgccatctgccagaacacccccaagagctacaagtgcctgtgcaagcccggctacaagggcgagggcaagcagtgcgaggacatcgacgagtgcgagaacgactactacaacggcggctgcgtgcacgagtgcatcaacatccccggcaactacagatgcacctgcttcgacggcttcatgctggcccacgacggccacaactgcctggacgtggacgagtgccaggacaacaacggcggctgccagcagatctgcgtgaacgccatgggcagctacgagtgccagtgccacagcggcttcttcctgagcgacaaccagcacacctgcatccacagaagcaacgagggcatgaactgcatgaacaaggaccacggctgcgcccacatctgcagagagacccccaagggcggcgtggcctgcgactgcagacccggcttcgacctggcccagaaccagaaggactgcaccctgacctgcaactacggcaacggcggctgccagcacagctgcgaggacaccgacaccggccccacctgcggctgccaccagaagtacgccctgcacagcgacggcagaacctgcatcgagacctgcgccgtgaacaacggcggctgcgacagaacctgcaaggacaccgccaccggcgtgagatgcagctgccccgtgggcttcaccctgcagcccgacggcaagacctgcaaggacatcaacgagtgcctggtgaacaacggcggctgcgaccacttctgcagaaacaccgtgggcagcttcgagtgcggctgcagaaagggctacaagctgctgaccgacgagagaacctgccaggacatcgacgagtgcagcttcgagagaacctgcgaccacatctgcatcaacagccccggcagcttccagtgcctgatcaagctgctgagaagcaaggtgagcagattcctgagaccctacaagtag

SEQ ID NO: 98941 - DNA, 528 bp, synthetic construct
  misc_feature 1..528: note = Description of Artificial Sequence: Synthetic coding sequence
  source 1..528: mol_type = other DNA
tgaagagagacccccaagggcggcgtggcctgcgactgcagacccggcttcgacctggcccagaaccagaaggactgcaccctgacctgcaactacggcaacggcggctgccagcacagctgcgaggacaccgacaccggccccacctgcggctgccaccagaagtacgccctgcacagcgacggcagaacctgcatcgagaaggacgaggccgccatcgagagaagccagttcaacgccaccagcgtggccgacgtggacaagagagtgaagagaagactgctgatggagacctgcgccgtgaacaacggcggctgcgacagaacctgcaaggacaccgccaccggcgtgagatgcagctgccccgtgggcttcaccctgcagcccgacggcaagacctgcaaggacatcaacgagtgcctggtgaacaacggcggctgcgaccacttctgcagaaacaccgtgggcagcttcgagtgcggctgcagaaagggctacaagctgctgaccgacgagagaacctgctag

SEQ ID NO: 98942 - DNA, 3000 bp, synthetic construct
  misc_feature 1..3000: note = Description of Artificial Sequence: Synthetic coding sequence
  source 1..3000: mol_type = other DNA
atgggcgtggccggcagaaacagacccggcgccgcctgggccgtgctgctgctgctgctgctgctgccccccctgctgctgctggccggcgccgtgccccccggcagaggcagagccgccggcccccaggaggacgtggacgagtgcgcccagggcctggacgactgccacgccgacgccctgtgccagaacacccccaccagctacaagtgcagctgcaagcccggctaccagggcgagggcagacagtgcgaggacatcgacgagtgcggcaacgagctgaacggcggctgcgtgcacgactgcctgaacatccccggcaactacagatgcacctgcttcgacggcttcatgctggcccacgacggccacaactgcctggacgtggacgagtgcctggagaacaacggcggctgccagcacacctgcgtgaacgtgatgggcagctacgagtgctgctgcaaggagggcttcttcctgagcgacaaccagcacacctgcatccacagaagcgaggagggcctgagctgcatgaacaaggaccacggctgcagccacatctgcaaggaggcccccagaggcagcgtggcctgcgagtgcagacccggcttcgagctggccaagaaccagagagactgcatcctgacctgcaaccacggcaacggcggctgccagcacagctgcgacgacaccgccgacggccccgagtgcagctgccacccccagtacaagatgcacaccgacggcagaagctgcctggagagagaggacaccgtgctggaggtgaccgagagcaacaccaccagcgtggtggacggcgacaagagagtgaagagaagactgctgatggagacctgcgccgtgaacaacggcggctgcgacagaacctgcaaggacaccagcaccggcgtgcactgcagctgccccgtgggcttcaccctgcagctggacggcaagacctgcaaggacatcgacgagtgccagaccagaaacggcggctgcgaccacttctgcaagaacatcgtgggcagcttcgactgcggctgcaagaagggcttcaagctgctgaccgacgagaagagctgccaggacgtggacgagtgcagcctggacagaacctgcgaccacagctgcatcaaccaccccggcaccttcgcctgcgcctgcaacagaggctacaccctgtacggcttcacccactgcggcgacaccaacgagtgcagcatcaacaacggcggctgccagcaggtgtgcgtgaacaccgtgggcagctacgagtgccagtgccaccccggctacaagctgcactggaacaagaaggactgcgtggaggtgaagggcctgctgcccaccagcgtgagccccagagtgagcctgcactgcggcaagagcggcggcggcgacggctgcttcctgagatgccacagcggcatccacctgagcagcgacgtgaccaccatcagaaccagcgtgaccttcaagctgaacgagggcaagtgcagcctgaagaacgccgagctgttccccgagggcctgagacccgccctgcccgagaagcacagcagcgtgaaggagagcttcagatacgtgaacctgacctgcagcagcggcaagcaggtgcccggcgcccccggcagacccagcacccccaaggagatgttcatcaccgtggagttcgagctggagaccaaccagaaggaggtgaccgccagctgcgacctgagctgcatcgtgaagagaaccgagaagagactgagaaaggccatcagaaccctgagaaaggccgtgcacagagagcagttccacctgcagctgagcggcatgaacctggacgtggccaagaagccccccagaaccagcgagagacaggccgagagctgcggcgtgggccagggccacgccgagaaccagtgcgtgagctgcagagccggcacctactacgacggcgccagagagagatgcatcctgtgccccaacggcaccttccagaacgaggagggccagatgacctgcgagccctgccccagacccggcaacagcggcgccctgaagacccccgaggcctggaacatgagcgagtgcggcggcctgtgccagcccggcgagtacagcgccgacggcttcgccccctgccacctgtgcgccctgggcaccttccagcccgaggccggcagaaccagctgcttcccctgcggcggcggcctggccaccaagcaccagggcgccaccagcttccaggactgcgagaccagagtgcagtgcagccccggccacttctacaacaccaccacccacagatgcatcagatgccccgtgggcacctaccagcccgagttcggcaagaacaactgcgtgagctgccccggcaacaccaccaccgacttcgacggcagcaccaacatcacccagtgcaagaacagaagatgcggcggcgagctgggcgacttcaccggctacatcgagagccccaactaccccggcaactaccccgccaacaccgagtgcacctggaccatcaaccccccccccaagagaagaatcctgatcgtggtgcccgagatcttcctgcccatcgaggacgactgcggcgactacctggtgatgagaaagaccagcagcagcaacagcgtgaccacctacgagacctgccagacctacgagagacccatcgccttcaccagcagaagcaagaagctgtggatccagttcaagagcaacgagggcaacagcgccagaggcttccaggtgccctacgtgacctacgacgaggactaccaggagctgatcgaggacatcgtgagagacggcagactgtacgccagcgagaaccaccaggagatcctgaaggacaagaagctgatcaaggccctgttcgacgtgctggcccacccccagaactacttcaagtacaccgcccaggagagcagagagatgttccccagaagcttcatcagactgctgagaagcaaggtgagcagattcctgagaccctacaagtag

SEQ ID NO: 98943 - DNA, 2424 bp, synthetic construct
  misc_feature 1..2424: note = Description of Artificial Sequence: Synthetic coding sequence
  source 1..2424: mol_type = other DNA
atgggcgtggccggcagaaacagacccggcgccgcctgggccgtgctgctgctgctgctgctgctgccccccctgctgctgctggccggcgccgtgccccccggcagaggcagagccgccggcccccaggaggacgtggacgagtgcgcccagggcctggacgactgccacgccgacgccctgtgccagaacacccccaccagctacaagtgcagctgcaagcccggctaccagggcgagggcagacagtgcgaggacatcgacgagtgcggcaacgagctgaacggcggctgcgtgcacgactgcctgaacatccccggcaactacagatgcacctgcttcgacggcttcatgctggcccacgacggccacaactgcctggacgtggacgagtgcctggagaacaacggcggctgccagcacacctgcgtgaacgtgatgggcagctacgagtgctgctgcaaggagggcttcttcctgagcgacaaccagcacacctgcatccacagaagcgaggagggcctgagctgcatgaacaaggaccacggctgcagccacatctgcaaggaggcccccagaggcagcgtggcctgcgagtgcagacccggcttcgagctggccaagaaccagagagactgcatcctgacctgcaaccacggcaacggcggctgccagcacagctgcgacgacaccgccgacggccccgagtgcagctgccacccccagtacaagatgcacaccgacggcagaagctgcctggagagagaggacaccgtgctggaggtgaccgagagcaacaccaccagcgtggtggacggcgacaagagagtgaagagaagactgctgatggagacctgcgccgtgaacaacggcggctgcgacagaacctgcaaggacaccagcaccggcgtgcactgcagctgccccgtgggcttcaccctgcagctggacggcaagacctgcaaggacatcgacgagtgccagaccagaaacggcggctgcgaccacttctgcaagaacatcgtgggcagcttcgactgcggctgcaagaagggcttcaagctgctgaccgacgagaagagctgccaggacgtggacgagtgcagcctggacagaacctgcgaccacagctgcatcaaccaccccggcaccttcgcctgcgcctgcaacagaggctacaccctgtacggcttcacccactgcggcgacaccaacgagtgcagcatcaacaacggcggctgccagcaggtgtgcgtgaacaccgtgggcagctacgagtgccagtgccaccccggctacaagctgcactggaacaagaaggactgcgtggccagctgcgacctgagctgcatcgtgaagagaaccgagaagagactgagaaaggccatcagaaccctgagaaaggccgtgcacagagagcagttccacctgcagctgagcggcatgaacctggacgtggccaagaagccccccagaaccagcgagagacaggccgagagctgcggcgtgggccagggccacgccgagaaccagtgcgtgagctgcagagccggcacctactacgacggcgccagagagagatgcatcctgtgccccaacggcaccttccagaacgaggagggccagatgacctgcgagccctgccccagacccggcaacagcggcgccctgaagacccccgaggcctggaacatgagcgagtgcggcggcctgtgccagcccggcgagtacagcgccgacggcttcgccccctgccacctgtgcgccctgggcaccttccagcccgaggccggcagaaccagctgcttcccctgcggcggcggcctggccaccaagcaccagggcgccaccagcttccaggactgcgagaccagagtgcagtgcagccccggccacttctacaacaccaccacccacagatgcatcagatgccccgtgggcacctaccagcccgagttcggcaagaacaactgcgtgagctgccccggcaacaccaccaccgacttcgacggcagcaccaacatcacccagtgcaagaccagcagcaacagcgtgaccacctacgagacctgccagacctacgagagacccatcgccttcaccagcagaagcaagaagctgtggatccagttcaagagcaacgagggcaacagcgccagaggcttccaggtgccctacgtgacctacgacgaggactaccaggagctgatcgaggacatcgtgagagacggcagactgtacgccagcgagaaccaccaggagatcctgaaggacaagaagctgatcaaggccctgttcgacgtgctggcccacccccagaactacttcaagtacaccgcccaggagagcagagagatgttccccagaagcttcatcagactgctgagaagcaaggtgagcagattcctgagaccctacaagtag

SEQ ID NO: 98944 - DNA, 3087 bp, synthetic construct
  misc_feature 1..3087: note = Description of Artificial Sequence: Synthetic coding sequence
  source 1..3087: mol_type = other DNA
atgggcgtggccggcagaaacagacccggcgccgcctgggccgtgctgctgctgctgctgctgctgccccccctgctgctgctggccggcgccgtgccccccggcagaggcagagccgccggcccccaggaggacgtggacgagtgcgcccagggcctggacgactgccacgccgacgccctgtgccagaacacccccaccagctacaagtgcagctgcaagcccggctaccagggcgagggcagacagtgcgaggacatcgacgagtgcggcaacgagctgaacggcggctgcgtgcacgactgcctgaacatccccggcaactacagatgcacctgcttcgacggcttcatgctggcccacgacggccacaactgcctggacgtggacgagtgcctggagaacaacggcggctgccagcacacctgcgtgaacgtgatgggcagctacgagtgctgctgcaaggagggcttcttcctgagcgacaaccagcacacctgcatccacagaagcgaggagggcctgagctgcatgaacaaggaccacggctgcagccacatctgcaaggaggcccccagaggcagcgtggcctgcgagtgcagacccggcttcgagctggccaagaaccagagagactgcatcctgacctgcaaccacggcaacggcggctgccagcacagctgcgacgacaccgccgacggccccgagtgcagctgccacccccagtacaagatgcacaccgacggcagaagctgcctggagagagaggacaccgtgctggaggtgaccgagagcaacaccaccagcgtggtggacggcgacaagagagtgaagagaagactgctgatggagacctgcgccgtgaacaacggcggctgcgacagaacctgcaaggacaccagcaccggcgtgcactgcagctgccccgtgggcttcaccctgcagctggacggcaagacctgcaaggacatcgacgagtgccagaccagaaacggcggctgcgaccacttctgcaagaacatcgtgggcagcttcgactgcggctgcaagaagggcttcaagctgctgaccgacgagaagagctgccaggacgtggacgagtgcagcctggacagaacctgcgaccacagctgcatcaaccaccccggcaccttcgcctgcgcctgcaacagaggctacaccctgtacggcttcacccactgcggcgacaccaacgagtgcagcatcaacaacggcggctgccagcaggtgtgcgtgaacaccgtgggcagctacgagtgccagtgccaccccggctacaagctgcactggaacaagaaggactgcgtggaggtgaagggcctgctgcccaccagcgtgagccccagagtgagcctgcactgcggcaagagcggcggcggcgacggctgcttcctgagatgccacagcggcatccacctgagcagcggcctgcagggcgcctacagcgtgacctgcggcagcagcagccccctgagaaacaagcagcagaagagcaacgacagcgccttcggcgacgtgaccaccatcagaaccagcgtgaccttcaagctgaacgagggcaagtgcagcctgaagaacgccgagctgttccccgagggcctgagacccgccctgcccgagaagcacagcagcgtgaaggagagcttcagatacgtgaacctgacctgcagcagcggcaagcaggtgcccggcgcccccggcagacccagcacccccaaggagatgttcatcaccgtggagttcgagctggagaccaaccagaaggaggtgaccgccagctgcgacctgagctgcatcgtgaagagaaccgagaagagactgagaaaggccatcagaaccctgagaaaggccgtgcacagagagcagttccacctgcagctgagcggcatgaacctggacgtggccaagaagccccccagaaccagcgagagacaggccgagagctgcggcgtgggccagggccacgccgagaaccagtgcgtgagctgcagagccggcacctactacgacggcgccagagagagatgcatcctgtgccccaacggcaccttccagaacgaggagggccagatgacctgcgagccctgccccagacccggcaacagcggcgccctgaagacccccgaggcctggaacatgagcgagtgcggcggcctgtgccagcccggcgagtacagcgccgacggcttcgccccctgccacctgtgcgccctgggcaccttccagcccgaggccggcagaaccagctgcttcccctgcggcggcggcctggccaccaagcaccagggcgccaccagcttccaggactgcgagaccagagtgcagtgcagccccggccacttctacaacaccaccacccacagatgcatcagatgccccgtgggcacctaccagcccgagttcggcaagaacaactgcgtgagctgccccggcaacaccaccaccgacttcgacggcagcaccaacatcacccagtgcaagaacagaagatgcggcggcgagctgggcgacttcaccggctacatcgagagccccaactaccccggcaactaccccgccaacaccgagtgcacctggaccatcaaccccccccccaagagaagaatcctgatcgtggtgcccgagatcttcctgcccatcgaggacgactgcggcgactacctggtgatgagaaagaccagcagcagcaacagcgtgaccacctacgagacctgccagacctacgagagacccatcgccttcaccagcagaagcaagaagctgtggatccagttcaagagcaacgagggcaacagcgccagaggcttccaggtgccctacgtgacctacgacgaggactaccaggagctgatcgaggacatcgtgagagacggcagactgtacgccagcgagaaccaccaggagatcctgaaggacaagaagctgatcaaggccctgttcgacgtgctggcccacccccagaactacttcaagtacaccgcccaggagagcagagagatgttccccagaagcttcatcagactgctgagaagcaaggtgagcagattcctgagaccctacaagtag

SEQ ID NO: 98945 - DNA, 411 bp, synthetic construct
  misc_feature 1..411: note = Description of Artificial Sequence: Synthetic coding sequence
  source 1..411: mol_type = other DNA
atggtgctgctggagagcgagcagttcctgaccgagctgaccagactgttccagaagtgcagaaccagcggcagcgtgtacatcaccctgaagaagtacgacggcagaaccaagcccatccccaagaagggcaccgtggagggcttcgagcccgccgacaacaagtgcctgctgagagccaccgacggcaagaagaagatcagcaccgtggtgagcagcaaggaggtgaacaagttccagatggcctacagcaacctgctgagagccaacatggacggcctgaagaagagagacaagaagaacaagaccaagaagaccaaggccgccgccgccgccgccgccgccgcccccgccgccgccgccaccgcccccaccaccgccgccaccaccgccgccaccgccgcccagtag

SEQ ID NO: 98946 - DNA, 333 bp, synthetic construct
  misc_feature 1..333: note = Description of Artificial Sequence: Synthetic coding sequence
  source 1..333: mol_type = other DNA
atggcctgcgccgccgccagaagccccgccgaccaggacagattcatctgcatctaccccgcctacctgaacaacaagaagaccatcgccgagggcagaagaatccccatcagcaaggccgtggagaaccccaccgccaccgagatccaggacgtgtgcagcgccgtgggcctgaacgtgttcctggagaagaacaagatgtacagcagagagtggaacagagacgtgcagtacagaggcagagtgagagtgcagctgaagcaggaggacggcagcctgtgcctggtgcagttccccagccactacaccctgagcctgaccagcggcagctag

SEQ ID NO: 98947 - DNA, 435 bp, synthetic construct
  misc_feature 1..435: note = Description of Artificial Sequence: Synthetic coding sequence
  source 1..435: mol_type = other DNA
atggcctgcgccgccgccagaagccccgccgaccaggacagattcatctgcatctaccccgcctacctgaacaacaagaagaccatcgccgagggcagaagaatccccatcagcaaggccgtggagaaccccaccgccaccgagatccaggacgtgtgcagcgccgtgggcctgaacgtgttcctggagaagaacaagatgtacagcagagagtggaacagagacgtgcagtacagaggcagagtgagagtgcagctgaagcaggaggacggcagcctgtgcctggtgcagttccccagcagaaagagcgtgatgctgtacgccgccgagatgatccccaagctgaagaccagaacccagaagaccggcggcgccgaccagagcctgcagcagggcgagggcagcaagaagggcaagggcaagaagaagaagtag

SEQ ID NO: 98948 - DNA, 237 bp, synthetic construct
  misc_feature 1..237: note = Description of Artificial Sequence: Synthetic coding sequence
  source 1..237: mol_type = other DNA
atggcctgcgccgccgccagaagccccgccgaccaggacagactgctgaagatcctgcagctgcagagattcaagatgtacgtgcagcagctggacctgacctacttcctgagaaagatcaagtgcaccctggagaacggcatcgtgatgagcaacaccgaggccgagagcggcagcagcagcaacagaaagatgggcgccagcgccctgtacagcagccaccacgtgagccagtag

SEQ ID NO: 98949 - DNA, 639 bp, synthetic construct; identical to SEQ ID NO: 78060
  misc_feature 1..639: note = Description of Artificial Sequence: Synthetic coding sequence
  source 1..639: mol_type = other DNA

SEQ ID NO: 98950 - DNA, 1368 bp, synthetic construct
  misc_feature 1..1368: note = Description of Artificial Sequence: Synthetic coding sequence
  source 1..1368: mol_type = other DNA
atgccccccctgagcatgaagagaagcgccatcgacctggaggagatggccagcggcctgaacaagagaaagatgatccagcacgccgtgttcaaggagctggtgaagctggtggaccccggcgtgaaggcctggacccccaccaagggcaagcagaacgtgatcatgttcgtgggcctgcagggcagcggcaagaccaccacctgcagcaagctggcctactactaccagagaaagggctggaagacctgcctgatctgcgccgacaccttcagagccggcgccttcgaccagctgaagcagaacgccaccaaggccagaatccccttctacggcagctacaccgagatggaccccgtgatcatcgccagcgagggcgtggagaagttcaagaacgagaacttcgagatcatcatcgtggacaccagcggcagacacaagcaggaggacagcctgttcgaggagatgctgcaggtggccaacgccatccagcccgacaacatcgtgtacgtgatggacgccagcatcggccaggcctgcgaggcccaggccaaggccttcaaggacaaggtggacgtggccagcgtgatcgtgaccaagctggacggccacgccaagggcggcggcgccctgagcgccgtggccgccaccaagagccccatcatcttcatcggcaccggcgagcacatcgacgacttcgagcccttcaagacccagcccttcatcagcaagctgctgggcatgggcgacatcgagggcctgatcgacaaggtgaacgagctgaagctggacgacaacgaggccctgatcgagaagctgaagcacggccagttcaccctgagagacatgtacgagcagttccagaacatcatgaagatgggccccttcagccagatcctgggcatgatccccggcttcggcaccgacttcatgagcaagggcaacgagcaggagagcatggccagactgaagaagctgatgaccatcatggacagcatgaacgaccaggagctggacagcaccgacggcgccaaggtgttcagcaagcagcccggcagaatccagagagtggccagaggcagcggcgtgagcaccagagacgtgcaggagctgctgacccagtacaccaagttcgcccagatggtgaagaagatgggcggcatcaagggcctgttcaagggcggcgacatgagcaagaacgtgagccagagccagatggccaagctgaaccagcagatggccaagatgatggaccccagagtgctgcaccacatgggcggcatggccggcctgcagagcatgatgagacagttccagcagggcgccgccggcaacatgaagggcatgatgggcttcaacaacatgtag

SEQ ID NO: 98951 - DNA, 135 bp, synthetic construct
  misc_feature 1..135: note = Description of Artificial Sequence: Synthetic coding sequence
  source 1..135: mol_type = other DNA
atggtgctggccgacctgggcagaaagatcaccagcgccctgagaagcctgagcaacgccaccatcatcaacgaggaggtgctgaacgccatgctgaaggaggtgtgcaccgccctgctggaggccgacgtgtag

SEQ ID NO: 98952 - DNA, 225 bp, synthetic construct
  misc_feature 1..225: note = Description of Artificial Sequence: Synthetic coding sequence
  source 1..225: mol_type = other DNA
atggtgctggccgacctgggcagaaagatcaccagcgccctgagaagcctgagcaacgccaccatcatcaacgaggaggtgctgaacgccatgctgaaggaggtgtgcaccgccctgctggaggccgacgtgaacatcaagctggtgaagcagctgagagagaacgtgaagagcgccatcgacctggaggagatggccagcggcctgaacaagagaaagatgtag

SEQ ID NO: 98953 - DNA, 1515 bp, synthetic construct; identical to SEQ ID NO: 77628
  misc_feature 1..1515: note = Description of Artificial Sequence: Synthetic coding sequence
  source 1..1515: mol_type = other DNA

SEQ ID NO: 98954 - DNA, 1791 bp, synthetic construct
  misc_feature 1..1791: note = Description of Artificial Sequence: Synthetic coding sequence
  source 1..1791: mol_type = other DNA
atggccgccgagaagcaggtgcccggcggcggcggcggcggcggcagcggcggcggcggcggcagcggcggcggcggcagcggcggcggcagaggcgccggcggcgaggagaacaaggagaacgagagacccagcgccggcagcaaggccaacaaggagttcggcgacagcctgagcctggagatcctgcagatcatcaaggagagccagcagcagcacggcctgagacacggcgacttccagagatacagaggctactgcagcagaagacagagaagactgagaaagaccctgaacttcaagatgggcaacagacacaagttcaccggcaagaaggtgaccgaggagctgctgaccgacaacagatacctgctgctggtgctgatggacgccgagagagcctggagctacgccatgcagctgaagcaggaggccaacaccgagcccagaaagagattccacctgctgagcagactgagaaaggccgtgaagcacgccgaggagctggagagactgtgcgagagcaacagagtggacgccaagaccaagctggaggcccaggcctacaccgcctacctgagcggcatgctgagattcgagcaccaggagtggaaggccgccatcgaggccttcaacaagtgcaagaccatctacgagaagctggccagcgccttcaccgaggagcaggccgtgctgtacaaccagagagtggaggagatcagccccaacatcagatactgcgcctacaacatcggcgagaccagagccaagcaggccgccaccatgagcgaggtggagtggagaggcagaaccgtgcccgtgaagatcgacaaggtgagaatcttcctgctgggcctggccgacaacgaggccgccatcgtgcaggccgagagcgaggagaccaaggagagactgttcgagagcatgctgagcgagtgcagagacgccatccaggtggtgagagaggagctgaagcccgaccagaagcagagagactacatcctggagggcgagcccggcaaggtgagcaacctgcagtacctgcacagctacctgacctacatcaagctgagcaccgccatcaagagaaacgagaacatggccaagggcctgcagagagccctgctgcagcagcagcccgaggacgacagcaagagaagccccagaccccaggacctgatcagactgtacgacatcatcctgcagaacctggtggagctgctgcagctgcccggcctggaggaggacaaggccttccagaaggagatcggcctgaagaccctggtgttcaaggcctacagatgcttcttcatcgcccagagctacgtgctggtgaagaagtggagcgaggccctggtgctgtacgacagagtgctgaagtacgccaacgaggtgaacagcgacgccggcgccttcaagaacagcctgaaggacctgcccgacgtgcaggagctgatcacccaggtgagaagcgagaagtgcagcctgcaggccgccgccatcctggacgccaacgacgcccaccagaccgagaccagcagcagccaggtgaaggacaacaagcccctggtggagagattcgagaccttctgcctggaccccagcctggtgaccaagcaggccaacctggtgcacttcccccccggcttccagcccatcccctgcaagcccctgttcttcgacctggccctgaaccacgtggccttcccccccctggaggacaagctggagcagaagaccaagagcggcctgaccggctacatcaagggcatcttcggcttcagaagctag

SEQ ID NO: 98955 - DNA, 1884 bp, synthetic construct
  misc_feature 1..1884: note = Description of Artificial Sequence: Synthetic coding sequence
  source 1..1884: mol_type = other DNA
atggccgccgagaagcaggtgcccggcggcggcggcggcggcggcagcggcggcggcggcggcagcggcggcggcggcagcggcggcggcagaggcgccggcggcgaggagaacaaggagaacgagagacccagcgccggcagcaaggccaacaaggagttcggcgacagcctgagcctggagatcctgcagatcatcaaggagagccagcagcagcacggcctgagacacggcgacttccagagatacagaggctactgcagcagaagacagagaagactgagaaagaccctgaacttcaagatgggcaacagacacaagttcaccggcaagaaggtgaccgaggagctgctgaccgacaacagatacctgctgctggtgctgatggacgccgagagagcctggagctacgccatgcagctgaagcaggaggccaacaccgagcccagaaagagattccacctgctgagcagactgagaaaggccgtgaagcacgccgaggagctggagagactgtgcgagagcaacagagtggacgccaagaccaagctggaggcccaggcctacaccgcctacctgagcggcatgctgagattcgagcaccaggagtggaaggccgccatcgaggccttcaacaagtgcaagaccatctacgagaagctggccagcgccttcaccgaggagcaggccgtgctgtacaaccagagagtggaggagatcagccccaacatcagatactgcgcctacaacatcggcgaccagagcgccatcaacgagctgatgcagatgagactgagaagcggcggcaccgagggcctgctggccgagaagctggaggccctgatcacccagaccagagccaagcaggccgccaccatgagcgaggtggagtggagaggcagaaccgtgcccgtgaagatcgacaaggtgagaatcttcctgctgggcctggccgacaacgaggccgccatcgtgcaggccgagagcgaggagaccaaggagagactgttcgagagcatgctgagcgagtgcagagacgccatccaggtggtgagagaggagctgaagcccgaccagaagcagagagactacatcctggagggcgagcccggcaaggtgagcaacctgcagtacctgcacagctacctgacctacatcaagctgagcaccgccatcaagagaaacgagaacatggccaagggcctgcagagagccctgctgcagcagcagcccgaggacgacagcaagagaagccccagaccccaggacctgatcagactgtacgacatcatcctgcagaacctggtggagctgctgcagctgcccggcctggaggaggacaaggccttccagaaggagatcggcctgaagaccctggtgttcaaggcctacagatgcttcttcatcgcccagagctacgtgctggtgaagaagtggagcgaggccctggtgctgtacgacagagtgctgaagtacgccaacgaggtgaacagcgacgccggcgccttcaagaacagcctgaaggacctgcccgacgtgcaggagctgatcacccaggtgagaagcgagaagtgcagcctgcaggccgccgccatcctggacgccaacgacgcccaccagaccgagaccagcagcagccaggtgaaggacaacaagcccctggtggagagattcgagaccttctgcctggaccccagcctggtgaccaagcaggccaacctggtgcacttcccccccggcttccagcccatcccctgcaagcccctgttcttcgacctggccctgaaccacgtggccttcccccccctggaggacaagctggagcagaagaccaagagcggcctgaccggctacatcaagggcatcttcggcttcagaagctag

SEQ ID NO: 98956 - DNA, 1581 bp, synthetic construct
  misc_feature 1..1581: note = Description of Artificial Sequence: Synthetic coding sequence
  source 1..1581: mol_type = other DNA
atgggcaacagacacaagttcaccggcaagaaggtgaccgaggagctgctgaccgacaacagatacctgctgctggtgctgatggacgccgagagagcctggagctacgccatgcagctgaagcaggaggccaacaccgagcccagaaagagattccacctgctgagcagactgagaaaggccgtgaagcacgccgaggagctggagagactgtgcgagagcaacagagtggacgccaagaccaagctggaggcccaggcctacaccgcctacctgagcggcatgctgagattcgagcaccaggagtggaaggccgccatcgaggccttcaacaagtgcaagaccatctacgagaagctggccagcgccttcaccgaggagcaggccgtgctgtacaaccagagagtggaggagatcagccccaacatcagatactgcgcctacaacatcggcgaccagagcgccatcaacgagctgatgcagatgagactgagaagcggcggcaccgagggcctgctggccgagaagctggaggccctgatcacccagaccagagccaagcaggccgccaccatgagcgaggtggagtggagaggcagaaccgtgcccgtgaagatcgacaaggtgagaatcttcctgctgggcctggccgacaacgaggccgccatcgtgcaggccgagagcgaggagaccaaggagagactgttcgagagcatgctgagcgagtgcagagacgccatccaggtggtgagagaggagctgaagcccgaccagaagcagagagactacatcctggagggcgagcccggcaaggtgagcaacctgcagtacctgcacagctacctgacctacatcaagctgagcaccgccatcaagagaaacgagaacatggccaagggcctgcagagagccctgctgcagcagcagcccgaggacgacagcaagagaagccccagaccccaggacctgatcagactgtacgacatcatcctgcagaacctggtggagctgctgcagctgcccggcctggaggaggacaaggccttccagaaggagatcggcctgaagaccctggtgttcaaggcctacagatgcttcttcatcgcccagagctacgtgctggtgaagaagtggagcgaggccctggtgctgtacgacagagtgctgaagtacgccaacgaggtgaacagcgacgccggcgccttcaagaacagcctgaaggacctgcccgacgtgcaggagctgatcacccaggtgagaagcgagaagtgcagcctgcaggccgccgccatcctggacgccaacgacgcccaccagaccgagaccagcagcagccaggtgaaggacaacaagcccctggtggagagattcgagaccttctgcctggaccccagcctggtgaccaagcaggccaacctggtgcacttcccccccggcttccagcccatcccctgcaagcccctgttcttcgacctggccctgaaccacgtggccttcccccccctggaggacaagctggagcagaagaccaagagcggcctgaccggctacatcaagggcatcttcggcttcagaagctag

SEQ ID NO: 98957 - DNA, 984 bp, synthetic construct
  misc_feature 1..984: note = Description of Artificial Sequence: Synthetic coding sequence
  source 1..984: mol_type = other DNA
atgcagatgagactgagaagcggcggcaccgagggcctgctggccgagaagctggaggccctgatcacccagaccagagccaagcaggccgccaccatgagcgaggtggagtggagaggcagaaccgtgcccgtgaagatcgacaaggtgagaatcttcctgctgggcctggccgacaacgaggccgccatcgtgcaggccgagagcgaggagaccaaggagagactgttcgagagcatgctgagcgagtgcagagacgccatccaggtggtgagagaggagctgaagcccgaccagaagcagagagactacatcctggagggcgagcccggcaaggtgagcaacctgcagtacctgcacagctacctgacctacatcaagctgagcaccgccatcaagagaaacgagaacatggccaagggcctgcagagagccctgctgcagcagcagcccgaggacgacagcaagagaagccccagaccccaggacctgatcagactgtacgacatcatcctgcagaacctggtggagctgctgcagctgcccggcctggaggaggacaaggccttccagaaggagatcggcctgaagaccctggtgttcaaggcctacagatgcttcttcatcgcccagagctacgtgctggtgaagaagtggagcgaggccctggtgctgtacgacagagtgctgaagtacgccaacgaggtgaacagcgacgccggcgccttcaagaacagcctgaaggacctgcccgacgtgcaggagctgatcacccaggtgagaagcgagaagtgcagcctgcaggccgccgccatcctggacgccaacgacgcccaccagaccgagaccagcagcagccaggtgaaggacaacaagcccctggtggagagattcgagagcacccccggcaccgacggcgccctgaagagattcgtgatgctgctgcagtaccacggcttcgagatgaacagcagcctgctgtag

SEQ ID NO: 98958 - DNA, 1770 bp, synthetic construct
  misc_feature 1..1770: note = Description of Artificial Sequence: Synthetic coding sequence
  source 1..1770: mol_type = other DNA
atggccgccgagaagcaggtgcccggcggcggcggcggcggcggcagcggcggcggcggcggcagcggcggcggcggcagcggcggcggcagaggcgccggcggcgaggagaacaaggagaacgagagacccagcgccggcagcaaggccaacaaggagttcggcgacagcctgagcctggagatcctgcagatcatcaaggagagccagcagcagcacggcctgagacacggcgacttccagagatacagatacctgctgctggtgctgatggacgccgagagagcctggagctacgccatgcagctgaagcaggaggccaacaccgagcccagaaagagattccacctgctgagcagactgagaaaggccgtgaagcacgccgaggagctggagagactgtgcgagagcaacagagtggacgccaagaccaagctggaggcccaggcctacaccgcctacctgagcggcatgctgagattcgagcaccaggagtggaaggccgccatcgaggccttcaacaagtgcaagaccatctacgagaagctggccagcgccttcaccgaggagcaggccgtgctgtacaaccagagagtggaggagatcagccccaacatcagatactgcgcctacaacatcggcgaccagagcgccatcaacgagctgatgcagatgagactgagaagcggcggcaccgagggcctgctggccgagaagctggaggccctgatcacccagaccagagccaagcaggccgccaccatgagcgaggtggagtggagaggcagaaccgtgcccgtgaagatcgacaaggtgagaatcttcctgctgggcctggccgacaacgaggccgccatcgtgcaggccgagagcgaggagaccaaggagagactgttcgagagcatgctgagcgagtgcagagacgccatccaggtggtgagagaggagctgaagcccgaccagaagcagagagactacatcctggagggcgagcccggcaaggtgagcaacctgcagtacctgcacagctacctgacctacatcaagctgagcaccgccatcaagagaaacgagaacatggccaagggcctgcagagagccctgctgcagcagcagcccgaggacgacagcaagagaagccccagaccccaggacctgatcagactgtacgacatcatcctgcagaacctggtggagctgctgcagctgcccggcctggaggaggacaaggccttccagaaggagatcggcctgaagaccctggtgttcaaggcctacagatgcttcttcatcgcccagagctacgtgctggtgaagaagtggagcgaggccctggtgctgtacgacagagtgctgaagtacgccaacgaggtgaacagcgacgccggcgccttcaagaacagcctgaaggacctgcccgacgtgcaggagctgatcacccaggtgagaagcgagaagtgcagcctgcaggccgccgccatcctggacgccaacgacgcccaccagaccgagaccagcagcagccaggtgaaggacaacaagcccctggtggagagattcgagaccttctgcctggaccccagcctggtgaccaagcaggccaacctggtgcacttcccccccggcttccagcccatcccctgcaagcccctgttcttcgacctggccctgaaccacgtggccttcccccccctggaggacaagctggagcagaagaccaagagcggcctgaccggctacatcaagggcatcttcggcttcagaagctag

SEQ ID NO: 98959 - DNA, 1110 bp, synthetic construct
  misc_feature 1..1110: note = Description of Artificial Sequence: Synthetic coding sequence
  source 1..1110: mol_type = other DNA
atggccgccgagaagcaggtgcccggcggcggcggcggcggcggcagcggcggcggcggcggcagcggcggcggcggcagcggcggcggcagaggcgccggcggcgaggagaacaaggagaacgagagacccagcgccggcagcaaggccaacaaggagttcggcgacagcctgagcctggagatcctgcagatcatcaaggagagccagcagcagcacggcctgagacacggcgacttccagagatacagaggctactgcagcagaagacagagaagactgagaaagaccctgaacttcaagatgggcaacagacacaagttcaccggcaagaaggtgaccgaggagctgctgaccgacaacagatacctgctgctggtgctgatggacgccgagagagcctggagctacgccatgcagctgaagcaggaggccaacaccgagcccagaaagagattccacctgctgagcagactgagaaaggccgtgaagcacgccgaggagctggagagactgtgcgagagcaacagagtggacgccaagaccaagctggaggcccaggcctacaccgcctacctgagcggcatgctgagattcgagcaccaggagtggaaggccgccatcgaggccttcaacaagtgcaagaccatctacgagaagctggccagcgccttcaccgaggagcaggccgtgctgtacaaccagagagtggaggagatcagccccaacatcagatactgcgcctacaacatcggcgaccagagcgccatcaacgagctgatgcagatgagactgagaagcggcggcaccgagggcctgctggccgagaagctggaggccctgatcacccagaccagagccaagcaggccgccaccatgagcgaggtggagtggagaggcagaaccgtgcccgtgaagatcgacaaggtgagaatcttcctgctgggcctggccgacaacgaggccgccatcgtgcaggccgagagcgaggagaccaaggagagactgttcgagagcatgctgagcgagtgcagagacgccatccaggtggtgagagaggagctgaagcccgaccagagagacctgctgctgcccagccagggccagtag

SEQ ID NO: 98960 - DNA, 867 bp, synthetic construct
  misc_feature 1..867: note = Description of Artificial Sequence: Synthetic coding sequence
  source 1..867: mol_type = other DNA
atgctgagcgagtgcagagacgccatccaggtggtgagagaggagctgaagcccgaccagaagcagagagactacatcctggagggcgagcccggcaaggtgagcaacctgcagtacctgcacagctacctgacctacatcaagctgagcaccgccatcaagagaaacgagaacatggccaagggcctgcagagagccctgctgcagcagcagcccgaggacgacagcaagagaagccccagaccccaggacctgatcagactgtacgacatcatcctgcagaacctggtggagctgctgcagctgcccggcctggaggaggacaaggccttccagaaggagatcggcctgaagaccctggtgttcaaggcctacagatgcttcttcatcgcccagagctacgtgctggtgaagaagtggagcgaggccctggtgctgtacgacagagtgctgaagtacgccaacgaggtgaacagcgacgccggcgccttcaagaacagcctgaaggacctgcccgacgtgcaggagctgatcacccaggtgagaagcgagaagtgcagcctgcaggccgccgccatcctggacgccaacgacgcccaccagaccgagaccagcagcagccaggtgaaggacaacaagcccctggtggagagattcgagaccttctgcctggaccccagcctggtgaccaagcaggccaacctggtgcacttcccccccggcttccagcccatcccctgcaagcccctgttcttcgacctggccctgaaccacgtggccttcccccccctggaggacaagctggagcagaagaccaagagcggcctgaccggctacatcaagggcatcttcggcttcagaagctag

SEQ ID NO: 98961 - DNA, 2016 bp, synthetic construct
  misc_feature 1..2016: note = Description of Artificial Sequence: Synthetic coding sequence
  source 1..2016: mol_type = other DNA
atggccagcggcggcagcggcggcgtgagcgtgcccgccctgtggagcgaggtgaacagatacggccagaacggcgacttcaccagagccctgaagaccgtgaacaagatcctgcagatcaacaaggacgacgtgaccgccctgcactgcaaggtggtgtgcctgatccagaacggcagcttcaaggaggccctgaacgtgatcaacacccacaccaaggtgctggccaacaacagcctgagcttcgagaaggcctactgcgagtacagactgaacagaatcgagaacgccctgaagaccatcgagagcgccaaccagcagaccgacaagctgaaggagctgtacggccaggtgctgtacagactggagagatacgacgagtgcctggccgtgtacagagacctggtgagaaacagccaggacgactacgacgaggagagaaagaccaacctgagcgccgtggtggccgcccagagcaactgggagaaggtggtgcccgagaacctgggcctgcaggagggcacccacgagctgtgctacaacaccgcctgcgccctgatcggccagggccagctgaaccaggccatgaagatcctgcagaaggccgaggacctgtgcagaagaagcctgagcgaggacaccgacggcaccgaggaggacccccaggccgagctggccatcatccacggccagatggcctacatcctgcagctgcagggcagaaccgaggaggccctgcagctgtacaaccagatcatcaagctgaagcccaccgacgtgggcctgctggccgtgatcgccaacaacatcatcaccatcaacaaggaccagaacgtgttcgacagcaagaagaaggtgaagctgaccaacgccgagggcgtggagttcaagctgagcaagaagcagctgcaggccatcgagttcaacaaggccctgctggccatgtacaccaaccaggccgagcagtgcagaaagatcagcgccagcctgcagagccagagccccgagcacctgctgcccgtgctgatccaggccgcccagctgtgcagagagaagcagcacaccaaggccatcgagctgctgcaggagttcagcgaccagcaccccgagaacgccgccgagatcaagctgaccatggcccagctgaagatcagccagggcaacatcagcaaggcctgcctgatcctgagaagcatcgaggagctgaagcacaagcccggcatggtgagcgccctggtgaccatgtacagccacgaggaggacatcgacagcgccatcgaggtgttcacccaggccatccagtggtaccagaaccaccagcccaagagccccgcccacctgagcctgatcagagaggccgccaacttcaagctgaagtacggcagaaagaaggaggccatcagcgacctgcagcagctgtggaagcagaaccccaaggacatccacaccctggcccagctgatcagcgcctacagcctggtggaccccgagaaggccaaggccctgagcaagcacctgcccagcagcgacagcatgagcctgaaggtggacgtggaggccctggagaacagcgccggcgccacctacatcagaaagaagggcggcaaggtgaccggcgacagccagcccaaggagcagggccagggcgacctgaagaagaagaagaagaagaagaagggcaagctgcccaagaactacgaccccaaggtgacccccgaccccgagagatggctgcccatgagagagagaagctactacagaggcagaaagaagggcaagaagaaggaccagatcggcaagggcacccagggcgccaccgccggcgccagcagcgagctggacgccagcaagaccgtgagcagcccccccaccagccccagacccggcagcgccgccaccgtgagcgccagcaccagcaacatcatcccccccagacaccagaagcccgccggcgcccccgccaccaagaagaagcagcagcagaagaagaagaagggcggcaagggcggctggtag

SEQ ID NO: 98962 - DNA, 1878 bp, synthetic construct
  misc_feature 1..1878: note = Description of Artificial Sequence: Synthetic coding sequence
  source 1..1878: mol_type = other DNA
cccctggtgagcagcaagatggccagcggcggcagcggcggcgtgagcgtgcccgccctgtggagcgaggtgaacagatacggccagaacggcgacttcaccagagccctgaagaccgtgaacaagatcctgcagatcaacaaggacgacgtgaccgccctgcactgcaaggtggtgtgcctgatccagaacggcagcttcaaggaggccctgaacgtgatcaacacccacaccaaggtgctggccaacaacagcctgagcttcgagaaggcctactgcgagtacagactgaacagaatcgagaacgccctgaagaccatcgagagcgccaaccagcagaccgacaagctgaaggagctgtacggccaggtgctgtacagactggagagatacgacgagtgcctggccgtgtacagagacctggtgagaaacagccaggacgactacgacgaggagagaaagaccaacctgagcgccgtggtggccgcccagagcaactgggagaaggtggtgcccgagaacctgggcctgcaggagggcacccacgagctgtgctacaacaccgcctgcgccctgatcggccagggccagctgaaccaggccatgaagatcctgcagaaggccgaggacctgtgcagaagaagcctgagcgaggacaccgaccagaacgtgttcgacagcaagaagaaggtgaagctgaccaacgccgagggcgtggagttcaagctgagcaagaagcagctgcaggccatcgagttcaacaaggccctgctggccatgtacaccaaccaggccgagcagtgcagaaagatcagcgccagcctgcagagccagagccccgagcacctgctgcccgtgctgatccaggccgcccagctgtgcagagagaagcagcacaccaaggccatcgagctgctgcaggagttcagcgaccagcaccccgagaacgccgccgagatcaagctgaccatggcccagctgaagatcagccagggcaacatcagcaaggcctgcctgatcctgagaagcatcgaggagctgaagcacaagcccggcatggtgagcgccctggtgaccatgtacagccacgaggaggacatcgacagcgccatcgaggtgttcacccaggccatccagtggtaccagaaccaccagcccaagagccccgcccacctgagcctgatcagagaggccgccaacttcaagctgaagtacggcagaaagaaggaggccatcagcgacctgcagcagctgtggaagcagaaccccaaggacatccacaccctggcccagctgatcagcgcctacagcctggtggaccccgagaaggccaaggccctgagcaagcacctgcccagcagcgacagcatgagcctgaaggtggacgtggaggccctggagaacagcgccggcgccacctacatcagaaagaagggcggcaaggtgaccggcgacagccagcccaaggagcagggccagggcgacctgaagaagaagaagaagaagaagaagggcaagctgcccaagaactacgaccccaaggtgacccccgaccccgagagatggctgcccatgagagagagaagctactacagaggcagaaagaagggcaagaagaaggaccagatcggcaagggcacccagggcgccaccgccggcgccagcagcgagctggacgccagcaagaccgtgagcagcccccccacccaggacctggccgtgctgcagcagtacctgcccctgcaggtgaccagctacccccaggacaccagaaacctgcagggcctgcagcagcagaagagaaacagcaacagaaagagaagaaaggtggagaaggtggccggcgacgagaacatcctggtggccggctgcttctag

SEQ ID NO: 98963 - DNA, 1833 bp, synthetic construct
  misc_feature 1..1833: note = Description of Artificial Sequence: Synthetic coding sequence
  source 1..1833: mol_type = other DNA
atggccagcggcggcagcggcggcgtgagcgtgcccgccctgtggagcgaggtgaacagatacggccagaacggcgacttcaccagagccctgaagaccgtgaacaagatcctgcagatcaacaaggacgacgtgaccgccctgcactgcaaggtggtgtgcctgatccagaacggcagcttcaaggaggccctgaacgtgatcaacacccacaccaaggtgctggccaacaacagcctgagcttcgagaaggcctactgcgagtacagactgaacagaatcgagaacgccctgaagaccatcgagagcgccaaccagcagaccgacaagctgaaggagctgtacggccaggtgctgtacagactggagagatacgacgagtgcctggccgtgtacagagacctggtgagaaacagccaggacgactacgacgaggagagaaagaccaacctgagcgccgtggtggccgcccagagcaactgggagaaggtggtgcccgagaacctgggcctgcaggagggcacccacgagctgtgctacaacaccgcctgcgccctgatcggccagggccagctgaaccaggccatgaagatcctgcagaaggccgaggacctgtgcagaagaagcctgagcgaggacaccgaccagaacgtgttcgacagcaagaagaaggtgaagctgaccaacgccgagggcgtggagttcaagctgagcaagaagcagctgcaggccatcgagttcaacaaggccctgctggccatgtacaccaaccaggccgagcagtgcagaaagatcagcgccagcctgcagagccagagccccgagcacctgctgcccgtgctgatccaggccgcccagctgtgcagagagaagcagcacaccaaggccatcgagctgctgcaggagttcagcgaccagcaccccgagaacgccgccgagatcaagctgaccatggcccagctgaagatcagccagggcaacatcagcaaggcctgcctgatcctgagaagcatcgaggagctgaagcacaagcccggcatggtgagcgccctggtgaccatgtacagccacgaggaggacatcgacagcgccatcgaggtgttcacccaggccatccagtggtaccagaaccaccagcccaagagccccgcccacctgagcctgatcagagaggccgccaacttcaagctgaagtacggcagaaagaaggaggccatcagcgacctgcagcagctgtggaagcagaaccccaaggacatccacaccctggcccagctgatcagcgcctacagcctggtggaccccgagaaggccaaggccctgagcaagcacctgcccagcagcgacagcatgagcctgaaggtggacgtggaggccctggagaacagcgccggcgccacctacatcagaaagaagggcggcaaggtgaccggcgacagccagcccaaggagcagggccagggcgacctgaagaagaagaagaagaagaagaagggcaagctgcccaagaactacgaccccaaggtgacccccgaccccgagagatggctgcccatgagagagagaagctactacagaggcagaaagaagggcaagaagaaggaccagatcggcaagggcacccagggcgccaccgccggcgccagcagcgagctggacgccagcaagaccgtgagcagcccccccaccagccccagacccggcagcgccgccaccgtgagcgccagcaccagcaacatcatcccccccagacaccagaagcccgccggcgcccccgccaccaagaagaagcagcagcagaagaagaagaagggcggcaagggcggctggtag

SEQ ID NO: 98964 - DNA, 1917 bp, synthetic construct
  misc_feature 1..1917: note = Description of Artificial Sequence: Synthetic coding sequence
  source 1..1917: mol_type = other DNA
atgctggacttcttcaccatcttcagcaagggcggcctggtgctgtggtgcttccagggcgtgagcgacagctgcaccggccccgtgaacgccctgatcagaagcgtgctgctgcaggagagaggcggcaacaacagcttcacccacgaggccctgaccctgaagtacaagctggacaaccagttcgagctggtgttcgtggtgggcttccagaagatcctgaccctgacctacgtggacaagctgatcgacgacgtgcacagactgttcagagacaagtacagaaccgagatccagcagcagagcgccctgagcctgctgaacggcaccttcgacttccagaacgacttcctgagactgctgagagaggccgaggagagcagcaagatcagagcccccaccaccatgaagaagttcgaggacagcgagaaggccaagaagcccgtgagaagcatgatcgagaccagaggcgagaagcccaaggagaaggccaagaacagcaagaagaagggcgccaagaaggagggcagcgacggccccctggccaccagcaagcccgtgcccgccgagaagagcggcctgcccgtgggccccgagaacggcgtggagctgagcaaggaggagctgatcagaagaaagagagaggagttcatccagaagcacggcagaggcatggagaagagcaacaagagcaccaagagcgacgcccccaaggagaagggcaagaaggcccccagagtgtgggagctgggcggctgcgccaacaaggaggtgctggactacagcacccccaccaccaacggcacccccgaggccgccctgagcgaggacatcaacctgatcagaggcaccggcagcggcggccagctgcaggacctggactgcagcagcagcgacgacgagggcgccgcccagaacagcaccaagcccagcgccaccaagggcaccctgggcggcatgttcggcatgctgaagggcctggtgggcagcaagagcctgagcagagaggacatggagagcgtgctggacaagatgagagaccacctgatcgccaagaacgtggccgccgacatcgccgtgcagctgtgcgagagcgtggccaacaagctggagggcaaggtgatgggcaccttcagcaccgtgaccagcaccgtgaagcaggccctgcaggagagcctggtgcagatcctgcagccccagagaagagtggacatgctgagagacatcatggacgcccagagaagacagagaccctacgtggtgaccttctgcggcgtgaacggcgtgggcaagagcaccaacctggccaagatcagcttctggctgctggagaacggcttcagcgtgctgatcgccgcctgcgacaccttcagagccggcgccgtggagcagctgagaacccacaccagaagactgagcgccctgcacccccccgagaagcacggcggcagaaccatggtgcagctgttcgagaagggctacggcaaggacgccgccggcatcgccatggaggccatcgccttcgccagaaaccagggcttcgacgtggtgctggtggacaccgccggcagaatgcaggacaacgcccccctgatgaccgccctggccaagctgatcaccgtgaacacccccgacctggtgctgttcgtgggcgaggccctggtgggcaacgaggccgtggaccagctggtgaagttcaacagagccctggccgaccacagcatggcccagacccccagactgatcgacggcatcgtgctgaccaagttcgacaccatcgacgacaaggtgggcgccgccatcagcatgacctacatcaccagcaagcccatcgtgttcgtgggcaccggccagacctactgcgacctgagaagcctgaacgccaaggccgtggtggccgccctgatgaaggcctag

SEQ ID NO: 98965 - DNA, 552 bp, synthetic construct
  misc_feature 1..552: note = Description of Artificial Sequence: Synthetic coding sequence
  source 1..552: mol_type = other DNA
atgagactgctgagcttcgtggtgctggccctgttcgccgtgacccaggccgaggagggcgccagactgctggccagcaagagcctgctgaacagatacgccgtggagggcagagacctgaccctgcagtacaacatctacaacgtgggcagcagcgccgccctggacgtggagctgagcgacgacagcttcccccccgaggacttcggcatcgtgagcggcatgctgaacgtgaagtgggacagaatcgcccccgccagcaacgtgagccacaccgtggtgctgagacccctgaaggccggctacttcaacttcaccagcgccaccatcacctacctggcccaggaggacggccccgtggtgatcggcagcaccagcgcccccggccagggcggcatcctggcccagagagagttcgacagaagattcagcccccacttcctggactgggccgccttcggcgtgatgaccctgcccagcatcggcatccccctgctgctgtggtacagcagcaagagaaagtacgacacccccaagaccaagaagaactag

SEQ ID NO: 98966 - DNA, 552 bp, synthetic construct; identical to SEQ ID NO: 98965
  misc_feature 1..552: note = Description of Artificial Sequence: Synthetic coding sequence
  source 1..552: mol_type = other DNA

SEQ ID NO: 98967 - DNA, 258 bp, synthetic construct
  misc_feature 1..258: note = Description of Artificial Sequence: Synthetic coding sequence
  source 1..258: mol_type = other DNA
atgagactgctgagcttcgtggtgctggccctgttcgccgtgacccaggccgaggagggcgccagactgctggccagcaagagcctgctgaacagatacgccgtggagggcagagacctgaccctgcagtacaacatctacaacgtgggcagcagcgccgccctggacgtggagctgagcgacgacagcttcccccccgaggacttcggcatcgtgagcggcatgctgaacgtgaagtgggacagaatcgccccctag

SEQ ID NO: 98968 - DNA, 444 bp, synthetic construct
  misc_feature 1..444: note = Description of Artificial Sequence: Synthetic coding sequence
  source 1..444: mol_type = other DNA
atgagactgctgagcttcgtggtgctggccctgttcgccgtgacccaggccgaggagggcgccagactgctggccagcaagagcctgctgaacagatacgccgtggagggcagagacctgaccctgcagtacaacatctacaacgtgggcagcagcgccgccctggacgtggagctgagcgacgacagcttcccccccgaggacttcggcatcgtgagcggcatgctgaacgtgaagtgggacagaatcgcccccgccagcaacgtgagccacaccgtggtgctgagacccctgaaggccggctacttcaacttcaccagcgccaccatcacctacctggcccaggaggacggccccgtggtgatcggcagcaccagcgcccccggccagggcggcatcctggcccagagagagttcgacagaagattcagcccccacttctag

SEQ ID NO: 98969 - DNA, 522 bp, synthetic construct
  misc_feature 1..522: note = Description of Artificial Sequence: Synthetic coding sequence
  source 1..522: mol_type = other DNA
atggccgccatggccagcctgggcgccctggccctgctgctgctgagcagcctgagcagatgcagcgccgaggcctgcctggagccccagatcacccccagctactacaccaccagcgacgccgtgatcagcaccgagaccgtgttcatcgtggagatcagcctgacctgcaagaacagagtgcagaacatggccctgtacgccgacgtgggcggcaagcagttccccgtgaccagaggccaggacgtgggcagataccaggtgagctggagcctggaccacaagagcgcccacgccggcacctacgaggtgagattcttcgacgaggagagctacagcctgctgagaaaggcccagagaaacaacgaggacatcagcatcatcccccccctgttcaccgtgagcgtggaccacagaggcacctggaacggcccctgggtgagcaccgaggtgctggccgccgccatcggcctggtgatctactacctggccttcagcgccaagagccacatccaggcctag

SEQ ID NO: 98970 - DNA, 447 bp, synthetic construct
  misc_feature 1..447: note = Description of Artificial Sequence: Synthetic coding sequence
  source 1..447: mol_type = other DNA
atggccgccatggccagcctgggcgccctggccctgctgctgctgagcagcctgagcagatgcagcgccgaggcctgcctggagccccagatcacccccagctactacaccaccagcgacgccgtgatcagcaccgagaccgtgttcatcgtggagatcagcctgacctgcaagaacagagtgcaggtgagctggagcctggaccacaagagcgcccacgccggcacctacgaggtgagattcttcgacgaggagagctacagcctgctgagaaaggcccagagaaacaacgaggacatcagcatcatcccccccctgttcaccgtgagcgtggaccacagaggcacctggaacggcccctgggtgagcaccgaggtgctggccgccgccatcggcctggtgatctactacctggccttcagcgccaagagccacatccaggcctag

SEQ ID NO: 98971 - DNA, 522 bp, synthetic construct; identical to SEQ ID NO: 98969
  misc_feature 1..522: note = Description of Artificial Sequence: Synthetic coding sequence
  source 1..522: mol_type = other DNA

SEQ ID NO: 98972 - DNA, 522 bp, synthetic construct; identical to SEQ ID NO: 98969
  misc_feature 1..522: note = Description of Artificial Sequence: Synthetic coding sequence
  source 1..522: mol_type = other DNA

SEQ ID NO: 98973 - DNA, 363 bp, synthetic construct
  misc_feature 1..363: note = Description of Artificial Sequence: Synthetic coding sequence
  source 1..363: mol_type = other DNA
tgagtgggcagcggctgcagaagcgccgccgtgagcgccctggtggtgagagtggcccccccctgccccctgtgcccccacagcgcccagcaccccacccaggtgagctggagcctggaccacaagagcgcccacgccggcacctacgaggtgagattcttcgacgaggagagctacagcctgctgagaaaggcccagagaaacaacgaggacatcagcatcatcccccccctgttcaccgtgagcgtggaccacagaggcacctggaacggcccctgggtgagcaccgaggtgctggccgccgccatcggcctggtgatctactacctggccttcagcgccaagagccacatccaggcctag

SEQ ID NO: 98974 - DNA, 2544 bp, synthetic construct
  misc_feature 1..2544: note = Description of Artificial Sequence: Synthetic coding sequence
  source 1..2544: mol_type = other DNA
atgagcctgtggggcctggtgagcaagatgccccccgagaaggtgcagagactgtacgtggacttcccccagcacctgagacacctgctgggcgactggctggagagccagccctgggagttcctggtgggcagcgacgccttctgctgcaacctggccagcgccctgctgagcgacaccgtgcagcacctgcaggccagcgtgggcgagcagggcgagggcagcaccatcctgcagcacatcagcaccctggagagcatctaccagagagaccccctgaagctggtggccaccttcagacagatcctgcagggcgagaagaaggccgtgatggagcagttcagacacctgcccatgcccttccactggaagcaggaggagctgaagttcaagaccggcctgagaagactgcagcacagagtgggcgagatccacctgctgagagaggccctgcagaagggcgccgaggccggccaggtgagcctgcacagcctgatcgagacccccgccaacggcaccggccccagcgaggccctggccatgctgctgcaggagaccaccggcgagctggaggccgccaaggccctggtgctgaagagaatccagatctggaagagacagcagcagctggccggcaacggcgcccccttcgaggagagcctggcccccctgcaggagagatgcgagagcctggtggacatctacagccagctgcagcaggaggtgggcgccgccggcggcgagctggagcccaagaccagagccagcctgaccggcagactggacgaggtgctgagaaccctggtgaccagctgcttcctggtggagaagcagcccccccaggtgctgaagacccagaccaagttccaggccggcgtgagattcctgctgggcctgagattcctgggcgcccccgccaagccccccctggtgagagccgacatggtgaccgagaagcaggccagagagctgagcgtgccccagggccccggcgccggcgccgagagcaccggcgagatcatcaacaacaccgtgcccctggagaacagcatccccggcaactgctgcagcgccctgttcaagaacctgctgctgaagaagatcaagagatgcgagagaaagggcaccgagagcgtgaccgaggagaagtgcgccgtgctgttcagcgccagcttcaccctgggccccggcaagctgcccatccagctgcaggccctgagcctgcccctggtggtgatcgtgcacggcaaccaggacaacaacgccaaggccaccatcctgtgggacaacgccttcagcgagatggacagagtgcccttcgtggtggccgagagagtgccctgggagaagatgtgcgagaccctgaacctgaagttcatggccgaggtgggcaccaacagaggcctgctgcccgagcacttcctgttcctggcccagaagatcttcaacgacaacagcctgagcatggaggccttccagcacagaagcgtgagctggagccagttcaacaaggagatcctgctgggcagaggcttcaccttctggcagtggttcgacggcgtgctggacctgaccaagagatgcctgagaagctactggagcgacagactgatcatcggcttcatcagcaagcagtacgtgaccagcctgctgctgaacgagcccgacggcaccttcctgctgagattcagcgacagcgagatcggcggcatcaccatcgcccacgtgatcagaggccaggacggcagcccccagatcgagaacatccagcccttcagcgccaaggacctgagcatcagaagcctgggcgacagaatcagagacctggcccagctgaagaacctgtaccccaagaagcccaaggacgaggccttcagaagccactacaagcccgagcagatgggcaaggacggcagaggctacgtgcccgccaccatcaagatgaccgtggagagagaccagcccctgcccacccccgagctgcagatgcccaccatggtgcccagctacgacctgggcatggcccccgacagcagcatgagcatgcagctgggccccgacatggtgccccaggtgtaccccccccacagccacagcatccccccctaccagggcctgagccccgaggagagcgtgaacgtgctgagcgccttccaggagccccacctgcagatgccccccagcctgggccagatgagcctgcccttcgaccagccccacccccagggcctgctgccctgccagccccaggagcacgccgtgagcagccccgaccccctgctgtgcagcgacgtgaccatggtggaggacagctgcctgagccagcccgtgaccgccttcccccagggcacctggatcggcgaggacatcttcccccccctgctgccccccaccgagcaggacctgaccaagctgctgctggagggccagggcgagagcggcggcggcagcctgggcgcccagcccctgctgcagcccagccactacggccagagcggcatcagcatgagccacatggacctgagagccaaccccagctggtag

SEQ ID NO: 98975 - DNA, 2544 bp, synthetic construct; identical to SEQ ID NO: 98974
  misc_feature 1..2544: note = Description of Artificial Sequence: Synthetic coding sequence
  source 1..2544: mol_type = other DNA

SEQ ID NO: 98976 - DNA, 2214 bp, synthetic construct
  misc_feature 1..2214: note = Description of Artificial Sequence: Synthetic coding sequence
  source 1..2214: mol_type = other DNA
atggagcagttcagacacctgcccatgcccttccactggaagcaggaggagctgaagttcaagaccggcctgagaagactgcagcacagagtgggcgagatccacctgctgagagaggccctgcagaagggcgccgaggccggccaggtgagcctgcacagcctgatcgagacccccgccaacggcaccggccccagcgaggccctggccatgctgctgcaggagaccaccggcgagctggaggccgccaaggccctggtgctgaagagaatccagatctggaagagacagcagcagctggccggcaacggcgcccccttcgaggagagcctggcccccctgcaggagagatgcgagagcctggtggacatctacagccagctgcagcaggaggtgggcgccgccggcggcgagctggagcccaagaccagagccagcctgaccggcagactggacgaggtgctgagaaccctggtgaccagctgcttcctggtggagaagcagcccccccaggtgctgaagacccagaccaagttccaggccggcgtgagattcctgctgggcctgagattcctgggcgcccccgccaagccccccctggtgagagccgacatggtgaccgagaagcaggccagagagctgagcgtgccccagggccccggcgccggcgccgagagcaccggcgagatcatcaacaacaccgtgcccctggagaacagcatccccggcaactgctgcagcgccctgttcaagaacctgctgctgaagaagatcaagagatgcgagagaaagggcaccgagagcgtgaccgaggagaagtgcgccgtgctgttcagcgccagcttcaccctgggccccggcaagctgcccatccagctgcaggccctgagcctgcccctggtggtgatcgtgcacggcaaccaggacaacaacgccaaggccaccatcctgtgggacaacgccttcagcgagatggacagagtgcccttcgtggtggccgagagagtgccctgggagaagatgtgcgagaccctgaacctgaagttcatggccgaggtgggcaccaacagaggcctgctgcccgagcacttcctgttcctggcccagaagatcttcaacgacaacagcctgagcatggaggccttccagcacagaagcgtgagctggagccagttcaacaaggagatcctgctgggcagaggcttcaccttctggcagtggttcgacggcgtgctggacctgaccaagagatgcctgagaagctactggagcgacagactgatcatcggcttcatcagcaagcagtacgtgaccagcctgctgctgaacgagcccgacggcaccttcctgctgagattcagcgacagcgagatcggcggcatcaccatcgcccacgtgatcagaggccaggacggcagcccccagatcgagaacatccagcccttcagcgccaaggacctgagcatcagaagcctgggcgacagaatcagagacctggcccagctgaagaacctgtaccccaagaagcccaaggacgaggccttcagaagccactacaagcccgagcagatgggcaaggacggcagaggctacgtgcccgccaccatcaagatgaccgtggagagagaccagcccctgcccacccccgagctgcagatgcccaccatggtgcccagctacgacctgggcatggcccccgacagcagcatgagcatgcagctgggccccgacatggtgccccaggtgtaccccccccacagccacagcatccccccctaccagggcctgagccccgaggagagcgtgaacgtgctgagcgccttccaggagccccacctgcagatgccccccagcctgggccagatgagcctgcccttcgaccagccccacccccagggcctgctgccctgccagccccaggagcacgccgtgagcagccccgaccccctgctgtgcagcgacgtgaccatggtggaggacagctgcctgagccagcccgtgaccgccttcccccagggcacctggatcggcgaggacatcttcccccccctgctgccccccaccgagcaggacctgaccaagctgctgctggagggccagggcgagagcggcggcggcagcctgggcgcccagcccctgctgcagcccagccactacggccagagcggcatcagcatgagccacatggacctgagagccaaccccagctggtag

SEQ ID NO: 98977 - DNA, 2214 bp, synthetic construct; identical to SEQ ID NO: 98976
  misc_feature 1..2214: note = Description of Artificial Sequence: Synthetic coding sequence
  source 1..2214: mol_type = other DNA

SEQ ID NO: 98978 - DNA, 2214 bp, synthetic construct; identical to SEQ ID NO: 98976
  misc_feature 1..2214: note = Description of Artificial Sequence: Synthetic coding sequence
  source 1..2214: mol_type = other DNA

SEQ ID NO: 98979 - DNA, 2040 bp, synthetic construct
  misc_feature 1..2040: note = Description of Artificial Sequence: Synthetic coding sequence
  source 1..2040: mol_type = other DNA
atgagcctgtggggcctggtgagcaagatgccccccgagaaggtgcagagactgtacgtggacttcccccagcacctgagacacctgctgggcgactggctggagagccagccctgggagttcctggtgggcagcgacgccttctgctgcaacctggccagcgccctgctgagcgacaccgtgcagcacctgcaggccagcgtgggcgagcagggcgagggcagcaccatcctgcagcacatcagcaccctggagagcatctaccagagagaccccctgaagctggtggccaccttcagacagatcctgcagggcgagaagaaggccgtgatggagcagttcagacacctgcccatgcccttccactggaagcaggaggagctgaagttcaagaccggcctgagaagactgcagcacagagtgggcgagatccacctgctgagagaggccctgcagaagggcgccgaggccggccaggtgagcctgcacagcctgatcgagacccccgccaacggcaccggccccagcgaggccctggccatgctgctgcaggagaccaccggcgagctggaggccgccaaggccctggtgctgaagagaatccagatctggaagagacagcagcagctggccggcaacggcgcccccttcgaggagagcctggcccccctgcaggagagatgcgagagcctggtggacatctacagccagctgcagcaggaggtgggcgccgccggcggcgagctggagcccaagaccagagccagcctgaccggcagactggacgaggtgctgagaaccctggtgaccagctgcttcctggtggagaagcagcccccccaggtgctgaagacccagaccaagttccaggccggcgtgagattcctgctgggcctgagattcctgggcgcccccgccaagccccccctggtgagagccgacatggtgaccgagaagcaggccagagagctgagcgtgccccagggccccggcgccggcgccgagagcaccggcgagatcatcaacaacaccgtgcccctggagaacagcatccccggcaactgctgcagcgccctgttcaagaacctgctgctgaagaagatcaagagatgcgagagaaagggcaccgagagcgtgaccgaggagaagtgcgccgtgctgttcagcgccagcttcaccctgggccccggcaagctgcccatccagctgcaggccctgagcctgcccctggtggtgatcgtgcacggcaaccaggacaacaacgccaaggccaccatcctgtgggacaacgccttcagcgagatggacagagtgcccttcgtggtggccgagagagtgccctgggagaagatgtgcgagaccctgaacctgaagttcatggccgaggtgggcaccaacagaggcctgctgcccgagcacttcctgttcctggcccagaagatcttcaacgacaacagcctgagcatggaggccttccagcacagaagcgtgagctggagccagttcaacaaggagatcctgctgggcagaggcttcaccttctggcagtggttcgacggcgtgctggacctgaccaagagatgcctgagaagctactggagcgacagactgatcatcggcttcatcagcaagcagtacgtgaccagcctgctgctgaacgagcccgacggcaccttcctgctgagattcagcgacagcgagatcggcggcatcaccatcgcccacgtgatcagaggccaggacggcagcccccagatcgagaacatccagcccttcagcgccaaggacctgagcatcagaagcctgggcgacagaatcagagacctggcccagctgaagaacctgtaccccaagaagcccaaggacgaggccttcagaagccactacaagcccgagcagatgggcaaggacggcagaggctacgtgcccgccaccatcaagatgaccgtggagagagaccagcccctgcccacccccgagctgcagatgcccaccatggtgcccagctacgacctgggcatggccctgatccccccctag

SEQ ID NO: 98980 - DNA, 2193 bp, synthetic construct
  misc_feature 1..2193: note = Description of Artificial Sequence: Synthetic coding sequence
  source 1..2193: mol_type = other DNA
atggagcagttcagacacctgcccatgcccttccactggaagcaggaggagctgaagttcaagaccggcctgagaagactgcagcacagagtgggcgagatccacctgctgagagaggccctgcagaagggcgccgaggccggccaggtgagcctgcacagcctgatcgagacccccgccaacggcaccggccccagcgaggccctggccatgctgctgcaggagaccaccggcgagctggaggccgccaaggccctggtgctgaagagaatccagatctggaagagacagcagcagctggccggcaacggcgcccccttcgaggagagcctggcccccctgcaggagagatgcgagagcctggtggacatctacagccagctgcagcaggaggtgggcgccgccggcggcgagctggagcccaagaccagagccagcctgaccggcagactggacgaggtgctgagaaccctggtgaccagctgcttcctggtggagaagcagcccccccaggtgctgaagacccagaccaagttccaggccggcgtgagattcctgctgggcctgagattcctgggcgcccccgccaagccccccctggtgagagccgacatggtgaccgagaagcaggccagagagctgagcgtgccccagggccccggcgccggcgccgagagcaccggcgagatcatcaacaacaccgtgcccctggagaacagcatccccggcaactgctgcagcgccctgttcaagaacctgctgctgaagaagatcaagagatgcgagagaaagggcaccgagagcgtgaccgaggagaagtgcgccgtgctgttcagcgccagcttcaccctgggccccggcaagctgcccatccagctgcaggccctgagcctgcccctggtggtgatcgtgcacggcaaccaggacaacaacgccaaggccaccatcctgtgggacaacgccttcagcgagatggacagagtgcccttcgtggtggccgagagagtgccctgggagaagatgtgcgagaccctgaacctgaagttcatggccgaggtgggcaccaacagaggcctgctgcccgagcacttcctgttcctggcccagaagatcttcaacgacaacagcctgagcatggaggccttccagcacagaagcgtgagctggagccagttcaacaaggagatcctgctgggcagaggcttcaccttctggcagtggttcgacggcgtgctggacctgaccaagagatgcctgagaagctactggagcgacagactgatcatcggcttcatcagcaagcagtacgtgaccagcctgctgctgaacgagcccgacggcaccttcctgctgagattcagcgacagcgagatcggcggcatcaccatcgcccacgtgatcagaggccaggacggcagcccccagatcgagaacatccagcccttcagcgccaaggacctgagcatcagaagcctgggcgacagaatcagagacctggcccagctgaagaacctgtaccccaagaagcccaaggacgaggccttcagaagccactacaagcccgagcagatgggcaaggacggcagaggctacgtgcccgccaccatcaagatgaccgtggagagagaccagcccctgcccacccccgagctgcagatgcccaccatggtgcccagctacgacctgggcatggcccccgacagcagcatgagcatgcagctgggccccgacatggtgccccaggtgtaccccccccacagccacagcatccccccctaccagggcctgagccccgaggagagcgtgaacgtgctgagcgccttccaggagccccacctgcagatgccccccagcctgggccagatgagcctgcccttcgaccagccccacccccagggcctgctgccctgccagccccaggagcacgccgtgagcagccccgaccccctgctgtgcagcgacgtgaccatggtggaggacagctgcctgagccagcccgtgaccgccttcccccagggcacctggatcggcgaggacatcttcccccccctgctgccccccaccgagcaggacctgaccaagctgctgctggagggccagggcgagagcggcggcggcagcctgggccacagccccagctgcagcccccccaccatgggcaacctgggcagccagtgccccacctggacctag

SEQ ID NO: 98981 - DNA, 2544 bp, synthetic construct; identical to SEQ ID NO: 98974
  misc_feature 1..2544: note = Description of Artificial Sequence: Synthetic coding sequence
  source 1..2544: mol_type = other DNA

SEQ ID NO: 98982 - DNA, 195 bp, synthetic construct
  misc_feature 1..195: note = Description of Artificial Sequence: Synthetic coding sequence
  source 1..195: mol_type = other DNA
atgagcctgtggggcctggtgagcaagatgccccccgagaaggtgcagagactgtacgtggacttcccccagcacctgagacacctgctgggcgactggctggagagccagccctgggagttcctggtgggcagcgacgccttctgctgcaacctggccagcgccctgctgagcgacaccgtgcagcacctgtag

SEQ ID NO: 98983 - DNA, 435 bp, synthetic construct
  misc_feature 1..435: note = Description of Artificial Sequence: Synthetic coding sequence
  source 1..435: mol_type = other DNA
atgagcctgtggggcctggtgagcaagatgccccccgagaaggtgcagagactgtacgtggacttcccccagcacctgagacacctgctgggcgactggctggagagccagccctgggagttcctggtgggcagcgacgccttctgctgcaacctggccagcgccctgctgagcgacaccgtgcagcacctgcaggccagcgtgggcgagcagggcgagggcagcaccatcctgcagcacatcagcaccctggagagcatctaccagagagaccccctgaagctggtggccaccttcagacagatcctgcagggcgagaagaaggccgtgatggagcagttcagacacctgcccatgcccttccactggaagcaggaggagctgaagttcaagaccggcctgagaagactgcagcacagagtgggcgagatctag

SEQ ID NO: 98984 - DNA, 465 bp, synthetic construct
  misc_feature 1..465: note = Description of Artificial Sequence: Synthetic coding sequence
  source 1..465: mol_type = other DNA
atgagcctgtggggcctggtgagcaagatgccccccgagaaggtgcagagactgtacgtggacttcccccagcacctgagacacctgctgggcgactggctggagagccagccctgggagttcctggtgggcagcgacgccttctgctgcaacctggccagcgccctgctgagcgacaccgtgcagcacctgcaggccagcgtgggcgagcagggcgagggcagcaccatcctgcagcacatcagcaccctggagagcatctaccagagagaccccctgaagctggtggccaccttcagacagatcctgcagggcgagaagaaggccgtgatggagcagttcagacacctgcccatgcccttccactggaagcaggaggagctgaagttcaagaccggcctgagaagactgcagcacagagtgggcgagatccacctgctgagagaggccctgcagaagggctag

SEQ ID NO: 98985 - DNA, 318 bp, synthetic construct
  misc_feature 1..318: note = Description of Artificial Sequence: Synthetic coding sequence
  source 1..318: mol_type = other DNA
atgagcctgtggggcctggtgagcaagatgccccccgagaaggtgcagagactgtacgtggacttcccccagcacctgagacacctgctgggcgactggctggagagccagccctgggagttcctggtgggcagcgacgccttctgctgcaacctggccagcgccctgctgagcgacaccgtgcagcacctgcaggccagcgtgggcgagcagggcgagggcagcaccatcctgcagcacatcagcaccctggagagcatctaccagagagaccccctgaagctggtggccaccttcagacagatcctgcagggctag

SEQ ID NO: 98986 - DNA, 312 bp, synthetic construct
  misc_feature 1..312: note = Description of Artificial Sequence: Synthetic coding sequence
  source 1..312: mol_type = other DNA
atgagcctgtggggcctggtgagcaagatgccccccgagaaggtgcagagactgtacgtggacttcccccagcacctgagacacctgctgggcgactggctggagagccagccctgggagttcctggtgggcagcgacgccttctgctgcaacctggccagcgccctgctgagcgacaccgtgcagcacctgcaggccagcgtgggcgagcagggcgagggcagcaccatcctgcagcacatcagcaccctggagagcatctaccagagagaccccctgaagctggtggccaccttcagacagatcctgtag

SEQ ID NO: 98987 - DNA, 480 bp, synthetic construct
  misc_feature 1..480: note = Description of Artificial Sequence: Synthetic coding sequence
  source 1..480: mol_type = other DNA
atgagcctgtggggcctggtgagcaagatgccccccgagaaggtgcagagactgtacgtggacttcccccagcacctgagacacctgctgggcgactggctggagagccagccctgggagttcctggtgggcagcgacgccttctgctgcaacctggccagcgccctgctgagcgacaccgtgcagcacctgcaggccagcgtgggcgagcagggcgagggcagcaccatcctgcagcacatcagcaccctggagagcatctaccagagagaccccctgaagctggtggccaccttcagacagatcctgcagggcgagaagaaggccgtgatggagcagttcagacacctgcccatgcccttccactggaagcaggaggagctgaagttcaagaccggcctgagaagactgcagcacagagtgggcgagatccacctgctgagagaggccctgcagaagggcgccgaggccggccagtag

SEQ ID NO: 98988 - DNA, 2544 bp, synthetic construct; identical to SEQ ID NO: 98974
  misc_feature 1..2544: note = Description of Artificial Sequence: Synthetic coding sequence
  source 1..2544: mol_type = other DNA

SEQ ID NO: 98989 - DNA, 225 bp, synthetic construct
  misc_feature 1..225: note = Description of Artificial Sequence: Synthetic coding sequence
  source 1..225: mol_type = other DNA
atgagcctgtggggcctggtgagcaagatgccccccgagaaggtgcagagactgtacgtggacttcccccagcacctgagacacctgctgggcgactggctggagagccagccctgggagttcctggtgggcagcgacgccttctgctgcaacctggccagcgccctgctgagcgacaccgtgcagcacctgcaggccagcgtgggcgagcagggcgagggctag

SEQ ID NO: 98990 - DNA, 564 bp, synthetic construct
  misc_feature 1..564: note = Description of Artificial Sequence: Synthetic coding sequence
  source 1..564: mol_type = other DNA
atgctgggccaccccaaggtgtgcgagaagctgaaggccctgatggtggagtggaccgacgagttcaagaacgacccccagctgagcctgatcagcgccatgatcaagaacctgaaggagcagggcgtgaccttccccgccatcggcagccaggccgccgagcaggccaaggccagccccgccctggtggccaaggaccccggcaccgtggccaacaagaaggaggaggaggacctggccaaggccatcgagctgagcctgaaggagcagagacagcagagcaccaccctgagcaccctgtaccccagcaccagcagcctgctgaccaaccaccagcacgagggcagaaaggtgagagccatctacgacttcgaggccgccgaggacaacgagctgaccttcaaggccggcgagatcatcaccgtgctggacgacagcgaccccaactggtggaagggcgagacccaccagggcatcggcctgttccccagcaacttcgtgaccgccgacctgaccgccgagcccgagatgatcaagaccgagaagaagaccgtgcagttctag

SEQ ID NO: 98991 - DNA, 1623 bp, synthetic construct
  misc_feature 1..1623: note = Description of Artificial Sequence: Synthetic coding sequence
  source 1..1623: mol_type = other DNA
atgcccctgttcgccaccaaccccttcgaccaggacgtggagaaggccaccagcgagatgaacaccgccgaggactggggcctgatcctggacatctgcgacaaggtgggccagagcagaaccggccccaaggactgcctgagaagcatcatgagaagagtgaaccacaaggacccccacgtggccatgcaggccctgaccctgctgggcgcctgcgtgagcaactgcggcaagatcttccacctggaggtgtgcagcagagacttcgccagcgaggtgagcaacgtgctgaacaagggccaccccaaggtgtgcgagaagctgaaggccctgatggtggagtggaccgacgagttcaagaacgacccccagctgagcctgatcagcgccatgatcaagaacctgaaggagcagggcgtgaccttccccgccatcggcagccaggccgccgagcaggccaaggccagccccgccctggtggccaaggaccccggcaccgtggccaacaagaaggaggaggaggacctggccaaggccatcgagctgagcctgaaggagcagagacagcagagcaccaccctgagcaccctgtaccccagcaccagcagcctgctgaccaaccaccagcacgagggcagaaaggtgagagccatctacgacttcgaggccgccgaggacaacgagctgaccttcaaggccggcgagatcatcaccgtgctggacgacagcgaccccaactggtggaagggcgagacccaccagggcatcggcctgttccccagcaacttcgtgaccgccgacctgaccgccgagcccgagatgatcaagaccgagaagaagaccgtgcagttcagcgacgacgtgcaggtggagaccatcgagcccgagcccgagcccgccttcatcgacgaggacaagatggaccagctgctgcagatgctgcagagcaccgaccccagcgacgaccagcccgacctgcccgagctgctgcacctggaggccatgtgccaccagatgggccccctgatcgacgagaagctggaggacatcgacagaaagcacagcgagctgagcgagctgaacgtgaaggtgatggaggccctgagcctgtacaccaagctgatgaacgaggaccccatgtacagcatgtacgccaagctgcagaaccagccctactacatgcagagcagcggcgtgagcggcagccaggtgtacgccggccccccccccagcggcgcctacctggtggccggcaacgcccagatgagccacctgcagagctacagcctgccccccgagcagctgagcagcctgagccaggccgtggtgccccccagcgccaaccccgccctgcccagccagcagacccaggccgcctaccccaacaccatggtgagcagcgtgcagggcaacacctaccccagccaggcccccgtgtacagccccccccccgccgccaccgccgccgccgccaccgccgacgtgaccctgtaccagaacgccggccccaacatgccccaggtgcccaactacaacctgaccagcagcaccctgccccagcccggcggcagccagcagcccccccagccccagcagccctacagccagaaggccctgctgtag

SEQ ID NO: 98992 - DNA, 357 bp, synthetic construct
  misc_feature 1..357: note = Description of Artificial Sequence: Synthetic coding sequence
  source 1..357: mol_type = other DNA
atgagaagagtgaaccacaaggacccccacgtggccatgcaggccctgaccctgctgggcgcctgcgtgagcaactgcggcaagatcttccacctggaggtgtgcagcagagacttcgccagcgaggtgagcaacgtgctgaacaagggccaccccaaggtgtgcgagaagctgaaggccctgatggtggagtggaccgacgagttcaagaacgacccccagctgagcctgatcagcgccatgatcaagaacctgaaggagcagggcgtgaccttccccgccatcggcagccaggccgccgagcaggccaaggccagccccgccctggtggccaaggaccccggcaccgtggcctag

SEQ ID NO: 98993 - DNA, 1290 bp, synthetic construct
  misc_feature 1..1290: note = Description of Artificial Sequence: Synthetic coding sequence
  source 1..1290: mol_type = other DNA
atggtggagtggaccgacgagttcaagaacgacccccagctgagcctgatcagcgccatgatcaagaacctgaaggagcagggcgtgaccttccccgccatcggcagccaggccgccgagcaggccaaggccagccccgccctggtggccaaggaccccggcaccgtggccaacaagaaggaggaggaggacctggccaaggccatcgagctgagcctgaaggagcagagacagcagagcaccaccctgagcaccctgtaccccagcaccagcagcctgctgaccaaccaccagcacgagggcagaaaggtgagagccatctacgacttcgaggccgccgaggacaacgagctgaccttcaaggccggcgagatcatcaccgtgctggacgacagcgaccccaactggtggaagggcgagacccaccagggcatcggcctgttccccagcaacttcgtgaccgccgacctgaccgccgagcccgagatgatcaagaccgagaagaagaccgtgcagttcagcgacgacgtgcaggtggagaccatcgagcccgagcccgagcccgccttcatcgacgaggacaagatggaccagctgctgcagatgctgcagagcaccgaccccagcgacgaccagcccgacctgcccgagctgctgcacctggaggccatgtgccaccagatgggccccctgatcgacgagaagctggaggacatcgacagaaagcacagcgagctgagcgagctgaacgtgaaggtgatggaggccctgagcctgtacaccaagctgatgaacgaggaccccatgtacagcatgtacgccaagctgcagaaccagccctactacatgcagagcagcggcgtgagcggcagccaggtgtacgccggccccccccccagcggcgcctacctggtggccggcaacgcccagatgagccacctgcagagctacagcctgccccccgagcagctgagcagcctgagccaggccgtggtgccccccagcgccaaccccgccctgcccagccagcagacccaggccgcctaccccaacaccatggtgagcagcgtgcagggcaacacctaccccagccaggcccccgtgtacagccccccccccgccgccaccgccgccgccgccaccgccgacgtgaccctgtaccagaacgccggccccaacatgccccaggtgcccaactacaacctgaccagcagcaccctgccccagcccggcggcagccagcagcccccccagccccagcagccctacagccagaaggccctgctgtag

SEQ ID NO: 98994 - DNA, 1578 bp, synthetic construct
  misc_feature 1..1578: note = Description of Artificial Sequence: Synthetic coding sequence
  source 1..1578: mol_type = other DNA
atgcccctgttcaccgccaaccccttcgagcaggacgtggagaaggccaccaacgagtacaacaccaccgaggactggagcctgatcatggacatctgcgacaaggtgggcagcacccccaacggcgccaaggactgcctgaaggccatcatgaagagagtgaaccacaaggtgccccacgtggccctgcaggccctgaccctgctgggcgcctgcgtggccaactgcggcaagatcttccacctggaggtgtgcagcagagacttcgccaccgaggtgagagccgtgatcaagaacaaggcccaccccaaggtgtgcgagaagctgaagagcctgatggtggagtggagcgaggagttccagaaggacccccagttcagcctgatcagcgccaccatcaagagcatgaaggaggagggcatcaccttcccccccgccggcagccagaccgtgagcgccgccgccaagaacggcaccagcagcaacaagaacaaggaggacgaggacatcgccaaggccatcgagctgagcctgcaggagcagaagcagcagcacaccgagaccaagagcctgtaccccagcagcgagatccagctgaacaacaaggtggccagaaaggtgagagccctgtacgacttcgaggccgtggaggacaacgagctgaccttcaagcacggcgagatcatcatcgtgctggacgacagcgacgccaactggtggaagggcgagaaccacagaggcatcggcctgttccccagcaacttcgtgaccaccaacctgaacatcgagaccgaggccgccgccgtggacaagctgaacgtgatcgacgacgacgtggaggagatcaagaagagcgagcccgagcccgtgtacatcgacgaggacaagatggacagagccctgcaggtgctgcagagcatcgaccccaccgacagcaagcccgacagccaggacctgctggacctggaggacatctgccagcagatgggccccatgatcgacgagaagctggaggagatcgacagaaagcacagcgagctgagcgagctgaacgtgaaggtgctggaggccctggagctgtacaacaagctggtgaacgaggcccccgtgtacagcgtgtacagcaagctgcacccccccgcccactacccccccgccagcagcggcgtgcccatgcagacctaccccgtgcagagccacggcggcaactacatgggccagagcatccaccaggtgaccgtggcccagagctacagcctgggccccgaccagatcggccccctgagaagcctgccccccaacgtgaacagcagcgtgaccgcccagcccgcccagaccagctacctgagcaccggccaggacaccgtgagcaaccccacctacatgaaccagaacagcaacctgcagagcgccaccggcaccaccgcctacacccagcagatgggcatgagcgtggacatgagcagctaccagaacaccaccagcaacctgccccagctggccggcttccccgtgaccgtgcccgcccaccccgtggcccagcagcacaccaactaccaccagcagcccctgctgtag

SEQ ID NO: 98995 - DNA, 3129 bp, synthetic construct
  misc_feature 1..3129: note = Description of Artificial Sequence: Synthetic coding sequence
  source 1..3129: mol_type = other DNA
atgcccatgtgggccggcggcgtgggcagccccagaagaggcatggcccccgccagcaccgacgacctgttcgccagaaagctgagacagcccgccagaccccccctgaccccccacaccttcgagcccagacccgtgagaggccccctgctgagaagcggcagcgacgccggcgaggccagaccccccacccccgccagccccagagccagagcccacagccacgaggaggccagcagacccgccgccaccagcaccagactgttcaccgaccccctggccctgctgggcctgcccgccgaggagcccgagcccgccttcccccccgtgctggagcccagatggttcgcccactacgacgtgcagagcctgctgttcgactgggcccccagaagccagggcatgggcagccacagcgaggccagcagcggcaccctggccagcgccgaggaccaggccgccagcagcgacctgctgcacggcgcccccggcttcgtgtgcgagctgggcggcgagggcgagctgggcctgggcggccccgccagcccccccgtgccccccgccctgcccaacgccgccgtgagcatcctggaggagccccagaacagaaccagcgcctacagcctggagcacgccgacctgggcgccggctactacagaaagtacttctacggcaaggagcaccagaacttcttcggcatggacgagagcctgggccccgtggccgtgagcctgagaagagaggagaaggagggcagcggcggcggcaccctgcacagctacagagtgatcgtgagaaccacccagctgagaaccctgagaggcaccatcagcgaggacgccctgccccccggcccccccagaggcctgagccccagaaagctgctggagcacgtggccccccagctgagccccagctgcctgagactgggcagcgccagccccaaggtgcccagaaccctgctgaccctggacgagcaggtgctgagcttccagagaaaggtgggcatcctgtactgcagagccggccagggcagcgaggaggagatgtacaacaaccaggaggccggccccgccttcatgcagttcctgaccctgctgggcgacgtggtgagactgaagggcttcgagagctacagagcccagctggacaccaagaccgacagcaccggcacccacagcctgtacaccacctaccaggaccacgagatcatgttccacgtgagcaccatgctgccctacacccccaacaaccagcagcagctgctgagaaagagacacatcggcaacgacatcgtgaccatcgtgttccaggagcccggcagcaagcccttctgccccaccaccatcagaagccacttccagcacgtgttcctggtggtgagagcccacaccccctgcaccccccacaccacctacagagtggccgtgagcagaacccaggacacccccgccttcggccccgccctgcccgccggcggcggccccttcgccgccaacgccgacttcagagccttcctgctggccaaggccctgaacggcgagcaggccgccggccacgccagacagttccacgccatggccaccagaaccagacagcagtacctgcaggacctggccaccaacgaggtgaccaccaccagcctggacagcgccagcagattcggcctgcccagcctgggcggcagaagaagagccgcccccagaggccccggcgccgagctgcaggccgccggcagcctggtgtggggcgtgagagccgcccccggcgccagagtggccgccggcgcccaggccagcggccccgagggcatcgaggtgccctgcctgctgggcatcagcgccgaggccctggtgctggtggcccccagagacggcagagtggtgttcaactgcgcctgcagagacgtgctggcctggaccttcagcgagcagcagctggacctgtaccacggcagaggcgaggccatcaccctgagattcgacggcagccccggccaggccgtgggcgaggtggtggccagactgcagctggtgagcagaggctgcgagaccagagagctggccctgcccagagacggccagggcagactgggcttcgaggtggacgccgagggcttcgtgacccacgtggagagattcaccttcgccgagaccgccggcctgagacccggcgccagactgctgagagtgtgcggccagaccctgcccagcctgagacccgaggccgccgcccagctgctgagaagcgcccccaaggtgtgcgtgaccgtgctgccccccgacgagagcggcagacccagaagaagcttcagcgagctgtacaccctgagcctgcaggagcccagcagaagaggcgcccccgaccccgtgcaggacgaggtgcagggcgtgaccctgctgcccaccaccaagcagctgctgcacctgtgcctgcaggacggcggcagcccccccggccccggcgacctggccgaggagagaaccgagttcctgcacagccagaacagcctgagccccagaagcagcctgagcgacgaggcccccgtgctgcccaacaccacccccgacctgctgctggccaccaccgccaagcccagcgtgcccagcgccgacagcgagacccccctgacccaggacagacccggcagccccagcggcagcgaggacaagggcaaccccgcccccgagctgagagccagcttcctgcccagaaccctgagcctgagaaacagcatcagcagaatcatgagcgaggccggcagcggcaccctggaggacgagtggcaggccatcagcgagatcgccagcacctgcaacaccatcctggagagcctgagcagagagggccagcccatccccgagagcggcgaccccaagggcacccccaagagcgacgccgagcccgagcccggcaacctgagcgagaaggtgagccacctggagagcatgctgagaaagctgcaggaggacctgcagaaggagaaggccgacagagccgccctggaggaggaggtgagaagcctgagacacaacaacagaagactgcaggccgagagcgagagcgccgccaccagactgctgctggccagcaagcagctgggcagccccaccgccgacctggcctag

SEQ ID NO: 98996 - DNA, 2823 bp, synthetic construct
  misc_feature 1..2823: note = Description of Artificial Sequence: Synthetic coding sequence
  source 1..2823: mol_type = other DNA
atgcccatgtgggccggcggcgtgggcagccccagaagaggcatggcccccgccagcaccgacgacctgttcgccagaaagctgagacagcccgccagaccccccctgaccccccacaccttcgagcccagacccgtgagaggccccctgctgagaagcggcagcgacgccggcgaggccagaccccccacccccgccagccccagagccagagcccacagccacgaggaggccagcagacccgccgccaccagcaccagactgttcaccgaccccctggccctgctgggcctgcccgccgaggagcccgagcccgccttcccccccgtgctggagcccagatggttcgcccactacgacgtgcagagcctgctgttcgactgggcccccagaagccagggcatgggcagccacagcgaggccagcagcggcaccctggccagcgccgaggaccaggccgccagcagcgacctgctgcacggcgcccccggcttcgtgtgcgagctgggcggcgagggcgagctgggcctgggcggccccgccagcccccccgtgccccccgccctgcccaacgccgccgtgagcatcctggaggagccccagaacagaaccagcgcctacagcctggagcacgccgacctgggcgccggctactacagaaagtacttctacggcaaggagcaccagaacttcttcggcatggacgagagcctgggccccgtggccgtgagcctgagaagagaggagaaggagggcagcggcggcggcaccctgcacagctacagagtgatcgtgagaaccacccagctgagaaccctgagaggcaccatcagcgaggacgccctgccccccggcccccccagaggcctgagccccagaaagctgctggagcacgtggccccccagctgagccccagctgcctgagactgggcagcgccagccccaaggtgcccagaaccctgctgaccctggacgagcaggtgctgagcttccagagaaaggtgggcatcctgtactgcagagccggccagggcagcgaggaggagatgtacaacaaccaggaggccggccccgccttcatgcagttcctgaccctgctgggcgacgtggtgagactgaagggcttcgagagctacagagcccagctggacaccaagaccgacagcaccggcacccacagcctgtacaccacctaccaggaccacgagatcatgttccacgtgagcaccatgctgccctacacccccaacaaccagcagcagctgctgagaaagagacacatcggcaacgacatcgtgaccatcgtgttccaggagcccggcagcaagcccttctgccccaccaccatcagaagccacttccagcacgtgttcctggtggtgagagcccacaccccctgcaccccccacaccacctacagagtggccgtgagcagaacccaggacacccccgccttcggccccgccctgcccgccggcggcggccccttcgccgccaacgccgacttcagagccttcctgctggccaaggccctgaacggcgagcaggccgccggccacgccagacagttccacgccatggccaccagaaccagacagcagtacctgcaggacctggccaccaacgagcagctggacctgtaccacggcagaggcgaggccatcaccctgagattcgacggcagccccggccaggccgtgggcgaggtggtggccagactgcagctggtgagcagaggctgcgagaccagagagctggccctgcccagagacggccagggcagactgggcttcgaggtggacgccgagggcttcgtgacccacgtggagagattcaccttcgccgagaccgccggcctgagacccggcgccagactgctgagagtgtgcggccagaccctgcccagcctgagacccgaggccgccgcccagctgctgagaagcgcccccaaggtgtgcgtgaccgtgctgccccccgacgagagcggcagacccagaagaagcttcagcgagctgtacaccctgagcctgcaggagcccagcagaagaggcgcccccgaccccgtgcaggacgaggtgcagggcgtgaccctgctgcccaccaccaagcagctgctgcacctgtgcctgcaggacggcggcagcccccccggccccggcgacctggccgaggagagaaccgagttcctgcacagccagaacagcctgagccccagaagcagcctgagcgacgaggcccccgtgctgcccaacaccacccccgacctgctgctggccaccaccgccaagcccagcgtgcccagcgccgacagcgagacccccctgacccaggacagacccggcagccccagcggcagcgaggacaagggcaaccccgcccccgagctgagagccagcttcctgcccagaaccctgagcctgagaaacagcatcagcagaatcatgagcgaggccggcagcggcaccctggaggacgagtggcaggccatcagcgagatcgccagcacctgcaacaccatcctggagagcctgagcagagagggccagcccatccccgagagcggcgaccccaagggcacccccaagagcgacgccgagcccgagcccggcaacctgagcgagaaggtgagccacctggagagcatgctgagaaagctgcaggaggacctgcagaaggagaaggccgacagagccgccctggaggaggaggtgagaagcctgagacacaacaacagaagactgcaggccgagagcgagagcgccgccaccagactgctgctggccagcaagcagctgggcagccccaccgccgacctggcctag

SEQ ID NO: 98997 - DNA, 21 bp, synthetic construct
  misc_feature 1..21: note = Description of Artificial Sequence: Synthetic coding sequence
  source 1..21: mol_type = other DNA
atgcccatgtgggccggctag

SEQ ID NO: 98998 - DNA, 312 bp, synthetic construct
  misc_feature 1..312: note = Description of Artificial Sequence: Synthetic coding sequence
  source 1..312: mol_type = other DNA
atgcccatgtgggccggcggcgtgggcagccccagaagaggcatggcccccgccagcaccgacgacctgttcgccagaaagctgagacagcccgccagaccccccctgaccccccacaccttcgagcccagacccgtgagaggccccctgctgagaagcggcagcgacgccggcgaggccagaccccccacccccgccagccccagagccagagcccacagccacgaggaggccagcagacccgccgccaccagcaccagactgttcaccgaccccctggccctgctgggcctgcccgccgaggagccctag

SEQ ID NO: 98999 - DNA, 3129 bp, synthetic construct; identical to SEQ ID NO: 98995
  misc_feature 1..3129: note = Description of Artificial Sequence: Synthetic coding sequence
  source 1..3129: mol_type = other DNA

SEQ ID NO: 99000 - DNA, 5169 bp, synthetic construct
  misc_feature 1..5169: note = Description of Artificial Sequence: Synthetic coding sequence
  source 1..5169: mol_type = other DNA
atgagcgaccccagacagagccaggaggagaagcacaagctgggcagagccagcagcaagttcaaggacccccccagaatcatgcagagcgacgactacttcgccagaaagttcaaggccatcaacggcaacatgggccccaccaccagcctgaacgccagcaacagcaacgagaccggcggcggcggccccgccaacggcacccccgccgtgcccaagatgggcgtgagagccagagtgagcgagtggccccccaagaaggactgcagcaaggagctgacctgcaaggccctgtgggagagcagaagccagaccagctacgagagcatcaccagcgtgctgcagaacggccagagcgaccagagcgagggccagcaggacgagcagctggacctggacttcgtggaggccaagtacaccatcggcgacatcttcgtgcacagcccccagagaggcctgcaccccatcagacagagaagcaacagcgacgtgaccatcagcgacatcgacgccgaggacgtgctggaccagaacgccgtgaaccccaacaccggcgccgccctgcacagagagtacggcagcaccagcagcatcgacagacagggcctgagcggcgagaacttcttcgccatgctgagaggctacagagtggagaactacgaccacaaggccatggtgcccttcggcttccccgagttcttcagatgcgaccccgccatcagccccagcctgcacgccgccgcccagatcagcagaggcgagttcgtgagaatcagcggcctggactacgtggacagcgccctgctgatgggcagagacagagacaagcccttcaagagaagactgaagagcgagagcgtggagaccagcctgttcagaaagctgagaaccgtgaagagcgagcacgagaccttcaagttcaccagcgagctggaggagagcagactggagagaggcatcagaccctggaactgccagagatgcttcgcccactacgacgtgcagagcatcctgttcaacatcaacgaggccatggccaccagagccaacgtgggcaagagaaagaacatcaccaccggcgccagcgccgccagccagacccagatgcccaccggccagaccggcaactgcgagagccccctgggcagcaaggaggacctgaacagcaaggagaacctggacgccgacgagggcgacggcaagagcaacgacctggtgctgagctgcccctacttcagaaacgagaccggcggcgagggcgacagaagaatcgccctgagcagagccaacagcagcagcttcagcagcggcgagagctgcagcttcgagagcagcctgagcagccactgcaccaacgccggcgtgagcgtgctggaggtgcccagagagaaccagcccatccacagagagaaggtgaagagatacatcatcgagcacatcgacctgggcgcctactactacagaaagttcttctacggcaaggagcaccagaactacttcggcatcgacgagaacctgggccccgtggccgtgagcatcagaagagagaaggtggaggacgccaaggagaaggagggcagccagttcaactacagagtggccttcagaaccagcgagctgaccaccctgagaggcgccatcctggaggacgccatccccagcaccgccagacacggcaccgccagaggcctgcccctgaaggaggtgctggagtacgtgatccccgagctgagcatccagtgcctgagacaggccagcaacagccccaaggtgagcgagcagctgctgaagctggacgagcagggcctgagcttccagcacaagatcggcatcctgtactgcaaggccggccagagcaccgaggaggagatgtacaacaacgagaccgccggccccgccttcgaggagttcctggacctgctgggccagagagtgagactgaagggcttcagcaagtacagagcccagctggacaacaagaccgacagcaccggcacccacagcctgtacaccacctacaaggactacgagctgatgttccacgtgagcaccctgctgccctacatgcccaacaacagacagcagctgctgagaaagagacacatcggcaacgacatcgtgaccatcgtgttccaggagcccggcgccctgcccttcacccccaagagcatcagaagccacttccagcacgtgttcgtgatcgtgaaggtgcacaacccctgcaccgagaacgtgtgctacagcgtgggcgtgagcagaagcaaggacgtgccccccttcggcccccccatccccaagggcgtgaccttccccaagagcgccgtgttcagagacttcctgctggccaaggtgatcaacgccgagaacgccgcccacaagagcgagaagttcagagccatggccaccagaaccagacaggagtacctgaaggacctggccgagaacttcgtgaccaccgccaccgtggacaccagcgtgaagttcagcttcatcaccctgggcgccaagaagaaggagaaggtgaagcccagaaaggacgcccacctgttcagcatcggcgccatcatgtggcacgtgatcgccagagacttcggccagagcgccgacatcgagtgcctgctgggcatcagcaacgagttcatcatgctgatcgagaaggacagcaagaacgtggtgttcaactgcagctgcagagacgtgatcggctggaccagcggcctggtgagcatcaaggtgttctacgagagaggcgagtgcgtgctgctgagcagcgtggacaactgcgccgaggacatcagagagatcgtgcagagactggtgatcgtgaccagaggctgcgagaccgtggagatgaccctgagaagaaacggcctgggccagctgggcttccacgtgaacttcgagggcatcgtggccgacgtggagcccttcggcttcgcctggaaggccggcctgagacagggcagcagactggtggagatctgcaaggtggccgtggccaccctgacccacgagcagatgatcgacctgctgagaaccagcgtgaccgtgaaggtggtgatcatccagccccacgacgacggcagccccagaagaggctgcagcgagctgtgcagaatccccatggtggagtacaagctggacagcgagggcaccccctgcgagtacaagacccccttcagaagaaacaccacctggcacagagtgcccacccccgccctgcagcccctgagcagagccagccccatccccggcacccccgacagactgccctgccagcagctgctgcagcaggcccaggccgccatccccagaagcaccagcttcgacagaaagctgcccgacggcaccagaagcagccccagcaaccagagcagcagcagcgaccccggccccggcggcagcggcccctggagaccccaggtgggctacgacggctgccagagccccctgctgctggagcaccagggcagcggccccctggagtgcgacggcgccagagagagagaggacaccatggaggccagcagacaccccgagaccaagtggcacggcccccccagcaaggtgctgggcagctacaaggagagagccctgcagaaggacggcagctgcaaggacagccccaacaagctgagccacatcggcgacaagagctgcagcagccacagcagcagcaacaccctgagcagcaacaccagcagcaacagcgacgacaagcacttcggcagcggcgacctgatggaccccgagctgctgggcctgacctacatcaagggcgccagcaccgacagcggcatcgacaccgccccctgcatgcccgccaccatcctgggccccgtgcacctggccggcagcagaagcctgatccacagcagagccgagcagtgggccgacgccgccgacgtgagcggccccgacgacgagcccgccaagctgtacagcgtgcacggctacgccagcaccatcagcgccggcagcgccgccgagggcagcatgggcgacctgagcgagatcagcagccacagcagcggcagccaccacagcggcagccccagcgcccactgcagcaagagcagcggcagcctggacagcagcaaggtgtacatcgtgagccacagcagcggccagcaggtgcccggcagcatgagcaagccctaccacagacagggcgccgtgaacaagtacgtgatcggctggaagaagagcgagggcagccccccccccgaggagcccgaggtgaccgagtgccccggcatgtacagcgagatggacgtgatgagcaccgccacccagcaccagaccgtggtgggcgacgccgtggccgagacccagcacgtgctgagcaaggaggacttcctgaagctgatgctgcccgacagccccctggtggaggagggcagaagaaagttcagcttctacggcaacctgagccccagaagaagcctgtacagaaccctgagcgacgagagcatctgcagcaacagaagaggcagcagcttcggcagcagcagaagcagcgtgctggaccaggccctgcccaacgacatcctgttcagcaccacccccccctaccacagcaccctgccccccagagcccaccccgcccccagcatgggcagcctgagaaacgagttctggttcagcgacggcagcctgagcgacaagagcaagtgcgccgaccccggcctgatgcccctgcccgacaccgccaccggcctggactggacccacctggtggacgccgccagagccttcgagggcctggacagcgacgaggagctgggcctgctgtgccaccacaccagctacctggaccagagagtggccagcttctgcaccctgaccgacatgcagcacggccaggacctggagggcgcccaggagctgcccctgtgcgtggaccccggcagcggcaaggagttcatggacaccaccggcgagagaagccccagccccctgaccggcaaggtgaaccagctggagctgatcctgagacagctgcagaccgacctgagaaaggagaagcaggacaaggccgtgctgcaggccgaggtgcagcacctgagacaggacaacatgagactgcaggaggagagccagaccgccaccgcccagctgagaaagttcaccgagtggttcttcaccaccatcgacaagaagagctag

SEQ ID NO: 99001 - DNA, 2337 bp, synthetic construct
  misc_feature 1..2337: note = Description of Artificial Sequence: Synthetic coding sequence
  source 1..2337: mol_type = other DNA
atgagcccctgcttcagcttcatcggctgcaagctgtgcagcatcgtgaccagaggctgcgagaccgtggagatgaccctgagaagaaacggcctgggccagctgggcttccacgtgaacttcgagggcatcgtggccgacgtggagcccttcggcttcgcctggaaggccggcctgagacagggcagcagactggtggagatctgcaaggtggccgtggccaccctgacccacgagcagatgatcgacctgctgagaaccagcgtgaccgtgaaggtggtgatcatccagccccacgacgacggcagccccagaagaggctgcagcgagctgtgcagaatccccatggtggagtacaagctggacagcgagggcaccccctgcgagtacaagacccccttcagaagaaacaccacctggcacagagtgcccacccccgccctgcagcccctgagcagagccagccccatccccggcacccccgacagactgccctgccagcagctgctgcagcaggcccaggccgccatccccagaagcaccagcttcgacagaaagctgcccgacggcaccagaagcagccccagcaaccagagcagcagcagcgaccccggccccggcggcagcggcccctggagaccccaggtgggctacgacggctgccagagccccctgctgctggagcaccagggcagcggccccctggagtgcgacggcgccagagagagagaggacaccatggaggccagcagacaccccgagaccaagtggcacggcccccccagcaaggtgctgggcagctacaaggagagagccctgcagaaggacggcagctgcaaggacagccccaacaagctgagccacatcggcgacaagagctgcagcagccacagcagcagcaacaccctgagcagcaacaccagcagcaacagcgacgacaagcacttcggcagcggcgacctgatggaccccgagctgctgggcctgacctacatcaagggcgccagcaccgacagcggcatcgacaccgccccctgcatgcccgccaccatcctgggccccgtgcacctggccggcagcagaagcctgatccacagcagagccgagcagtgggccgacgccgccgacgtgagcggccccgacgacgagcccgccaagctgtacagcgtgcacggctacgccagcaccatcagcgccggcagcgccgccgagggcagcatgggcgacctgagcgagatcagcagccacagcagcggcagccaccacagcggcagccccagcgcccactgcagcaagagcagcggcagcctggacagcagcaaggtgtacatcgtgagccacagcagcggccagcaggtgcccggcagcatgagcaagccctaccacagacagggcgccgtgaacaagtacgtgatcggctggaagaagagcgagggcagccccccccccgaggagcccgaggtgaccgagtgccccggcatgtacagcgagatggacgtgatgagcaccgccacccagcaccagaccgtggtgggcgacgccgtggccgagacccagcacgtgctgagcaaggaggacttcctgaagctgatgctgcccgacagccccctggtggaggagggcagaagaaagttcagcttctacggcaacctgagccccagaagaagcctgtacagaaccctgagcgacgagagcatctgcagcaacagaagaggcagcagcttcggcagcagcagaagcagcgtgctggaccaggccctgcccaacgacatcctgttcagcaccacccccccctaccacagcaccctgccccccagagcccaccccgcccccagcatgggcagcctgagaaacgagttctggttcagcgacggcagcctgagcgacaagagcaagtgcgccgaccccggcctgatgcccctgcccgacaccgccaccggcctggactggacccacctggtggacgccgccagagccttcgaggaccagagagtggccagcttctgcaccctgaccgacatgcagcacggccaggacctggagggcgcccaggagctgcccctgtgcgtggaccccggcagcggcaaggagttcatggacaccaccggcgagagaagccccagccccctgaccggcaaggtgaaccagctggagctgatcctgagacagctgcagaccgacctgagaaaggagaagcaggacaaggccgtgctgcaggccgaggtgcagcacctgagacaggacaacatgagactgcaggaggagagccagaccgccaccgcccagctgagaaagttcaccgagtggttcttcaccaccatcgacaagaagagctag

SEQ ID NO: 99002 - DNA, 5169 bp, synthetic construct; identical to SEQ ID NO: 99000
  misc_feature 1..5169: note = Description of Artificial Sequence: Synthetic coding sequence
  source 1..5169: mol_type = other DNA

SEQ ID NO: 99003 - DNA, 918 bp, synthetic construct
  misc_feature 1..918: note = Description of Artificial Sequence: Synthetic coding sequence
  source 1..918: mol_type = other DNA
atggaccccaagggcctgctgagcctgaccttcgtgctgttcctgagcctggccttcggcgccagctacggcaccggcggcagaatgatgaactgccccaagatcctgagacagctgggcagcaaggtgctgctgcccctgacctacgagagaatcaacaagagcatgaacaagagcatccacatcgtggtgaccatggccaagagcctggagaacagcgtggagaacaagatcgtgagcctggaccccagcgaggccggcccccccagatacctgggcgacagatacaagttctacctggagaacctgaccctgggcatcagagagagcagaaaggaggacgagggctggtacctgatgaccctggagaagaacgtgagcgtgcagagattctgcctgcagctgagactgtacgagcaggtgagcacccccgagatcaaggtgctgaacaagacccaggagaacggcacctgcaccctgatcctgggctgcaccgtggagaagggcgaccacgtggcctacagctggagcgagaaggccggcacccaccccctgaaccccgccaacagcagccacctgctgagcctgaccctgggcccccagcacgccgacaacatctacatctgcaccgtgagcaaccccatcagcaacaacagccagaccttcagcccctggcccggctgcagaaccgaccccagcggcaagaccaaccactaccagaccaccgtggagaagaagagcctgaccatctacgcccaggtgcagaagcccggccccctgcagaagaagctggacagcttccccgcccaggacccctgcaccaccatctacgtggccgccaccgagcccgtgcccgagagcgtgcaggagaccaacagcatcaccgtgtacgccagcgtgaccctgcccgagagctag

SEQ ID NO: 99004 - DNA, 1008 bp, synthetic construct
  misc_feature 1..1008: note = Description of Artificial Sequence: Synthetic coding sequence
  source 1..1008: mol_type = other DNA
atggaccccaagggcctgctgagcctgaccttcgtgctgttcctgagcctggccttcggcgccagctacggcaccggcggcagaatgatgaactgccccaagatcctgagacagctgggcagcaaggtgctgctgcccctgacctacgagagaatcaacaagagcatgaacaagagcatccacatcgtggtgaccatggccaagagcctggagaacagcgtggagaacaagatcgtgagcctggaccccagcgaggccggcccccccagatacctgggcgacagatacaagttctacctggagaacctgaccctgggcatcagagagagcagaaaggaggacgagggctggtacctgatgaccctggagaagaacgtgagcgtgcagagattctgcctgcagctgagactgtacgagcaggtgagcacccccgagatcaaggtgctgaacaagacccaggagaacggcacctgcaccctgatcctgggctgcaccgtggagaagggcgaccacgtggcctacagctggagcgagaaggccggcacccaccccctgaaccccgccaacagcagccacctgctgagcctgaccctgggcccccagcacgccgacaacatctacatctgcaccgtgagcaaccccatcagcaacaacagccagaccttcagcccctggcccggctgcagaaccgaccccagcgagaccaagccctgggccgtgtacgccggcctgctgggcggcgtgatcatgatcctgatcatggtggtgatcctgcagctgagaagaagaggcaagaccaaccactaccagaccaccgtggagaagaagagcctgaccatctacgcccaggtgcagaagcccggccccctgcagaagaagctggacagcttccccgcccaggacccctgcaccaccatctacgtggccgccaccgagcccgtgcccgagagcgtgcaggagaccaacagcatcaccgtgtacgccagcgtgaccctgcccgagagctag

SEQ ID NO: 99005 - DNA, 897 bp, synthetic construct
  misc_feature 1..897: note = Description of Artificial Sequence: Synthetic coding sequence
  source 1..897: mol_type = other DNA
atggaccccaagggcctgctgagcctgaccttcgtgctgttcctgagcctggccttcggcgccagctacggcaccggcggcagaatgatgaactgccccaagatcctgagacagctgggcagcaaggtgctgctgcccctgacctacgagagaatcaacaagagcatgaacaagagcatccacatcgtggtgaccatggccaagagcctggagaacagcgtggagaacaagatcgtgagcctggaccccagcgaggccggcccccccagatacctgggcgacagatacaagttctacctggagaacctgaccctgggcatcagagagagcagaaaggaggacgagggctggtacctgatgaccctggagaagaacgtgagcgtgcagagattctgcctgcagctgagactgtacgagcaggtgagcacccccgagatcaaggtgctgaacaagacccaggagaacggcacctgcaccctgatcctgggctgcaccgtggagaagggcgaccacgtggcctacagctggagcgagaaggccggcacccaccccctgaaccccgccaacagcagccacctgctgagcctgaccctgggcccccagcacgccgacaacatctacatctgcaccgtgagcaaccccatcagcaacaacagccagaccttcagcccctggcccggctgcagaaccgaccccagcgagaccaagccctgggccgtgtacgccggcctgctgggcggcgtgatcatgatcctgatcatggtggtgatcctgcagctgagaagaagaggcaagaccaaccactaccagaccaccgtggagaagaagagcctgaccatctacgcccaggtgcagaagcccggcgacagccaccaccagaccagcgacctgttctag

SEQ ID NO: 99006 - DNA, 435 bp, synthetic construct
  misc_feature 1..435: note = Description of Artificial Sequence: Synthetic coding sequence
  source 1..435: mol_type = other DNA
atggaccccaagggcctgctgagcctgaccttcgtgctgttcctgagcctggccttcggcgccagctacggcaccggcggcagaatgatgaactgccccaagatcctgagacagctgggcagcaaggtgctgctgcccctgacctacgagagaatcaacaagagcatgaacaagagcatccacatcgtggtgaccatggccaagagcctggagaacagcgtggagaacaagatcgtgagcctggaccccagcgaggccggcccccccagatacctgggcgacagatacaagttctacctggagaacctgaccctgggcatcagagagagcagaaaggaggacgagggctggtacctgatgaccctggagaagagcctgcacttcggctacctgtacttcgtgctgggcgccgaccacgacaacctgcagacctag

SEQ ID NO: 99007 - DNA, 810 bp, synthetic construct
  misc_feature 1..810: note = Description of Artificial Sequence: Synthetic coding sequence
  source 1..810: mol_type = other DNA
atggaccccaagggcctgctgagcctgaccttcgtgctgttcctgagcctggccttcggcgccagctacggcaccggcggcagaatgatgaactgccccaagatcctgagacagctgggcagcaaggtgctgctgcccctgacctacgagagaatcaacaagagcatgaacaagagcatccacatcgtggtgaccatggccaagagcctggagaacagcgtggagaacaagatcgtgagcctggaccccagcgaggccggcccccccagatacctgggcgacagatacaagttctacctggagaacctgaccctgggcatcagagagagcagaaaggaggacgagggctggtacctgatgaccctggagaagaacgtgagcgtgcagagattctgcctgcagctgagactgtacgagcaggtgagcacccccgagatcaaggtgctgaacaagacccaggagaacggcacctgcaccctgatcctgggctgcaccgtggagaagggcgaccacgtggcctacagctggagcgagaaggccggcacccaccccctgaaccccgccaacagcagccacctgctgagcctgaccctgggcccccagcacgccgacaacatctacatctgcaccgtgagcaaccccatcagcaacaacagccagaccttcagcccctggcccggctgcagaaccgaccccagcgagaccaagccctgggccgtgtacgccggcctgctgggcggcgtgatcatgatcctgatcatggtggtgatcctgcagctgagaagaagagccagcagcgaggagacctag

SEQ ID NO: 99008 - DNA, 1029 bp, synthetic construct
  misc_feature 1..1029: note = Description of Artificial Sequence: Synthetic coding sequence
  source 1..1029: mol_type = other DNA
atgtgcagcaccatgagcgcccccacctgcctggcccacctgcccccctgcttcctgctgctggccctggtgctggtgcccagcgacgccagcggccagagcagcagaaacgactggcaggtgctgcagcccgagggccccatgctggtggccgagggcgagaccctgctgctgagatgcatggtggtgggcagctgcaccgacggcatgatcaagtgggtgaaggtgagcacccaggaccagcaggagatctacaacttcaagagaggcagcttccccggcgtgatgcccatgatccagagaaccagcgagcccctgaactgcgactacagcatctacatccacaacgtgaccagagagcacaccggcacctaccactgcgtgagattcgacggcctgagcgagcacagcgagatgaagagcgacgagggcaccagcgtgctggtgaagggcgccggcgaccccgagcccgacctgtggatcatccagccccaggagctggtgctgggcaccaccggcgacaccgtgttcctgaactgcaccgtgctgggcgacggcccccccggccccatcagatggttccagggcgccggcctgagcagagaggccatctacaacttcggcggcatcagccaccccaaggagaccgccgtgcaggccagcaacaacgacttcagcatcctgctgcagaacgtgagcagcgaggacgccggcacctactactgcgtgaagttccagagaaagcccaacagacagtacctgagcggccagggcaccagcctgaaggtgaaggccaagagcaccagcagcaaggaggccgagttcaccagcgagcccgccaccgagatgagccccaccggcctgctggtggtgttcgcccccgtggtgctgggcctgaaggccatcaccctggccgccctgctgctggccctggccaccagcagaagaagccccggccaggaggacgtgaagaccaccggccccgccggcgccatgaacaccctggcctggagcaagggccaggagtag

SEQ ID NO: 99009 - DNA, 624 bp, synthetic construct
  misc_feature 1..624: note = Description of Artificial Sequence: Synthetic coding sequence
  source 1..624: mol_type = other DNA
atgtgcagcaccatgagcgcccccacctgcctggcccacctgcccccctgcttcctgctgctggccctggtgctggtgcccagcgacgccagcggccagagcagcagaaacgactggcaggtgctgcagcccgagggccccatgctggtggccgagggcgccggcgaccccgagcccgacctgtggatcatccagccccaggagctggtgctgggcaccaccggcgacaccgtgttcctgaactgcaccgtgctgggcgacggcccccccggccccatcagatggttccagggcgccggcctgagcagagaggccatctacaacttcggcggcatcagccaccccaaggagaccgccgtgcaggccagcaacaacgacttcagcatcctgctgcagaacgtgagcagcgaggacgccggcacctactactgcgtgaagttccagagaaagcccaacagacagtacctgagcggccagggcaccagcctgaaggtgaaggagcagaacctgcccctgcccaagagacagaacagccccgtgaacctgcagctgagatgcctgcagcaggtgagcgtgcccaccagcgtggagagcatgagccccccccaggccagaggcccctag

SEQ ID NO: 99010 - DNA, 624 bp, synthetic construct; identical to SEQ ID NO: 99009
  misc_feature 1..624: note = Description of Artificial Sequence: Synthetic coding sequence
  source 1..624: mol_type = other DNA

SEQ ID NO: 99011 - DNA, 735 bp, synthetic construct
  misc_feature 1..735: note = Description of Artificial Sequence: Synthetic coding sequence
  source 1..735: mol_type = other DNA
atgtgcagcaccatgagcgcccccacctgcctggcccacctgcccccctgcttcctgctgctggccctggtgctggtgcccagcgacgccagcggccagagcagcagaaacgactggcaggtgctgcagcccgagggccccatgctggtggccgagggcgccggcgaccccgagcccgacctgtggatcatccagccccaggagctggtgctgggcaccaccggcgacaccgtgttcctgaactgcaccgtgctgggcgacggcccccccggccccatcagatggttccagggcgccggcctgagcagagaggccatctacaacttcggcggcatcagccaccccaaggagaccgccgtgcaggccagcaacaacgacttcagcatcctgctgcagaacgtgagcagcgaggacgccggcacctactactgcgtgaagttccagagaaagcccaacagacagtacctgagcggccagggcaccagcctgaaggtgaaggccaagagcaccagcagcaaggaggccgagttcaccagcgagcccgccaccgagatgagccccaccggcctgctggtggtgttcgcccccgtggtgctgggcctgaaggccatcaccctggccgccctgctgctggccctggccaccagcagaagaagccccggccaggaggacgtgaagaccaccggccccgccggcgccatgaacaccctggcctggagcaagggccaggagtag

SEQ ID NO: 99012 - DNA, 633 bp, synthetic construct
  misc_feature 1..633: note = Description of Artificial Sequence: Synthetic coding sequence
  source 1..633: mol_type = other DNA
atgaagagcgacgagggcaccagcgtgctggtgaagggcgccggcgaccccgagcccgacctgtggatcatccagccccaggagctggtgctgggcaccaccggcgacaccgtgttcctgaactgcaccgtgctgggcgacggcccccccggccccatcagatggttccagggcgccggcctgagcagagaggccatctacaacttcggcggcatcagccaccccaaggagaccgccgtgcaggccagcaacaacgacttcagcatcctgctgcagaacgtgagcagcgaggacgccggcacctactactgcgtgaagttccagagaaagcccaacagacagtacctgagcggccagggcaccagcctgaaggtgaaggccaagagcaccagcagcaaggaggccgagttcaccagcgagcccgccaccgagatgagccccaccggcgagagaacccacctgagcggcgtgaacgagagccccaccggcaagggcgccatgaacggcctggtgatgggcagagagcagagccagacccccggcgccaacctgccccccagaatgctgcccggcctgcacctgaactgcagaaccagaacccccgagaaccacgtgatcaccgcccagctgtag

SEQ ID NO: 99013 - DNA, 2046 bp, synthetic construct
  misc_feature 1..2046: note = Description of Artificial Sequence: Synthetic coding sequence
  source 1..2046: mol_type = other DNA
atgaacgccagcagcgagggcgagagcttcgccggcagcgtgcagatccccggcggcaccaccgtgctggtggagctgacccccgacatccacatctgcggcatctgcaagcagcagttcaacaacctggacgccttcgtggcccacaagcagagcggctgccagctgaccggcaccagcgccgccgcccccagcaccgtgcagttcgtgagcgaggagaccgtgcccgccacccagacccagaccaccaccagaaccatcaccagcgagacccagaccatcaccgtgagcgcccccgagttcgtgttcgagcacggctaccagacctacctgcccaccgagagcaacgagaaccagaccgccaccgtgatcagcctgcccgccaagagcagaaccaagaagcccaccaccccccccgcccagaagagactgaactgctgctaccccggctgccagttcaagaccgcctacggcatgaaggacatggagagacacctgaagatccacaccggcgacaagccccacaagtgcgaggtgtgcggcaagtgcttcagcagaaaggacaagctgaagacccacatgagatgccacaccggcgtgaagccctacaagtgcaagacctgcgactacgccgccgccgacagcagcagcctgaacaagcacctgagaatccacagcgacgagagacccttcaagtgccagatctgcccctacgccagcagaaacagcagccagctgaccgtgcacctgagaagccacaccggcgacgcccccttccagtgctggctgtgcagcgccaagttcaagatcagcagcgacctgaagagacacatgagagtgcacagcggcgagaagcccttcaagtgcgagttctgcaacgtgagatgcaccatgaagggcaacctgaagagccacatcagaatcaagcacagcggcaacaacttcaagtgcccccactgcgacttcctgggcgacagcaaggccaccctgagaaagcacagcagagtgcaccagagcgagcaccccgagaagtgcagcgagtgcagctacagctgcagcagcaaggccgccctgagaatccacgagagaatccactgcaccgacagacccttcaagtgcaactactgcagcttcgacaccaagcagcccagcaacctgagcaagcacatgaagaagttccacggcgacatggtgaagaccgaggccctggagagaaaggacaccggcagacagagcagcagacaggtggccaagctggacgccaagaagagcttccactgcgacatctgcgacgccagcttcatgagagaggacagcctgagaagccacaagagacagcacagcgagtacagcgagagcaagaacagcgacgtgaccgtgctgcagttccagatcgaccccagcaagcagcccgccacccccctgaccgtgggccacctgcaggtgcccctgcagcccagccaggtgccccagttcagcgagggcagagtgaagatcatcgtgggccaccaggtgccccaggccaacaccatcgtgcaggccgccgccgccgccgtgaacatcgtgccccccgccctggtggcccagaaccccgaggagctgcccggcaacagcagactgcagatcctgagacaggtgagcctgatcgcccccccccagagcagcagatgccccagcgaggccggcgccatgacccagcccgccgtgctgctgaccacccacgagcagaccgacggcgccaccctgcaccagaccctgatccccaccgccagcggcggcccccaggagggcagcggcaaccagaccttcatcaccagcagcggcatcacctgcaccgacttcgagggcctgaacgccctgatccaggagggcaccgccgaggtgaccgtggtgagcgacggcggccagaacatcgccgtggccaccaccgccccccccgtgttcagcagcagcagccagcaggagctgcccaagcagacctacagcatcatccagggcgccgcccaccccgccctgctgtgccccgccgacagcatccccgactag

SEQ ID NO: 99014 - DNA, 1164 bp, synthetic construct
  misc_feature 1..1164: note = Description of Artificial Sequence: Synthetic coding sequence
  source 1..1164: mol_type = other DNA
atgcccgtgcccgccagctggccccacccccccggccccttcctgctgctgaccctgctgctgggcctgaccgaggtggccggcgaggaggagctgcagatgatccagcccgagaagctgctgctggtgaccgtgggcaagaccgccaccctgcactgcaccgtgaccagcctgctgcccgtgggccccgtgctgtggttcagaggcgtgggccccggcagagagctgatctacaaccagaaggagggccacttccccagagtgaccaccgtgagcgacctgaccaagagaaacaacatggacttcagcatcagaatcagcagcatcacccccgccgacgtgggcacctactactgcgtgaagttcagaaagggcagccccgagaacgtggagttcaagagcggccccggcaccgagatggccctgggcgccaagcccagcgcccccgtggtgctgggccccgccgccagaaccacccccgagcacaccgtgagcttcacctgcgagagccacggcttcagccccagagacatcaccctgaagtggttcaagaacggcaacgagctgagcgacttccagaccaacgtggaccccaccggccagagcgtggcctacagcatcagaagcaccgccagagtggtgctggacccctgggacgtgagaagccaggtgatctgcgaggtggcccacgtgaccctgcagggcgaccccctgagaggcaccgccaacctgagcgaggccatcagagtgccccccaccctggaggtgacccagcagcccatgagagtgggcaaccaggtgaacgtgacctgccaggtgagaaagttctacccccagagcctgcagctgacctggagcgagaacggcaacgtgtgccagagagagaccgccagcaccctgaccgagaacaaggacggcacctacaactggaccagctggttcctggtgaacatcagcgaccagagagacgacgtggtgctgacctgccaggtgaagcacgacggccagctggccgtgagcaagagactggccctggaggtgaccgtgcaccagaaggaccagagcagcgacgccacccccggccccgccagcagcctgaccgccctgctgctgatcgccgtgctgctgggccccatctacgtgccctggaagcagaagacctag

SEQ ID NO: 99015 - DNA, 513 bp, synthetic construct
  misc_feature 1..513: note = Description of Artificial Sequence: Synthetic coding sequence
  source 1..513: mol_type = other DNA
atgcccgtgcccgccagctggccccacccccccggccccttcctgctgctgaccctgctgctgggcctgaccgaggtggccggcgaggaggagctgcagatgatccagcccgagaagctgctgctggtgaccgtgggcaagaccgccaccctgcactgcaccgtgaccagcctgctgcccgtgggccccgtgctgtggttcagaggcgtgggccccggcagagagctgatctacaaccagaaggagggccacttccccagagtgaccaccgtgagcgacctgaccaagagaaacaacatggacttcagcatcagaatcagcagcatcacccccgccgacgtgggcacctactactgcgtgaagttcagaaagggcagccccgagaacgtggagttcaagagcggccccggcaccgagatggccctgggcggccccgccagcagcctgaccgccctgctgctgatcgccgtgctgctgggccccatctacgtgccctggaagcagaagacctag

SEQ ID NO: 99016 - DNA, 1065 bp, synthetic construct
  misc_feature 1..1065: note = Description of Artificial Sequence: Synthetic coding sequence
  source 1..1065: mol_type = other DNA
atgatccagcccgagaagctgctgctggtgaccgtgggcaagaccgccaccctgcactgcaccgtgaccagcctgctgcccgtgggccccgtgctgtggttcagaggcgtgggccccggcagagagctgatctacaaccagaaggagggccacttccccagagtgaccaccgtgagcgacctgaccaagagaaacaacatggacttcagcatcagaatcagcagcatcacccccgccgacgtgggcacctactactgcgtgaagttcagaaagggcagccccgagaacgtggagttcaagagcggccccggcaccgagatggccctgggcgccaagcccagcgcccccgtggtgctgggccccgccgccagaaccacccccgagcacaccgtgagcttcacctgcgagagccacggcttcagccccagagacatcaccctgaagtggttcaagaacggcaacgagctgagcgacttccagaccaacgtggaccccaccggccagagcgtggcctacagcatcagaagcaccgccagagtggtgctggacccctgggacgtgagaagccaggtgatctgcgaggtggcccacgtgaccctgcagggcgaccccctgagaggcaccgccaacctgagcgaggccatcagagtgccccccaccctggaggtgacccagcagcccatgagagtgggcaaccaggtgaacgtgacctgccaggtgagaaagttctacccccagagcctgcagctgacctggagcgagaacggcaacgtgtgccagagagagaccgccagcaccctgaccgagaacaaggacggcacctacaactggaccagctggttcctggtgaacatcagcgaccagagagacgacgtggtgctgacctgccaggtgaagcacgacggccagctggccgtgagcaagagactggccctggaggtgaccgtgcaccagaaggaccagagcagcgacgccacccccggccccgccagcagcctgaccgccctgctgctgatcgccgtgctgctgggccccatctacgtgccctggaagcagaagacctag

SEQ ID NO: 99017 - DNA, 831 bp, synthetic construct; identical to SEQ ID NO: 83331
  misc_feature 1..831: note = Description of Artificial Sequence: Synthetic coding sequence
  source 1..831: mol_type = other DNA

SEQ ID NO: 99018 - DNA, 1386 bp, synthetic construct
  misc_feature 1..1386: note = Description of Artificial Sequence: Synthetic coding sequence
  source 1..1386: mol_type = other DNA
atggccccccagagcctgcccagcagcagaatggcccccctgggcatgctgctgggcctgctgatggccgcctgcttcaccttctgcctgagccaccagaacctgaaggagttcgccctgaccaaccccgagaagagcagcaccaaggagaccgagagaaaggagaccaaggccgaggaggagctggacgccgaggtgctggaggtgttccaccccacccacgagtggcaggccctgcagcccggccaggccgtgcccgccggcagccacgtgagactgaacctgcagaccggcgagagagaggccaagctgcagtacgaggacaagttcagaaacaacctgaagggcaagagactggacatcaacaccaacacctacaccagccaggacctgaagagcgccctggccaagttcaaggagggcgccgagatggagagcagcaaggaggacaaggccagacaggccgaggtgaagagactgttcagacccatcgaggagctgaagaaggacttcgacgagctgaacgtggtgatcgagaccgacatgcagatcatggtgagactgatcaacaagttcaacagcagcagcagcagcctggaggagaagatcgccgccctgttcgacctggagtactacgtgcaccagatggacaacgcccaggacctgctgagcttcggcggcctgcaggtggtgatcaacggcctgaacagcaccgagcccctggtgaaggagtacgccgccttcgtgctgggcgccgccttcagcagcaaccccaaggtgcaggtggaggccatcgagggcggcgccctgcagaagctgctggtgatcctggccaccgagcagcccctgaccgccaagaagaaggtgctgttcgccctgtgcagcctgctgagacacttcccctacgcccagagacagttcctgaagctgggcggcctgcaggtgctgagaaccctggtgcaggagaagggcaccgaggtgctggccgtgagagtggtgaccctgctgtacgacctggtgaccgagaagatgttcgccgaggaggaggccgagctgacccaggagatgagccccgagaagctgcagcagtacagacaggtgcacctgctgcccggcctgtgggagcagggctggtgcgagatcaccgcccacctgctggccctgcccgagcacgacgccagagagaaggtgctgcagaccctgggcgtgctgctgaccacctgcagagacagatacagacaggacccccagctgggcagaaccctggccagcctgcaggccgagtaccaggtgctggccagcctggagctgcaggacggcgaggacgagggctacttccaggagctgctgggcagcgtgaacagcctgctgaaggagctgagatag

SEQ ID NO: 99019 - DNA, 1386 bp, synthetic construct; identical to SEQ ID NO: 99018
  misc_feature 1..1386: note = Description of Artificial Sequence: Synthetic coding sequence
  source 1..1386: mol_type = other DNA

SEQ ID NO: 99020 - DNA, 288 bp, synthetic construct
  misc_feature 1..288: note = Description of Artificial Sequence: Synthetic coding sequence
  source 1..288: mol_type = other DNA
atggccccccagagcctgcccagcagcagaatggcccccctgggcatgctgctgggcctgctgatggccgcctgcttcaccttctgcctgagccaccagaacctgaaggagttcgccctgaccaaccccgagaagagcagcaccaaggagaccgagagaaaggagaccaaggccgaggaggagctggacgccgaggtgctggaggtgttccaccccacccacgagtggcaggccctgcagcccggccaggccgtgcccgccggcagccacgtgagactgaacctgtag

SEQ ID NO: 99021 - DNA, 492 bp, synthetic construct
  misc_feature 1..492: note = Description of Artificial Sequence: Synthetic coding sequence
  source 1..492: mol_type = other DNA
atggccccccagagcctgcccagcagcagaatggcccccctgggcatgctgctgggcctgctgatggccgcctgcttcaccttctgcctgagccaccagaacctgaaggagttcgccctgaccaaccccgagaagagcagcaccaaggagaccgagagaaaggagaccaaggccgaggaggagctggacgccgaggtgctggaggtgttccaccccacccacgagtggcaggccctgcagcccggccaggccgtgcccgccggcagccacgtgagactgaacctgcagaccggcgagagagaggccaagctgcagtacgaggacaagttcagaaacaacctgaagggcaagagactggacatcaacaccaacacctacaccagccaggacctgaagagcgccctggccaagttcaaggagggcgccgagatggagagcagcaaggaggacaaggccagacaggccgaggtgaagagactgttcagaccctag

SEQ ID NO: 99022 - DNA, 372 bp, synthetic construct
  misc_feature 1..372: note = Description of Artificial Sequence: Synthetic coding sequence
  source 1..372: mol_type = other DNA
atggccccccagagcctgcccagcagcagaatggcccccctgggcatgctgctgggcctgctgatggccgcctgcttcaccttctgcctgagccaccagaacctgaaggagttcgccctgaccaaccccgagaagagcagcaccaaggagaccgagagaaaggagaccaaggccgaggaggagctggacgccgaggtgctggaggtgttccaccccacccacgagtggcaggccctgcagcccggccaggccgtgcccgccggcagccacgtgagactgaacctgcagaccggcgagagagaggccaagctgcagtacgaggacaagttcagaaacaacctgaagggcaagagactggacatcaacacctag

SEQ ID NO: 99023 - DNA, 579 bp, synthetic construct
  misc_feature 1..579: note = Description of Artificial Sequence: Synthetic coding sequence
  source 1..579: mol_type = other DNA
atggccgcctgcttcaccttctgcctgagccaccagaacctgaaggagttcgccctgaccaaccccgagaagagcagcaccaaggagaccgagagaaaggagaccaaggccgaggaggagctggacgccgaggtgctggaggtgttccaccccacccacgagtggcaggccctgcagcccggccaggccgtgcccgccggcagccacgtgagactgaacctgcagaccggcgagagagaggccaagctgcagtacgaggacaagttcagaaacaacctgaagggcaagagactggacatcaacaccaacacctacaccagccaggacctgaagagcgccctggccaagttcaaggagggcgccgagatggagagcagcaaggaggacaagatggacaacgcccaggacctgctgagcttcggcggcctgcaggtggtgatcaacggcctgaacagcaccgagcccctggtgaaggagtacgccgccttcgtgctgggcgccgccttcagcagcaaccccaaggtgcaggtggaggccatcgagggcggcgccctgcagaagctgctggtgatcctgtag

SEQ ID NO: 99024 - DNA, 3822 bp, synthetic construct
  misc_feature 1..3822: note = Description of Artificial Sequence: Synthetic coding sequence
  source 1..3822: mol_type = other DNA
atgaagagaagactggacgaccaggagagccccgtgtacgccgcccagcagagaagaatccccggcagcaccgaggccttcccccaccagcacagagtgctggcccccgccccccccgtgtacgaggccgtgagcgagaccatgcagagcgccaccggcatccagtacagcgtgacccccagctaccaggtgagcgccatgccccagagcagcggcagccacggccccgccatcgccgccgtgcacagcagccaccaccaccccaccgccgtgcagccccacggcggccaggtggtgcagagccacgcccaccccgccccccccgtggcccccgtgcagggccagcagcagttccagagactgaaggtggaggacgccctgagctacctggaccaggtgaagctgcagttcggcagccagccccaggtgtacaacgacttcctggacatcatgaaggagttcaagagccagagcatcgacacccccggcgtgatcagcagagtgagccagctgttcaagggccaccccgacctgatcatgggcttcaacaccttcctgccccccggctacaagatcgaggtgcagaccaacgacatggtgaacgtgaccacccccggccaggtgcaccagatccccacccacggcatccagccccagccccagccccccccccagcaccccagccagcccagcgcccagagcgcccccgcccccgcccagcccgccccccagcccccccccgccaaggtgagcaagcccagccagctgcaggcccacacccccgccagccagcagaccccccccctgcccccctacgccagccccagaagcccccccgtgcagccccacacccccgtgaccatcagcctgggcaccgcccccagcctgcagaacaaccagcccgtggagttcaaccacgccatcaactacgtgaacaagatcaagaacagattccagggccagcccgacatctacaaggccttcctggagatcctgcacacctaccagaaggagcagagaaacgccaaggaggccggcggcaactacacccccgccctgaccgagcaggaggtgtacgcccaggtggccagactgttcaagaaccaggaggacctgctgagcgagttcggccagttcctgcccgacgccaacagcagcgtgctgctgagcaagaccaccgccgagaaggtggacagcgtgagaaacgaccacggcggcaccgtgaagaagccccagctgaacaacaagccccagagacccagccagaacggctgccagatcagaagacaccccaccggcaccaccccccccgtgaagaagaagcccaagctgctgaacctgaaggacagcagcatggccgacgccagcaagcacggcggcggcaccgagagcctgttcttcgacaaggtgagaaaggccctgagaagcgccgaggcctacgagaacttcctgagatgcctggtgatcttcaaccaggaggtgatcagcagagccgagctggtgcagctggtgagccccttcctgggcaagttccccgagctgttcaactggttcaagaacttcctgggctacaaggagagcgtgcacctggagacctaccccaaggagagagccaccgagggcatcgccatggagatcgactacgccagctgcaagagactgggcagcagctacagagccctgcccaagagctaccagcagcccaagtgcaccggcagaacccccctgtgcaaggaggtgctgaacgacacctgggtgagcttccccagctggagcgaggacagcaccttcgtgagcagcaagaagacccagtacgaggagcacatctacagatgcgaggacgagagattcgagctggacgtggtgctggagaccaacctggccaccatcagagtgctggaggccatccagaagaagctgagcagactgagcgccgaggagcaggccaagttcagactggacaacaccctgggcggcaccagcgaggtgatccacagaaaggccctgcagagaatctacgccgacaaggccgccgacatcatcgacggcctgagaaagaaccccagcatcgccgtgcccatcgtgctgaagagactgaagatgaaggaggaggagtggagagaggcccagagaggcttcaacaaggtgtggagagagcagaacgagaagtactacctgaagagcctggaccaccagggcatcaacttcaagcagaacgacaccaaggtgctgagaagcaagagcctgctgaacgagatcgagagcatctacgacgagagacaggagcaggccaccgaggagaacgccggcgtgcccgtgggcccccacctgagcctggcctacgaggacaagcagatcctggaggacgccgccgccctgatcatccaccacgtgaagagacagaccggcatccagaaggaggacaagtacaagatcaagcagatcatgcaccacttcatccccgacctgctgttcgcccagagaggcgacctgagcgacgtggaggaggaggaggaggaggagatggacgtggacgaggccaccggcgccgtgaagaagcacaacggcgtgggcggcagcccccccaagagcaagctgctgttcagcaacaccgccgcccagaagctgagaggcatggacgaggtgtacaacctgttctacgtgaacaacaactggtacatcttcatgagactgcaccagatcctgtgcctgagactgctgagaatctgcagccaggccgagagacagatcgaggaggagaacagagagagagagtgggagagagaggtgctgggcatcaagagagacaagagcgacagccccgccatccagctgagactgaaggagcccatggacgtggacgtggaggactactaccccgccttcctggacatggtgagaagcctgctggacggcaacatcgacagcagccagtacgaggacagcctgagagagatgttcaccatccacgcctacatcgccttcaccatggacaagctgatccagagcatcgtgagacagctgcagcacatcgtgagcgacgagatctgcgtgcaggtgaccgacctgtacctggccgagaacaacaacggcgccaccggcggccagctgaacacccagaacagcagaagcctgctggagagcacctaccagagaaaggccgagcagctgatgagcgacgagaactgcttcaagctgatgttcatccagagccagggccaggtgcagctgaccatcgagctgctggacaccgaggaggagaacagcgacgaccccgtggaggccgagagatggagcgactacgtggagagatacatgaacagcgacaccaccagccccgagctgagagagcacctggcccagaagcccgtgttcctgcccagaaacctgagaagaatcagaaagtgccagagaggcagagagcagcaggagaaggagggcaaggagggcaacagcaagaagaccatggagaacgtggacagcctggacaagctggagtgcagattcaagctgaacagctacaagatggtgtacgtgatcaagagcgaggactacatgtacagaagaaccgccctgctgagagcccaccagagccacgagagagtgagcaagagactgcaccagagattccaggcctgggtggacaagtggaccaaggagcacgtgcccagagagatggccgccgagaccagcaagtggctgatgggcgagggcctggagggcctggtgccctgcaccaccacctgcgacaccgagaccctgcacttcgtgagcatcaacaagtacagagtgaagtacggcaccgtgttcaaggccccctag

SEQ ID NO: 99025 - DNA, 3822 bp, synthetic construct; identical to SEQ ID NO: 99024
  misc_feature 1..3822: note = Description of Artificial Sequence: Synthetic coding sequence
  source 1..3822: mol_type = other DNA

SEQ ID NO: 99026 - DNA, 3822 bp, synthetic construct; identical to SEQ ID NO: 99024
  misc_feature 1..3822: note = Description of Artificial Sequence: Synthetic coding sequence
  source 1..3822: mol_type = other DNA

SEQ ID NO: 99027 - DNA, 3393 bp, synthetic construct
  misc_feature 1..3393: note = Description of Artificial Sequence: Synthetic coding sequence
  source 1..3393: mol_type = other DNA
atggcccacgccggcggcggcagcggcggcagcggcgccggcggccccgccggcagaggcctgagcggcgccagatggggcagaagcggcagcgccggccacgagaagctgcccgtgcacgtggaggacgccctgacctacctggaccaggtgaagatcagattcggcagcgaccccgccacctacaacggcttcctggagatcatgaaggagttcaagagccagagcatcgacacccccggcgtgatcagaagagtgagccagctgttccacgagcaccccgacctgatcgtgggcttcaacgccttcctgcccctgggctacagaatcgacatccccaagaacggcaagctgaacatccagagccccctgaccagccaggagaacagccacaaccacggcgacggcgccgaggacttcaagcagcaggtgccctacaaggaggacaagccccaggtgcccctggagagcgacagcgtggagttcaacaacgccatcagctacgtgaacaagatcaagaccagattcctggaccaccccgagatctacagaagcttcctggagatcctgcacacctaccagaaggagcagctgaacaccagaggcagacccttcagaggcatgagcgaggaggaggtgttcaccgaggtggccaacctgttcagaggccaggaggacctgctgagcgagttcggccagttcctgcccgaggccaagagaagcctgttcaccggcaacggcccctgcgagatgcacagcgtgcagaagaacgagcacgacaagacccccgagcacagcagaaagagaagcagacccagcctgctgagacccgtgagcgcccccgccaagaagaagatgaagctgagaggcaccaaggacctgagcatcgccgccgtgggcaagtacggcaccctgcaggagttcagcttcttcgacaaggtgagaagagtgctgaagagccaggaggtgtacgagaacttcctgagatgcatcgccctgttcaaccaggagctggtgagcggcagcgagctgctgcagctggtgagccccttcctgggcaagttccccgagctgttcgcccagttcaagagcttcctgggcgtgaaggagctgagcttcgccccccccatgagcgacagaagcggcgacggcatcagcagagagatcgactacgccagctgcaagagaatcggcagcagctacagagccctgcccaagacctaccagcagcccaagtgcagcggcagaaccgccatctgcaaggaggtgctgaacgacacctgggtgagcttccccagctggagcgaggacagcaccttcgtgagcagcaagaagaccccctacgaggagcagctgcacagatgcgaggacgagagattcgagctggacgtggtgctggagaccaacctggccaccatcagagtgctggagagcgtgcagaagaagctgagcagaatggcccccgaggaccaggagaagttcagactggacgacagcctgggcggcaccagcgaggtgatccagagaagagccatctacagaatctacggcgacaaggcccccgagatcatcgagagcctgaagaagaaccccgtgaccgccgtgcccgtggtgctgaagagactgaaggccaaggaggaggagtggagagaggcccagcagggcttcaacaagatctggagagagcagtacgagaaggcctacctgaagagcctggaccaccaggccgtgaacttcaagcagaacgacaccaaggccctgagaagcaagagcctgctgaacgagatcgagagcgtgtacgacgagcaccaggagcagcacagcgagggcagaagcgcccccagcagcgagccccacctgatcttcgtgtacgaggacagacagatcctggaggacgccgccgccctgatcagctactacgtgaagagacagcccgccatccagaaggaggaccagggcaccatccaccagctgctgcaccagttcgtgcccagcctgttcttcagccagcagctggacctgggcgccagcgaggagagcgccgacgaggacagagacagcccccagggccagaccaccgaccccagcgagagaaagaagcccgcccccggcccccacagcagcccccccgaggagaagggcgccttcggcgacgcccccgccaccgagcagccccccctgcccccccccgccccccacaagcccctggacgacgtgtacagcctgttcttcgccaacaacaactggtacttcttcctgagactgcaccagaccctgtgcagcagactgctgaagatctacagacaggcccagaagcagctgctggagtacagaaccgagaaggagagagagaagctgctgtgcgagggcagaagagagaagggcagcgaccccgccatggagctgagactgaagcagcccagcgaggtggagctggaggagtactaccccgccttcctggacatggtgagaagcctgctggagggcagcatcgaccccacccagtacgaggacaccctgagagagatgttcaccatccacgcctacgtgggcttcaccatggacaagctggtgcagaacatcgccagacagctgcaccacctggtgagcgacgacgtgtgcctgaaggtggtggagctgtacctgaacgagaagaagagaggcgccgccggcggcaacctgagcagcagatgcgtgagagccgccagagagaccagctaccagtggaaggccgagagatgcatggccgacgagaactgcttcaaggtgatgttcctgcagagaaagggccaggtgatcatgaccatcgagctgctggacaccgaggaggcccagaccgaggaccccgtggaggtgcagcacctggccagatacgtggagcagtacgtgggcaccgagggcgccagcagcagccccaccgagggcttcctgctgaagcccgtgttcctgcagagaaacctgaagaagttcagaagaagatggcagagcgagcaggccagagccctgagaggcgaggccagaagcagctggaagagactggtgggcgtggagagcgcctgcgacgtggactgcagattcaagctgagcacccacaagatggtgttcatcgtgaacagcgaggactacatgtacagaagaggcaccctgtgcagagccaagcaggtgcagcccctggtgctgctgagacaccaccagcacttcgaggagtggcacagcagatggctggaggacaacgtgaccgtggaggccgccagcctggtgcaggactggctgatgggcgaggaggacgaggacatggtgccctgcaagaccctgtgcgagaccgtgcacgtgcacggcctgcccgtgaccagatacagagtgcagtacagcagaagacccgccagcccctag

SEQ ID NO: 99028 - DNA, 3489 bp, synthetic construct
  misc_feature 1..3489: note = Description of Artificial Sequence: Synthetic coding sequence
  source 1..3489: mol_type = other DNA
atggcccacgccggcggcggcagcggcggcagcggcgccggcggccccgccggcagaggcctgagcggcgccagatggggcagaagcggcagcgccggccacgagaagctgcccgtgcacgtggaggacgccctgacctacctggaccaggtgaagatcagattcggcagcgaccccgccacctacaacggcttcctggagatcatgaaggagttcaagagccagagcatcgacacccccggcgtgatcagaagagtgagccagctgttccacgagcaccccgacctgatcgtgggcttcaacgccttcctgcccctgggctacagaatcgacatccccaagaacggcaagctgaacatccagagccccctgaccagccaggagaacagccacaaccacggcgacggcgccgaggacttcaagcagcaggtgccctacaaggaggacaagccccaggtgcccctggagagcgacagcgtggagttcaacaacgccatcagctacgtgaacaagatcaagaccagattcctggaccaccccgagatctacagaagcttcctggagatcctgcacacctaccagaaggagcagctgaacaccagaggcagacccttcagaggcatgagcgaggaggaggtgttcaccgaggtggccaacctgttcagaggccaggaggacctgctgagcgagttcggccagttcctgcccgaggccaagagaagcctgttcaccggcaacggcccctgcgagatgcacagcgtgcagaagaacgagcacgacaagacccccgagcacagcagaaagagaagcagacccagcctgctgagacccgtgagcgcccccgccaagaagaagatgaagctgagaggcaccaaggacctgagcatcgccgccgtgggcaagtacggcaccctgcaggagttcagcttcttcgacaaggtgagaagagtgctgaagagccaggaggtgtacgagaacttcctgagatgcatcgccctgttcaaccaggagctggtgagcggcagcgagctgctgcagctggtgagccccttcctgggcaagttccccgagctgttcgcccagttcaagagcttcctgggcgtgaaggagctgagcttcgccccccccatgagcgacagaagcggcgacggcatcagcagagagatcgactacgccagctgcaagagaatcggcagcagctacagagccctgcccaagacctaccagcagcccaagtgcagcggcagaaccgccatctgcaaggagctggaccactggaccctgctgcagggcagctggaccgacgactactgcatgagcaagttcaagaacacctgctggatccccggctacagcgccggcgtgctgaacgacacctgggtgagcttccccagctggagcgaggacagcaccttcgtgagcagcaagaagaccccctacgaggagcagctgcacagatgcgaggacgagagattcgagctggacgtggtgctggagaccaacctggccaccatcagagtgctggagagcgtgcagaagaagctgagcagaatggcccccgaggaccaggagaagttcagactggacgacagcctgggcggcaccagcgaggtgatccagagaagagccatctacagaatctacggcgacaaggcccccgagatcatcgagagcctgaagaagaaccccgtgaccgccgtgcccgtggtgctgaagagactgaaggccaaggaggaggagtggagagaggcccagcagggcttcaacaagatctggagagagcagtacgagaaggcctacctgaagagcctggaccaccaggccgtgaacttcaagcagaacgacaccaaggccctgagaagcaagagcctgctgaacgagatcgagagcgtgtacgacgagcaccaggagcagcacagcgagggcagaagcgcccccagcagcgagccccacctgatcttcgtgtacgaggacagacagatcctggaggacgccgccgccctgatcagctactacgtgaagagacagcccgccatccagaaggaggaccagggcaccatccaccagctgctgcaccagttcgtgcccagcctgttcttcagccagcagctggacctgggcgccagcgaggagagcgccgacgaggacagagacagcccccagggccagaccaccgaccccagcgagagaaagaagcccgcccccggcccccacagcagcccccccgaggagaagggcgccttcggcgacgcccccgccaccgagcagccccccctgcccccccccgccccccacaagcccctggacgacgtgtacagcctgttcttcgccaacaacaactggtacttcttcctgagactgcaccagaccctgtgcagcagactgctgaagatctacagacaggcccagaagcagctgctggagtacagaaccgagaaggagagagagaagctgctgtgcgagggcagaagagagaagggcagcgaccccgccatggagctgagactgaagcagcccagcgaggtggagctggaggagtactaccccgccttcctggacatggtgagaagcctgctggagggcagcatcgaccccacccagtacgaggacaccctgagagagatgttcaccatccacgcctacgtgggcttcaccatggacaagctggtgcagaacatcgccagacagctgcaccacctggtgagcgacgacgtgtgcctgaaggtggtggagctgtacctgaacgagaagaagagaggcgccgccggcggcaacctgagcagcagatgcgtgagagccgccagagagaccagctaccagtggaaggccgagagatgcatggccgacgagaactgcttcaaggtgatgttcctgcagagaaagggccaggtgatcatgaccatcgagctgctggacaccgaggaggcccagaccgaggaccccgtggaggtgcagcacctggccagatacgtggagcagtacgtgggcaccgagggcgccagcagcagccccaccgagggcttcctgctgaagcccgtgttcctgcagagaaacctgaagaagttcagaagaagatggcagagcgagcaggccagagccctgagaggcgaggccagaagcagctggaagagactggtgggcgtggagagcgcctgcgacgtggactgcagattcaagctgagcacccacaagatggtgttcatcgtgaacagcgaggactacatgtacagaagaggcaccctgtgcagagccaagcaggtgcagcccctggtgctgctgagacaccaccagcacttcgaggagtggcacagcagatggctggaggacaacgtgaccgtggaggccgccagcctggtgcaggactggctgatgggcgaggaggacgaggacatggtgccctgcaagaccctgtgcgagaccgtgcacgtgcacggcctgcccgtgaccagatacagagtgcagtacagcagaagacccgccagcccctag

SEQ ID NO: 99029 - DNA, 3171 bp, synthetic construct
  misc_feature 1..3171: note = Description of Artificial Sequence: Synthetic coding sequence
  source 1..3171: mol_type = other DNA
atgagcagccagcagttccccagactgggcgcccccagcaccggcctgagccaggcccccagccagatcgccaacagcggcagcgccggcctgatcaaccccgccgccaccgtgaacgacgagagcggcagagacagcgaggtgagcgccagagagcacatgagcagcagcagcagcctgcagagcagagaggagaagcaggagcccgtggtggtgagaccctacccccaggtgcagatgctgagcacccaccacgccgtggccagcgccacccccgtggccgtgaccgccccccccgcccacctgacccccgccgtgcccctgagcttcagcgagggcctgatgaagcccccccccaagcccaccatgcccagcagacccatcgcccccgccccccccagcaccctgagcctgccccccaaggtgcccggccaggtgaccgtgaccatggagagcagcatcccccaggccagcgccatccccgtggccaccatcagcggccagcagggccaccccagcaacctgcaccacatcatgaccaccaacgtgcagatgagcatcatcagaagcaacgcccccggcccccccctgcacatcggcgccagccacctgcccagaggcgccgccgccgccgccgtgatgagcagcagcaaggtgaccaccgtgctgagacccaccagccagctgcccaacgccgccaccgcccagcccgccgtgcagcacatcatccaccagcccatccagagcagaccccccgtgaccaccagcaacgccatcccccccgccgtggtggccaccgtgagcgccaccagagcccagagccccgtgatcaccaccaccgccgcccacgccaccgacagcgccctgagcagacccaccctgagcatccagcacccccccagcgccgccatcagcatccagagacccgcccagagcagagacgtgaccaccagaatcaccctgcccagccaccccgccctgggcacccccaagcagcagctgcacaccatggcccagaagaccatcttcagcaccggcacccccgtggccgccgccaccgtggcccccatcctggccaccaacaccatccccagcgccaccaccgccggcagcgtgagccacacccaggcccccaccagcaccatcgtgaccatgaccgtgcccagccacagcagccacgccaccgccgtgaccaccagcaacatccccgtggccaaggtggtgccccagcagatcacccacaccagccccagaatccagcccgactaccccgccgagagaagcagcctgatccccatcagcggccacagagccagccccaaccccgtggccatggagaccagaagcgacaacagacccagcgtgcccgtgcagttccagtacttcctgcccacctacccccccagcgcctaccccctggccgcccacacctacacccccatcaccagcagcgtgagcaccatcagacagtaccccgtgagcgcccaggcccccaacagcgccatcaccgcccagaccggcgtgggcgtggccagcaccgtgcacctgaaccccatgcagctgatgaccgtggacgccagccacgccagacacatccagggcatccagcccgcccccatcagcacccagggcatccagcccgcccccatcggcacccccggcatccagcccgcccccctgggcacccagggcatccacagcgccacccccatcaacacccagggcctgcagcccgcccccatgggcacccagcagccccagcccgagggcaagaccagcgtggtgctggccgacggcgccaccatcgtggccaaccccatcagcaaccccttcagcgccgcccccgccgccaccaccgtggtgcagacccacagccagagcgccagcaccaacgcccccgcccagggcagcagccccagacccagcatcctgagaaagaagcccgccaccgacggcatggccgtgagaaagaccctgatccccccccagccccccgacgtggccagccccagagtggagagcagcatgagaagcaccagcggcagccccagacccgccggcgccaagcccaagagcgagatccacgtgagcatggccacccccgtgaccgtgagcatggagaccgtgagcaaccagaacaacgaccagcccaccatcgccgtgccccccaccgcccagcagcccccccccaccatccccaccatgatcgccgccgccagcccccccagccagcccgccgtggccctgagcaccatccccggcgccgtgcccatcaccccccccatcaccaccatcgccgccgcccccccccccagcgtgaccgtgggcggcagcctgagcagcgtgctgggcccccccgtgcccgagatcaaggtgaaggaggaggtggagcccatggacatcatgagacccgtgagcgccgtgccccccctggccaccaacaccgtgagccccagcctggccctgctggccaacaacctgagcatgcccaccagcgacctgccccccggcgccagccccagaaagaagcccagaaagcagcagcacgtgatcagcaccgaggagggcgacatgatggagaccaacagcaccgacgacgagaagagcaccgccaagagcctgctggtgaaggccgagaagagaaagagcccccccaaggagtacatcgacgaggagggcgtgagatacgtgcccgtgagacccagaccccccatcaccctgctgagacactacagaaacccctggaaggccgcctaccaccacttccagagatacagcgacgtgagagtgaaggaggagaagaaggccatgctgcaggagatcgccaaccagaagggcgtgagctgcagagcccagggctggaaggtgcacctgtgcgccgcccagctgctgcagctgaccaacctggagcacgacgtgtacgagagactgaccaacctgcaggagggcatcatccccaagaagaaggccgccaccgacgacgacctgcacagaatcaacgagctgatccagggcaacatgcagagatgcaagctggtgatggaccagatcagcgaggccagagacagcatgctgaaggtgctggaccacaaggacagagtgctgaagctgctgaacaagaacggcaccgtgaagaaggtgagcaagctgaagagaaaggagaaggtgtag

SEQ ID NO: 99030 - DNA, 3147 bp, synthetic construct
  misc_feature 1..3147: note = Description of Artificial Sequence: Synthetic coding sequence
  source 1..3147: mol_type = other DNA
atgggcccccccagacacccccaggccggcgagatcgaggccggcggcgccggcggcggcagaagactgcaggtggagatgagcagccagcagttccccagactgggcgcccccagcaccggcctgagccaggcccccagccagatcgccaacagcggcagcgccggcctgatcaaccccgccgccaccgtgaacgacgagagcggcagagacagcgaggtgagcgccagagagcacatgagcagcagcagcagcctgcagagcagagaggagaagcaggagcccgtggtggtgagaccctacccccaggtgcagatgctgagcacccaccacgccgtggccagcgccacccccgtggccgtgaccgccccccccgcccacctgacccccgccgtgcccctgagcttcagcgagggcctgatgaagcccccccccaagcccaccatgcccagcagacccatcgcccccgccccccccagcaccctgagcctgccccccaaggtgcccggccaggtgaccgtgaccatggagagcagcatcccccaggccagcgccatccccgtggccaccatcagcggccagcagggccaccccagcaacctgcaccacatcatgaccaccaacgtgcagatgagcatcatcagaagcaacgcccccggcccccccctgcacatcggcgccagccacctgcccagaggcgccgccgccgccgccgtgatgagcagcagcaaggtgaccaccgtgctgagacccaccagccagctgcccaacgccgccaccgcccagcccgccgtgcagcacatcatccaccagcccatccagagcagaccccccgtgaccaccagcaacgccatcccccccgccgtggtggccaccgtgagcgccaccagagcccagagccccgtgatcaccaccaccgccgcccacgccaccgacagcgccctgagcagacccaccctgagcatccagcacccccccagcgccgccatcagcatccagagacccgcccagagcagagacgtgaccaccagaatcaccctgcccagccaccccgccctgggcacccccaagcagcagctgcacaccatggcccagaagaccatcttcagcaccggcacccccgtggccgccgccaccgtggcccccatcctggccaccaacaccatccccagcgccaccaccgccggcagcgtgagccacacccaggcccccaccagcaccatcgtgaccatgaccgtgcccagccacagcagccacgccaccgccgtgaccaccagcaacatccccgtggccaaggtggtgccccagcagatcacccacaccagccccagaatccagcccgactaccccgccgagagaagcagcctgatccccatcagcggccacagagccagccccaaccccgtggccatggagaccagaagcgacaacagacccagcgtgcccgtgcagttccagtacttcctgcccacctacccccccagcgcctaccccctggccgcccacacctacacccccatcaccagcagcgtgagcaccatcagacagtaccccgtgagcgcccaggcccccaacagcgccatcaccgcccagaccggcgtgggcgtggccagcaccgtgcacctgaaccccatgcagctgatgaccgtggacgccagccacgccagacacatccagggcatccagcccgcccccatcagcacccagggcatccagcccgcccccatcggcacccccggcatccagcccgcccccctgggcacccagggcatccacagcgccacccccatcaacacccagggcctgcagcccgcccccatgggcacccagcagccccagcccgagggcaagaccagcgccgtggtgctggccgacggcgccaccatcgtggccaaccccatcagcaaccccttcagcgccgcccccgccgccaccaccgtggtgcagacccacagccagagcgccagcaccaacgcccccgcccagggcagcagccccagacccagcatcctgagaaagaagcccgccaccgacggcgccaagcccaagagcgagatccacgtgagcatggccacccccgtgaccgtgagcatggagaccgtgagcaaccagaacaacgaccagcccaccatcgccgtgccccccaccgcccagcagcccccccccaccatccccaccatgatcgccgccgccagcccccccagccagcccgccgtggccctgagcaccatccccggcgccgtgcccatcaccccccccatcaccaccatcgccgccgcccccccccccagcgtgaccgtgggcggcagcctgagcagcgtgctgggcccccccgtgcccgagatcaaggtgaaggaggaggtggagcccatggacatcatgagacccgtgagcgccgtgccccccctggccaccaacaccgtgagccccagcctggccctgctggccaacaacctgagcatgcccaccagcgacctgccccccggcgccagccccagaaagaagcccagaaagcagcagcacgtgatcagcaccgaggagggcgacatgatggagaccaacagcaccgacgacgagaagagcaccgccaagagcctgctggtgaaggccgagaagagaaagagcccccccaaggagtacatcgacgaggagggcgtgagatacgtgcccgtgagacccagaccccccatcaccctgctgagacactacagaaacccctggaaggccgcctaccaccacttccagagatacagcgacgtgagagtgaaggaggagaagaaggccatgctgcaggagatcgccaaccagaagggcgtgagctgcagagcccagggctggaaggtgcacctgtgcgccgcccagctgctgcagctgaccaacctggagcacgacgtgtacgagagactgaccaacctgcaggagggcatcatccccaagaagaaggccgccaccgacgacgacctgcacagaatcaacgagctgatccagggcaacatgcagagatgcaagctggtgatggaccagatcagcgaggccagagacagcatgctgaaggtgctggaccacaaggacagagtgctgaagctgctgaacaagaacggcaccgtgaagaaggtgagcaagctgaagagaaaggagaaggtgtag

SEQ ID NO: 99031 - DNA, 3252 bp, synthetic construct
  misc_feature 1..3252: note = Description of Artificial Sequence: Synthetic coding sequence
  source 1..3252: mol_type = other DNA
atgggcccccccagacacccccaggccggcgagatcgaggccggcggcgccggcggcggcagaagactgcaggtggagatgagcagccagcagttccccagactgggcgcccccagcaccggcctgagccaggcccccagccagatcgccaacagcggcagcgccggcctgatcaaccccgccgccaccgtgaacgacgagagcggcagagacagcgaggtgagcgccagagagcacatgagcagcagcagcagcctgcagagcagagaggagaagcaggagcccgtggtggtgagaccctacccccaggtgcagatgctgagcacccaccacgccgtggccagcgccacccccgtggccgtgaccgccccccccgcccacctgacccccgccgtgcccctgagcttcagcgagggcctgatgaagcccccccccaagcccaccatgcccagcagacccatcgcccccgccccccccagcaccctgagcctgccccccaaggtgcccggccaggtgaccgtgaccatggagagcagcatcccccaggccagcgccatccccgtggccaccatcagcggccagcagggccaccccagcaacctgcaccacatcatgaccaccaacgtgcagatgagcatcatcagaagcaacgcccccggcccccccctgcacatcggcgccagccacctgcccagaggcgccgccgccgccgccgtgatgagcagcagcaaggtgaccaccgtgctgagacccaccagccagctgcccaacgccgccaccgcccagcccgccgtgcagcacatcatccaccagcccatccagagcagaccccccgtgaccaccagcaacgccatcccccccgccgtggtggccaccgtgagcgccaccagagcccagagccccgtgatcaccaccaccgccgcccacgccaccgacagcgccctgagcagacccaccctgagcatccagcacccccccagcgccgccatcagcatccagagacccgcccagagcagagacgtgaccaccagaatcaccctgcccagccaccccgccctgggcacccccaagcagcagctgcacaccatggcccagaagaccatcttcagcaccggcacccccgtggccgccgccaccgtggcccccatcctggccaccaacaccatccccagcgccaccaccgccggcagcgtgagccacacccaggcccccaccagcaccatcgtgaccatgaccgtgcccagccacagcagccacgccaccgccgtgaccaccagcaacatccccgtggccaaggtggtgccccagcagatcacccacaccagccccagaatccagcccgactaccccgccgagagaagcagcctgatccccatcagcggccacagagccagccccaaccccgtggccatggagaccagaagcgacaacagacccagcgtgcccgtgcagttccagtacttcctgcccacctacccccccagcgcctaccccctggccgcccacacctacacccccatcaccagcagcgtgagcaccatcagacagtaccccgtgagcgcccaggcccccaacagcgccatcaccgcccagaccggcgtgggcgtggccagcaccgtgcacctgaaccccatgcagctgatgaccgtggacgccagccacgccagacacatccagggcatccagcccgcccccatcagcacccagggcatccagcccgcccccatcggcacccccggcatccagcccgcccccctgggcacccagggcatccacagcgccacccccatcaacacccagggcctgcagcccgcccccatgggcacccagcagccccagcccgagggcaagaccagcgccgtggtgctggccgacggcgccaccatcgtggccaaccccatcagcaaccccttcagcgccgcccccgccgccaccaccgtggtgcagacccacagccagagcgccagcaccaacgcccccgcccagggcagcagccccagacccagcatcctgagaaagaagcccgccaccgacggcatggccgtgagaaagaccctgatccccccccagccccccgacgtggccagccccagagtggagagcagcatgagaagcaccagcggcagccccagacccgccggcgccaagcccaagagcgagatccacgtgagcatggccacccccgtgaccgtgagcatggagaccgtgagcaaccagaacaacgaccagcccaccatcgccgtgccccccaccgcccagcagcccccccccaccatccccaccatgatcgccgccgccagcccccccagccagcccgccgtggccctgagcaccatccccggcgccgtgcccatcaccccccccatcaccaccatcgccgccgcccccccccccagcgtgaccgtgggcggcagcctgagcagcgtgctgggcccccccgtgcccgagatcaaggtgaaggaggaggtggagcccatggacatcatgagacccgtgagcgccgtgccccccctggccaccaacaccgtgagccccagcctggccctgctggccaacaacctgagcatgcccaccagcgacctgccccccggcgccagccccagaaagaagcccagaaagcagcagcacgtgatcagcaccgaggagggcgacatgatggagaccaacagcaccgacgacgagaagagcaccgccaagagcctgctggtgaaggccgagaagagaaagagcccccccaaggagtacatcgacgaggagggcgtgagatacgtgcccgtgagacccagaccccccatcaccctgctgagacactacagaaacccctggaaggccgcctaccaccacttccagagatacagcgacgtgagagtgaaggaggagaagaaggccatgctgcaggagatcgccaaccagaagggcgtgagctgcagagcccagggctggaaggtgcacctgtgcgccgcccagctgctgcagctgaccaacctggagcacgacgtgtacgagagactgaccaacctgcaggagggcatcatccccaagaagaaggccgccaccgacgacgacctgcacagaatcaacgagctgatccagggcaacatgcagagatgcaagctggtgatggaccagatcagcgaggccagagacagcatgctgaaggtgctggaccacaaggacagagtgctgaagctgctgaacaagaacggcaccgtgaagaaggtgagcaagctgaagagaaaggagaaggtgtag

SEQ ID NO: 99032 - DNA, 789 bp, synthetic construct
  misc_feature 1..789: note = Description of Artificial Sequence: Synthetic coding sequence
  source 1..789: mol_type = other DNA
atgagcagccagcagttccccagactgggcgcccccagcaccggcctgagccaggcccccagccagatcgccaacagcggcagcgccggcctgatcaaccccgccgccaccgtgaacgacgagagcggcagagacagcgaggtgagcgccagagagcacatgagcagcagcagcagcctgcagagcagagaggagaagcaggagcccgtggtggtgagaccctacccccaggtgcagatgctgagcacccaccacgccgtggccagcgccacccccgtggccgtgaccgccccccccgcccacctgacccccgccgtgcccctgagcttcagcgagggcctgatgaagcccccccccaagcccaccatgcccagcagacccatcgcccccgccccccccagcaccctgagcctgccccccaaggtgcccggccaggtgaccgtgaccatggagagcagcatcccccaggccagcgccatccccgtggccaccatcagcggccagcagggccaccccagcaacctgcaccacatcatgaccaccaacgtgcagatgagcatcatcagaagcaacgcccccggcccccccctgcacatcggcgccagccacctgcccagaggcgccgccgccgccgccgtgatgagcagcagcaaggtgaccaccgtgctgagacccaccagccagctgcccaacgccgccaccgcccagcccgccgtgcagcacatcatccaccagcccatccagagcagaccccccgtgaccaccagcaacgccatcccccccgcctag

SEQ ID NO: 99033 - DNA, 630 bp, synthetic construct
  misc_feature 1..630: note = Description of Artificial Sequence: Synthetic coding sequence
  source 1..630: mol_type = other DNA
atgaaccccagcatgaagcagaagcaggaggagatcaaggagaacatcaagaacagcagcgtgcccagaagaaccctgaagatgatccagcccagcgccagcggcagcctggtgggcagagagaacgagctgagcgccggcctgagcaagagaaagcacagaaacgaccacctgaccagcaccaccagcagccccggcgtgatcgtgcccgagagcagcgagaacaagaacctgggcggcgtgacccaggagagcttcgacctgatgatcaaggagaaccccagcagccagtactggaaggaggtggccgagaagagaagaaaggccctgtacgaggccctgaaggagaacgagaagctgcacaaggagatcgagcagaaggacaacgagatcgccagactgaagaaggagaacaaggagctggccgaggtggccgagcacgtgcagtacatggccgagctgatcgagagactgaacggcgagcccctggacaacttcgagagcctggacaaccaggagttcgacagcgaggaggagaccgtggaggacagcctggtggaggacagcgagatcggcacctgcgccgagggcaccgtgagcagcagcaccgacgccaagccctgcatctag

SEQ ID NO: 99034 - DNA, 2622 bp, synthetic construct
  misc_feature 1..2622: note = Description of Artificial Sequence: Synthetic coding sequence
  source 1..2622: mol_type = other DNA
atggccgagatggagaaggagggcagaccccccgagaacaagagaagcagaaagcccgcccaccccgtgaagagagagatcaacgaggagatgaagaacttcgccgagaacaccatgaacgagctgctgggctggtacggctacgacaaggtggagctgaaggacggcgaggacatcgagttcagaagctaccccaccgacggcgagagcagacagcacatcagcgtgctgaaggagaacagcctgcccaagcccaagctgcccgaggacagcgtgatcagcccctacaacatcagcaccggctacagcggcctggccaccggcaacggcctgagcgacagccccgccggcagcaaggaccacggcagcgtgcccatcatcgtgcccctgatccccccccccttcatcaagccccccgccgaggacgacgtgagcaacgtgcagatcatgtgcgcctggtgccagaaggtgggcatcaagagatacagcctgagcatgggcagcgaggtgaagagcttctgcagcgagaagtgcttcgccgcctgcagaagagcctacttcaagagaaacaaggccagagacgaggacggccacgccgagaacttcccccagcagcactacgccaaggagacccccagactggccttcaagaacaactgcgagctgctggtgtgcgactggtgcaagcacatcagacacaccaaggagtacctggacttcggcgacggcgagagaagactgcagttctgcagcgccaagtgcctgaaccagtacaagatggacatcttctacaaggagacccaggccaacctgcccgccggcctgtgcagcaccctgcacccccccatggagaacaaggccgagggcaccggcgtgcagctgctgacccccgacagctggaacatccccctgaccgacgccagaagaaaggcccccagccccgtggccaccgccggccagagccagggccccggccccagcgccagcaccaccgtgagccccagcgacaccgccaactgcagcgtgaccaagatccccacccccgtgcccaagagcatccccatcagcgagacccccaacatcccccccgtgagcgtgcagccccccgccagcatcggcccccccctgggcgtgccccccagaagcccccccatggtgatgaccaacagaggccccgtgcccctgcccatcttcatggagcagcagatcatgcagcagatcagaccccccttcatcagaggccccccccaccacgccagcaaccccaacagccccctgagcaaccccatgctgcccggcatcggccccccccccggcggccccagaaacctgggccccaccagcagccccatgcacagacccatgctgagcccccacatccacccccccagcacccccaccatgcccggcaacccccccggcctgctgcccccccccccccccggcgcccccctgcccagcctgcccttcccccccgtgagcatgatgcccaacggccccatgcccgtgccccagatgatgaacttcggcctgcccagcctggcccccctggtgcccccccccaccctgctggtgccctaccccgtgatcgtgcccctgcccgtgcccatccccatccccatccccatcccccacgtgagcgacagcaagccccccaacggcttcagcagcaacggcgagaacttcatccccaacgcccccggcgacagcgccgccgccggcggcaagcccagcggccacagcctgagccccagagacagcaagcagggcagcagcaagagcgccgacagcccccccggctgcagcggccaggccctgagcctggcccccacccccgccgagcacggcagaagcgaggtggtggacctgaccagaagagccggcagcccccccggcccccccggcgccggcggccagctgggcttccccggcgtgctgcagggcccccaggacggcgtgatcgacctgaccgtgggccacagagccagactgcacaacgtgatccacagagccctgcacgcccacgtgaaggccgagagagagcccagcgccgccgagagaagaacctgcggcggctgcagagacggccactgcagcccccccgccgccggcgaccccggccccggcgcccccgccggccccgaggccgccgccgcctgcaacgtgatcgtgaacggcaccagaggcgccgccgccgagggcgccaagagcgccgagcccccccccgagcagcccccccccccccccccccccgccccccccaagaagctgctgagccccgaggagcccgccgtgagcgagctggagagcgtgaaggagaacaactgcgccagcaactgccacctggacggcgaggccgccaagaagctgatgggcgaggaggccctggccggcggcgacaagagcgaccccaacctgaacaaccccgccgacgaggaccacgcctacgccctgagaatgctgcccaagaccggctgcgtgatccagcccgtgcccaagcccgccgagaaggccgccatggccccctgcatcatcagcagccccatgctgagcgccggccccgaggacctggagccccccctgaagagaagatgcctgagaatcagaaaccagaacaagtag

SEQ ID NO: 99035 - DNA, 1233 bp, synthetic construct
  misc_feature 1..1233: note = Description of Artificial Sequence: Synthetic coding sequence
  source 1..1233: mol_type = other DNA
atgcccggcgtgtgcgacagagcccccgacttcctgagccccagcgaggaccaggtgctgagacccgccctgggcagcagcgtggccctgaactgcaccgcctgggtggtgagcggcccccactgcagcctgcccagcgtgcagtggctgaaggacggcctgcccctgggcatcggcggccactacagcctgcacgagtacagctgggtgaaggccaacctgagcgaggtgctggtgagcagcgtgctgggcgtgaacgtgaccagcaccgaggtgtacggcgccttcacctgcagcatccagaacatcagcttcagcagcttcaccctgcagagagccggccccaccagccacgtggccgccgtgctggccagcctgctggtgctgctggccctgctgctggccgccctgctgtacgtgaagtgcagactgaacgtgctgctgtggtaccaggacgcctacggcgaggtggagatcaacgacggcaagctgtacgacgcctacgtgagctacagcgactgccccgaggacagaaagttcgtgaacttcatcctgaagccccagctggagagaagaagaggctacaagctgttcctggacgacagagacctgctgcccagagccgagcccagcgccgacctgctggtgaacctgagcagatgcagaagactgatcgtggtgctgagcgacgccttcctgagcagagcctggtgcagccacagcttcagagagggcctgtgcagactgctggagctgaccagaagacccatcttcatcaccttcgagggccagagaagagaccccgcccaccccgccctgagactgctgagacagcacagacacctggtgaccctgctgctgtggagacccggcagcgtgacccccagcagcgacttctggaaggaggtgcagctggccctgcccagaaaggtgcagtacagacccgtggagggcgacccccagacccagctgcaggacgacaaggaccccatgctgatcctgagaggcagagtgcccgagggcagagccctggacagcgaggtggaccccgaccccgagggcgacctgggcgtgagaggccccgtgttcggcgagcccagcgcccccccccacaccagcggcgtgagcctgggcgagagcagaagcagcgaggtggacgtgagcgacctgggcagcagaaactacagcgccagaaccgacttctactgcctggtgagcaaggacgacatgtag

SEQ ID NO: 99036 - DNA, 1515 bp, synthetic construct
  misc_feature 1..1515: note = Description of Artificial Sequence: Synthetic coding sequence
  source 1..1515: mol_type = other DNA
atgcccggcgtgtgcgacagagcccccgacttcctgagccccagcgaggaccaggtgctgagacccgccctgggcagcagcgtggccctgaactgcaccgcctgggtggtgagcggcccccactgcagcctgcccagcgtgcagtggctgaaggacggcctgcccctgggcatcggcggccactacagcctgcacgagtacagctgggtgaaggccaacctgagcgaggtgctggtgagcagcgtgctgggcgtgaacgtgaccagcaccgaggtgtacggcgccttcacctgcagcatccagaacatcagcttcagcagcttcaccctgcagagagccggccccaccagccacgtggccgccgtgctggccagcctgctggtgctgctggccctgctgctggccgccctgctgtacgtgaagtgcagactgaacgtgctgctgtggtaccaggacgcctacggcgaggtggagatcaacgacggcaagctgtacgacgcctacgtgagctacagcgactgccccgaggacagaaagttcgtgaacttcatcctgaagccccagctggagagaagaagaggctacaagctgttcctggacgacagagacctgctgcccagagccgagcccagcgccgacctgctggtgaacctgagcagatgcagaagactgatcgtggtgctgagcgacgccttcctgagcagagcctggtgcagccacagcttcagagagggcctgtgcagactgctggagctgaccagaagacccatcttcatcaccttcgagggccagagaagagaccccgcccaccccgccctgagactgctgagacagcacagacacctggtgaccctgctgctgtggagacccggcagcgtgacccccagcagcgacttctggaaggaggtgcagctggccctgcccagaaaggtgcagtacagacccgtggagggcgacccccagacccagctgcaggacgacaaggaccccatgctgatcctgagaggcagagtgcccgagggcagagccctggacagcgaggtggaccccgaccccgagggcgacctgggcatgcccgcccagccccacagccccaccggcgaggcccagcacagagccgagtggggccaggcccagggcaccggccccggcggcgcccccggcgtggaggacagcagcagacacagagagcccctgcacggcctgtgccccggcggcgccagacccagcgtgtgcctgggcaccagctgggccagccaggccatcaccgccggcggcgagcagggccagcccctggccgtgggcctgggccagggctgcggctggcccccccaggccagcagaagcccccaccccagatgccccggcgcctgcctgtggagagccatcagcagcaccgcccaccagtggggcctggccggcagagagcccgagcagagaagcggcagactgggcagcagactggccaagctgcagtgcccccacagactgctgctgcccggcgtgcagggctag

SEQ ID NO: 99037 - DNA, 1233 bp, synthetic construct; identical to SEQ ID NO: 99035
  misc_feature 1..1233: note = Description of Artificial Sequence: Synthetic coding sequence
  source 1..1233: mol_type = other DNA

SEQ ID NO: 99038 - DNA, 1233 bp, synthetic construct; identical to SEQ ID NO: 99035
  misc_feature 1..1233: note = Description of Artificial Sequence: Synthetic coding sequence
  source 1..1233: mol_type = other DNA

SEQ ID NO: 99039 - DNA, 1515 bp, synthetic construct; identical to SEQ ID NO: 99036
  misc_feature 1..1515: note = Description of Artificial Sequence: Synthetic coding sequence
  source 1..1515: mol_type = other DNA

SEQ ID NO: 99040 - DNA, 1107 bp, synthetic construct
  misc_feature 1..1107: note = Description of Artificial Sequence: Synthetic coding sequence
  source 1..1107: mol_type = other DNA
atgttcgccaagggcaagggcagcgccgtgcccagcgacggccaggccagagagaagctggccctgtacgtgtacgagtacctgctgcacgtgggcgcccagaagagcgcccagaccttcctgagcgagatcagatgggagaagaacatcaccctgggcgagccccccggcttcctgcacagctggtggtgcgtgttctgggacctgtactgcgccgcccccgagagaagagacacctgcgagcacagcagcgaggccaaggccttccacgactacagcgccgccgccgcccccagccccgtgctgggcaacatcccccccaacgacggcatgcccggcggccccatcccccccggcttcttccagggcccccccggcagccagcccagcccccacgcccagccccccccccacaaccccagcagcatgatgggcccccacagccagccccccggcggcgtgcccggcacccagcccctgctgcccaacagcatggaccccaccagacagcagggccaccccaacatgggcggcagcatgcagagaatgaacccccccagaggcatgggccccatgggccccggcccccagaactacggcagcggcatgagacccccccccaacagcctgggccccgccatgcccggcatcaacatgggccccggcgccggcagaccctggcccaaccccaacagcgccaacagcatcccctacagcagcagcagccccggcacctacgtgggcccccccggcggcggcggcccccccggcacccccatcatgcccagccccgccgacagcaccaacagcagcgacaacatctacaccatgatcaaccccgtgccccccggcggcagcagaagcaacttccccatgggccccggcagcgacggccccatgggcggcatgggcggcatggagccccaccacatgaacggcagcctgggcagcggcgacatcgacggcctgcccaagaacagccccaacaacatcagcggcatcagcaacccccccggcacccccagagacgacggcgagctgggcggcaacttcctgcacagcttccagaacgacaactacagccccagcatgaccatgagcgtgtag

SEQ ID NO: 99041 - DNA, 1086 bp, synthetic construct
  misc_feature 1..1086: note = Description of Artificial Sequence: Synthetic coding sequence
  source 1..1086: mol_type = other DNA
atgttcgccaagggcaagggcagcgccgtgcccagcgacggccaggccagagagaagctggccctgtacgtgtacgagtacctgctgcacgtgggcgcccagaagagcgcccagaccttcctgagcgagatcagatgggagaagaacatcaccctgggcgagccccccggcttcctgcacagctggtggtgcgtgttctgggacctgtactgcgccgcccccgagagaagagacacctgcgagcacagcagcgaggccaaggccttccacgactacagcgccgccgccgcccccagccccgtgctgggcaacatcccccccaacgacggcatgcccggcggccccatcccccccggcttcttccagcccttcatgagccccagatacgccggcggccccagaccccccatcagaatgggcaaccagccccccggcggcgtgcccggcacccagcccctgctgcccaacagcatggaccccaccagacagcagggccaccccaacatgggcggcagcatgcagagaatgaacccccccagaggcatgggccccatgggccccggcccccagaactacggcagcggcatgagacccccccccaacagcctgggccccgccatgcccggcatcaacatgggccccggcgccggcagaccctggcccaaccccaacagcgccaacagcatcccctacagcagcagcagccccggcacctacgtgggcccccccggcggcggcggcccccccggcacccccatcatgcccagccccgccgacagcaccaacagcagcgacaacatctacaccatgatcaaccccgtgccccccggcggcagcagaagcaacttccccatgggccccggcagcgacggccccatgggcggcatgggcggcatggagccccaccacatgaacggcagcctgggcagcggcgacatcgacggcctgcccaagaacagccccaacaacatcagcggcatcagcaacccccccggcacccccagagacgacggcgagctgggcggcaacttcctgcacagcttccagaacgacaactacagccccagcatgaccatgagcgtgtag

SEQ ID NO: 99042 - DNA, 1167 bp, synthetic construct
  misc_feature 1..1167: note = Description of Artificial Sequence: Synthetic coding sequence
  source 1..1167: mol_type = other DNA
atgttcgccaagggcaagggcagcgccgtgcccagcgacggccaggccagagagaagctggccctgtacgtgtacgagtacctgctgcacgtgggcgcccagaagagcgcccagaccttcctgagcgagatcagatgggagaagaacatcaccctgggcgagccccccggcttcctgcacagctggtggtgcgtgttctgggacctgtactgcgccgcccccgagagaagagacacctgcgagcacagcagcgaggccaaggccttccacgactacagcgccgccgccgcccccagccccgtgctgggcaacatcccccccaacgacggcatgcccggcggccccatcccccccggcttcttccagggcccccccggcagccagcccagcccccacgcccagccccccccccacaaccccagcagcatgatgggcccccacagccagcccttcatgagccccagatacgccggcggccccagaccccccatcagaatgggcaaccagccccccggcggcgtgcccggcacccagcccctgctgcccaacagcatggaccccaccagacagcagggccaccccaacatgggcggcagcatgcagagaatgaacccccccagaggcatgggccccatgggccccggcccccagaactacggcagcggcatgagacccccccccaacagcctgggccccgccatgcccggcatcaacatgggccccggcgccggcagaccctggcccaaccccaacagcgccaacagcatcccctacagcagcagcagccccggcacctacgtgggcccccccggcggcggcggcccccccggcacccccatcatgcccagccccgccgacagcaccaacagcagcgacaacatctacaccatgatcaaccccgtgccccccggcggcagcagaagcaacttccccatgggccccggcagcgacggccccatgggcggcatgggcggcatggagccccaccacatgaacggcagcctgggcagcggcgacatcgacggcctgcccaagaacagccccaacaacatcagcggcatcagcaacccccccggcacccccagagacgacggcgagctgggcggcaacttcctgcacagcttccagaacgacaactacagccccagcatgaccatgagcgtgtag

SEQ ID NO: 99043 - DNA, 837 bp, synthetic construct
  misc_feature 1..837: note = Description of Artificial Sequence: Synthetic coding sequence
  source 1..837: mol_type = other DNA
atgcccggcggccccatcccccccggcttcttccagggcccccccggcagccagcccagcccccacgcccagccccccccccacaaccccagcagcatgatgggcccccacagccagcccttcatgagccccagatacgccggcggccccagaccccccatcagaatgggcaaccagccccccggcggcgtgcccggcacccagcccctgctgcccaacagcatggaccccaccagacagcagggccaccccaacatgggcggcagcatgcagagaatgaacccccccagaggcatgggccccatgggccccggcccccagaactacggcagcggcatgagacccccccccaacagcctgggccccgccatgcccggcatcaacatgggccccggcgccggcagaccctggcccaaccccaacagcgccaacagcatcccctacagcagcagcagccccggcacctacgtgggcccccccggcggcggcggcccccccggcacccccatcatgcccagccccgccgacagcaccaacagcagcgacaacatctacaccatgatcaaccccgtgccccccggcggcagcagaagcaacttccccatgggccccggcagcgacggccccatgggcggcatgggcggcatggagccccaccacatgaacggcagcctgggcagcggcgacatcgacggcctgcccaagaacagccccaacaacatcagcggcatcagcaacccccccggcacccccagagacgacggcgagctgggcggcaacttcctgcacagcttccagaacgacaactacagccccagcatgaccatgagcgtgtag

SEQ ID NO: 99044 - DNA, 471 bp, synthetic construct
  misc_feature 1..471: note = Description of Artificial Sequence: Synthetic coding sequence
  source 1..471: mol_type = other DNA
ccccccggcggcgtgcccggcacccagcccctgctgcccaacagcatggaccccaccagacagcagggccaccccaacatgggcggcagcatgcagagaatgaacccccccagaggcatgggccccatgggccccggcccccagaactacggcagcggcatgagacccccccccaacagcctgggccccgccatgcccggcatcaacatgggccccggcgccggcagaccctggcccaaccccaacagcgccaacagcatcccctacagcagcagcagccccggcacctacgtgggcccccccggcggcggcggcccccccggcacccccatcatgcccagccccgccgacagcaccaacagcagcgacaacatctacaccatgatcaaccccgtgccccccggcggcagcagaagcaacgtgagcctgctgagcaacaacctgcacatcagacaccacaacaagagctag

SEQ ID NO: 99045 - DNA, 1158 bp, synthetic construct
  misc_feature 1..1158: note = Description of Artificial Sequence: Synthetic coding sequence
  source 1..1158: mol_type = other DNA
atgtacgccaagggcggcaagggcagcgccgtgcccagcgacagccaggccagagagaagctggccctgtacgtgtacgagtacctgctgcacatcggcgcccagaagagcgcccagaccttcctgagcgagatcagatgggagaagaacatcaccctgggcgagccccccggcttcctgcacagctggtggtgcgtgttctgggacctgtactgcgccgcccccgacagaagagaggcctgcgagcacagcggcgaggccaaggccttccaggactacagcgccgccgccgcccccagccccgtgatgggcagcatggcccccggcgacaccatggccgccggcagcatggccgccggcttcttccagggcccccccggcagccagcccagcccccacaaccccaacgcccccatgatgggcccccacggccagcccttcatgagccccagattccccggcggccccagacccaccctgagaatgcccagccagccccccgccggcctgcccggcagccagcccctgctgcccggcgccatggagcccagccccagagcccagggccaccccagcatgggcggccccatgcagagagtgaccccccccagaggcatggccagcgtgggcccccagagctacggcggcggcatgagacccccccccaacagcctggccggccccggcctgcccgccatgaacatgggccccggcgtgagaggcccctgggccagccccagcggcaacagcatcccctacagcagcagcagccccggcagctacaccggcccccccggcggcggcggcccccccggcacccccatcatgcccagccccggcgacagcaccaacagcagcgagaacatgtacaccatcatgaaccccatcggccagggcgccggcagagccaacttccccctgggccccggccccgagggccccatggccgccatgagcgccatggagccccaccacgtgaacggcagcctgggcagcggcgacatggacggcctgcccaagagcagccccggcgccgtggccggcctgagcaacgcccccggcacccccagagacgacggcgagatggccgccgccggcaccttcctgcaccccttccccagcgagagctacagccccggcatgaccatgagcgtgtag

SEQ ID NO: 99046 - DNA, 1092 bp, synthetic construct
  misc_feature 1..1092: note = Description of Artificial Sequence: Synthetic coding sequence
  source 1..1092: mol_type = other DNA
atgtacgccaagggcggcaagggcagcgccgtgcccagcgacagccaggccagagagaagctggccctgtacgtgtacgagtacctgctgcacatcggcgcccagaagagcgcccagaccttcctgagcgagatcagatgggagaagaacatcaccctgggcgagccccccggcttcctgcacagctggtggtgcgtgttctgggacctgtactgcgccgcccccgacagaagagaggcctgcgagcacagcggcgaggccaaggccttccaggactacagcgccgccgccgcccccagccccgtgatgggcagcatggcccccggcgacaccatggccgccggcagcatggccgccggcttcttccagcccttcatgagccccagattccccggcggccccagacccaccctgagaatgcccagccagccccccgccggcctgcccggcagccagcccctgctgcccggcgccatggagcccagccccagagcccagggccaccccagcatgggcggccccatgcagagagtgaccccccccagaggcatggccagcgtgggcccccagagctacggcggcggcatgagacccccccccaacagcctggccggccccggcctgcccgccatgaacatgggccccggcgtgagaggcccctgggccagccccagcggcaacagcatcccctacagcagcagcagccccggcagctacaccggcccccccggcggcggcggcccccccggcacccccatcatgcccagccccggcgacagcaccaacagcagcgagaacatgtacaccatcatgaaccccatcggccagggcgccggcagagccaacttccccctgggccccggccccgagggccccatggccgccatgagcgccatggagccccaccacgtgaacggcagcctgggcagcggcgacatggacggcctgcccaagagcagccccggcgccgtggccggcctgagcaacgcccccggcacccccagagacgacggcgagatggccgccgccggcaccttcctgcaccccttccccagcgagagctacagccccggcatgaccatgagcgtgtag

SEQ ID NO: 99047 - DNA, 2301 bp, synthetic construct
  misc_feature 1..2301: note = Description of Artificial Sequence: Synthetic coding sequence
  source 1..2301: mol_type = other DNA
atgaaggagaagagcaagaacgccgccagaaccagaagagagaaggagaacagcgagttctacgagctggccaagctgctgcccctgcccagcgccatcaccagccagctggacaaggccagcatcatcagactgaccaccagctacctgaagatgagagtggtgttccccgagggcctgggcgaggcctggggccacagcagcagaaccagccccctggacaacgtgggcagagagctgggcagccacctgctgcagaccctggacggcttcatcttcgtggtggcccccgacggcaagatcatgtacatcagcgagaccgccagcgtgcacctgggcctgagccaggtggagctgaccggcaacagcatctacgagtacatccaccccgccgaccacgacgagatgaccgccgtgctgaccgcccaccagccctaccacagccacttcgtgcaggagtacgagatcgagagaagcttcttcctgagaatgaagtgcgtgctggccaagagaaacgccggcctgacctgcggcggctacaaggtgatccactgcagcggctacctgaagatcagacagtacagcctggacatgagccccttcgacggctgctaccagaacgtgggcctggtggccgtgggccacagcctgccccccagcgccgtgaccgagatcaagctgcacagcaacatgttcatgttcagagccagcctggacatgaagctgatcttcctggacagcagagtggccgagctgaccggctacgagccccaggacctgatcgagaagaccctgtaccaccacgtgcacggctgcgacaccttccacctgagatgcgcccaccacctgctgctggtgaagggccaggtgaccaccaagtactacagattcctggccaagcacggcggctgggtgtgggtgcagagctacgccaccatcgtgcacaacagcagaagcagcagaccccactgcatcgtgagcgtgaactacgtgctgaccgacaccgagtacaagggcctgcagctgagcctggaccagatcagcgccagcaagcccgccttcagctacaccagcagcagcacccccaccatgaccgacaacagaaagggcgccaagagcagactgagcagcagcaagagcaagagcagaaccagcccctacccccagtacagcggcttccacaccgagagaagcgagagcgaccacgacagccagtggggcggcagccccctgaccgacaccgccagcccccagctgctggaccccgccgacagacccggcagccagcacgacgccagctgcgcctacagacagttcagcgacagaagcagcctgtgctacggcttcgccctggaccacagcagactggtggaggagagacacttccacacccaggcctgcgagggcggcagatgcgaggccggcagatacttcctgggcaccccccaggccggcagagagccctggtggggcagcagagccgccctgcccctgaccaaggccagccccgagagcagagaggcctacgagaacagcatgccccacatcgccagcgtgcacagaatccacggcagaggccactgggacgaggacagcgtggtgagcagccccgaccccggcagcgccagcgagagcggcgacagatacagaaccgagcagtaccagagcagcccccacgagcccagcaagatcgagaccctgatcagagccacccagcagatgatcaaggaggaggagaacagactgcagctgagaaaggcccccagcgaccagctggccagcatcaacggcgccggcaagaagcacagcctgtgcttcgccaactaccagcagcccccccccaccggcgaggtgtgccacggcagcgccctggccaacaccagcccctgcgaccacatccagcagagagagggcaagatgctgagcccccacgagaacgactacgacaacagccccaccgccctgagcagaatcagcagccccaacagcgacagaatcagcaagagcagcctgatcctggccaaggactacctgcacagcgacatcagcccccaccagaccgccggcgaccaccccaccgtgagccccaactgcttcggcagccacagacagtacttcgacaagcacgcctacaccctgaccggctacgccctggagcacctgtacgacagcgagaccatcagaaactacagcctgggctgcaacggcagccacttcgacgtgaccagccacctgagaatgcagcccgaccccgcccagggccacaagggcaccagcgtgatcatcaccaacggcagctag

SEQ ID NO: 99048 - DNA, 2301 bp, synthetic construct; identical to SEQ ID NO: 99047
  misc_feature 1..2301: note = Description of Artificial Sequence: Synthetic coding sequence
  source 1..2301: mol_type = other DNA

SEQ ID NO: 99049 - DNA, 2004 bp, synthetic construct
  misc_feature 1..2004: note = Description of Artificial Sequence: Synthetic coding sequence
  source 1..2004: mol_type = other DNA
atgaaggagaagagcaagaacgccgccaagaccagaagagagaaggagaacggcgagttctacgagctggccaagctgctgcccctgcccagcgccatcaccagccagctggacaaggccagcatcatcagactgaccaccagctacctgaagatgagagccgtgttccccgagggcctgggcgacgcctggggccagcccagcagagccggccccctggacggcgtggccaaggagctgggcagccacctgctgcagaccctggacggcttcgtgttcgtggtggccagcgacggcaagatcatgtacatcagcgagaccgccagcgtgcacctgggcctgagccaggtggagctgaccggcaacagcatctacgagtacatccaccccagcgaccacgacgagatgaccgccgtgctgaccgcccaccagcccctgcaccaccacctgctgcaggagtacgagatcgagagaagcttcttcctgagaatgaagtgcgtgctggccaagagaaacgccggcctgacctgcagcggctacaaggtgatccactgcagcggctacctgaagatcagacagtacatgctggacatgagcctgtacgacagctgctaccagatcgtgggcctggtggccgtgggccagagcctgccccccagcgccatcaccgagatcaagctgtacagcaacatgttcatgttcagagccagcctggacctgaagctgatcttcctggacagcagagtgaccgaggtgaccggctacgagccccaggacctgatcgagaagaccctgtaccaccacgtgcacggctgcgacgtgttccacctgagatacgcccaccacctgctgctggtgaagggccaggtgaccaccaagtactacagactgctgagcaagagaggcggctgggtgtgggtgcagagctacgccaccgtggtgcacaacagcagaagcagcagaccccactgcatcgtgagcgtgaactacgtgctgaccgagatcgagtacaaggagctgcagctgagcctggagcaggtgagcaccgccaagagccaggacagctggagaaccgccctgagcaccagccaggagaccagaaagctggtgaagcccaagaacaccaagatgaagaccaagctgagaaccaacccctaccccccccagcagtacagcagcttccagatggacaagctggagtgcggccagctgggcaactggagagccagcccccccgccagcgccgccgccccccccgagctgcagccccacagcgagagcagcgacctgctgtacacccccagctacagcctgcccttcagctaccactacggccacttccccctggacagccacgtgttcagcagcaagaagcccatgctgcccgccaagttcggccagccccagggcagcccctgcgaggtggccagattcttcctgagcaccctgcccgccagcggcgagtgccagtggcactacgccaaccccctggtgcccagcagcagcagccccgccaagaacccccccgagccccccgccaacaccgccagacacagcctggtgcccagctacgaggcccccgccgccgccgtgagaagattcggcgaggacaccgccccccccagcttccccagctgcggccactacagagaggagcccgccctgggccccgccaaggccgccagacaggccgccagagacggcgccagactggccctggccagagccgcccccgagtgctgcgccccccccacccccgaggcccccggcgcccccgcccagctgcccttcgtgctgctgaactaccacagagtgctggccagaagaggccccctgggcggcgccgcccccgccgccagcggcctggcctgcgcccccggcggccccgaggccgccaccggcgccctgagactgagacaccccagccccgccgccaccagcccccccggcgcccccctgccccactacctgggcgccagcgtgatcatcaccaacggcagatag

SEQ ID NO: 99050 - DNA, 1713 bp, synthetic construct
  misc_feature 1..1713: note = Description of Artificial Sequence: Synthetic coding sequence
  source 1..1713: mol_type = other DNA
atgaaggagaagagcaagaacgccgccaagaccagaagagagaaggagaacggcgagttctacgagctggccaagctgctgcccctgcccagcgccatcaccagccagctggacaaggccagcatcatcagactgaccaccagctacctgaagatgagagccgtgttccccgagggcctgggcgacgcctggggccagcccagcagagccggccccctggacggcgtggccaaggagctgggcagccacctgctgcagaccctggacggcttcgtgttcgtggtggccagcgacggcaagatcatgtacatcagcgagaccgccagcgtgcacctgggcctgagccaggtggagctgaccggcaacagcatctacgagtacatccaccccagcgaccacgacgagatgaccgccgtgctgaccgcccaccagcccctgcaccaccacctgctgcaggagtacgagatcgagagaagcttcttcctgagaatgaagtgcgtgctggccaagagaaacgccggcctgacctgcagcggctacaaggtgatccactgcagcggctacctgaagatcagacagtacatgctggacatgagcctgtacgacagctgctaccagatcgtgggcctggtggccgtgggccagagcctgccccccagcgccatcaccgagatcaagctgtacagcaacatgttcatgttcagagccagcctggacctgaagctgatcttcctggacagcagagtgaccgaggtgaccggctacgagccccaggacctgatcgagaagaccctgtaccaccacgtgcacggctgcgacgtgttccacctgagatacgcccaccacctgctgctggtgaagggccaggtgaccaccaagtactacagactgctgagcaagagaggcggctgggtgtgggtgcagagctacgccaccgtggtgcacaacagcagaagcagcagaccccactgcatcgtgagcgtgaactacgtgctgaccgagatcgagtacaaggagctgcagctgagcctggagcaggtgagcaccgccaagagccaggacagctggagaaccgccctgagcaccagccaggagaccagaaagctggtgaagcccaagaacaccaagatgaagaccaagctgagaaccaacccctaccccccccagcagtacagcagcttccagatggacaagctggagtgcggccagctgggcaactggagagccagcccccccgccagcgccgccgccccccccgagctgcagccccacagcgagagcagcgacctgctgtacacccccagctacagcctgcccttcagctaccactacggccacttccccctggacagccacgtgttcagcagcaagaagcccatgctgcccgccaagttcggccagccccagggcagcccctgcgaggtggccagattcttcctgagcaccctgcccgccagcggcgagtgccagtggcactacgccaaccccctggtgcccagcagcagcagccccgccaagaacccccccgagccccccgccaacaccgccagacacagcctggtgcccagctacgagggcggcagcggcctgctggtgggcaaggtgggcggcctgagaaccgccggcagcagaagcagccacggcggcggctggcagatggagaccgagcccagcagattcggccagacctgccccctgagcgccagcaagtag

SEQ ID NO: 99051 - DNA, 447 bp, synthetic construct
  misc_feature 1..447: note = Description of Artificial Sequence: Synthetic coding sequence
  source 1..447: mol_type = other DNA
atgttcagaagacccgtgctgcaggtgctgagacagttcgtgagacacgagagcgagaccaccaccagcctggtgctggagagaagcctgaacagagtgcacctgctgggcagagtgggccaggaccccgtgctgagacaggtggagggcaagaaccccgtgaccatcttcagcctggccaccaacgagatgtggagaagcggcgacagcgaggtgtaccagctgggcgacgtgagccagaagaccacctggcacagaatcagcgtgttcagacccggcctgagagacgtggcctaccagtacgtgaagaagggcagcagaatctacctggagggcaagatcgactacggcgagtacatggacaagaacaacgtgagaagacaggccaccaccatcatcgccgacaacatcatcttcctgagcgaccagaccaaggagaaggagtag

SEQ ID NO: 99052 - DNA, 366 bp, synthetic construct
  misc_feature 1..366: note = Description of Artificial Sequence: Synthetic coding sequence
  source 1..366: mol_type = other DNA
atgttcagaagacccgtgctgcaggtgctgagacagttcgtgagacacgagagcgagaccaccaccagcctggtgctggagagaagcctgaacagagtgcacctgctgggcagagtgggccaggaccccgtgctgagacaggtggagggcaagaaccccgtgaccatcttcagcctggccaccaacgagatgtggagaagcggcgacagcgaggtgtaccagctgggcgacgtgagccagaagaccacctggcacagaatcagcgtgttcagacccggcctgagagacgtggcctaccagtacgtgaagaagggcagcagaatctacctggagggcaagatcgactacggcgagtacatggactag

SEQ ID NO: 99053 - DNA, 447 bp, synthetic construct; identical to SEQ ID NO: 99051
  misc_feature 1..447: note = Description of Artificial Sequence: Synthetic coding sequence
  source 1..447: mol_type = other DNA

SEQ ID NO: 99054 - DNA, 408 bp, synthetic construct
  misc_feature 1..408: note = Description of Artificial Sequence: Synthetic coding sequence
  source 1..408: mol_type = other DNA
atgttcagaagacccgtgctgcaggtgctgagacagttcgtgagacacgagagcgagaccaccaccagcctggtgctggagagaagcctgaacagagtgcacctgctgggcagagtgggccaggaccccgtgctgagacaggtggagggcaagaaccccgtgaccatcttcagcctggccaccaacgagatgtggagaagcggcgacagcgaggtgtaccagctgggcgacgtgagccagaagaccacctggcacagaatcagcgtgttcagacccggcctgagagacgtggcctaccagtacgtgaagaagggcagcagaatctacctggagggcaagatcgactacggcgagtacatggacaagaacaacgtgagaagacaggccaccaccatcatcgccgactag

SEQ ID NO: 99055 - DNA, 87 bp, synthetic construct
  misc_feature 1..87: note = Description of Artificial Sequence: Synthetic coding sequence
  source 1..87: mol_type = other DNA
atgttcagaagacccgtgctgcaggtgctgagacagttcgtgagacacgagagcgagaccaccaccagcctggtgctggagagatag

SEQ ID NO: 99056 - DNA, 447 bp, synthetic construct; identical to SEQ ID NO: 99051
  misc_feature 1..447: note = Description of Artificial Sequence: Synthetic coding sequence
  source 1..447: mol_type = other DNA

SEQ ID NO: 99057 - DNA, 447 bp, synthetic construct; identical to SEQ ID NO: 99051
  misc_feature 1..447: note = Description of Artificial Sequence: Synthetic coding sequence
  source 1..447: mol_type = other DNA

SEQ ID NO: 99058 - DNA, 447 bp, synthetic construct; identical to SEQ ID NO: 99051
  misc_feature 1..447: note = Description of Artificial Sequence: Synthetic coding sequence
  source 1..447: mol_type = other DNA

SEQ ID NO: 99059 - DNA, 1086 bp, synthetic construct
  misc_feature 1..1086: note = Description of Artificial Sequence: Synthetic coding sequence
  source 1..1086: mol_type = other DNA
atgtacggcaagggcaagagcaacagcagcgccgtgcccagcgacagccaggccagagagaagctggccctgtacgtgtacgagtacctgctgcacgtgggcgcccagaagagcgcccagaccttcctgagcgagatcagatgggagaagaacatcaccctgggcgagccccccggcttcctgcacagctggtggtgcgtgttctgggacctgtactgcgccgcccccgagagaagagagacctgcgagcacagcagcgaggccaaggccttccacgactacagcgccgccgccgcccccagccccgtgctgggcaacatcccccccggcgacggcatgcccgtgggccccgtgccccccggcttcttccagcccttcatgagccccagataccccggcggccccagaccccccctgagaatccccaaccaggccctgggcggcgtgcccggcagccagcccctgctgcccagcggcatggaccccaccagacagcagggccaccccaacatgggcggccccatgcagagaatgaccccccccagaggcatggtgcccctgggcccccagaactacggcggcgccatgagaccccccctgaacgccctgggcggccccggcatgcccggcatgaacatgggccccggcggcggcagaccctggcccaaccccaccaacgccaacagcatcccctacagcagcgccagccccggcaactacgtgggcccccccggcggcggcggcccccccggcacccccatcatgcccagccccgccgacagcaccaacagcggcgacaacatgtacaccctgatgaacgccgtgccccccggccccaacagacccaacttccccatgggccccggcagcgacggccccatgggcggcctgggcggcatggagagccaccacatgaacggcagcctgggcagcggcgacatggacagcatcagcaagaacagccccaacaacatgagcctgagcaaccagcccggcacccccagagacgacggcgagatgggcggcaacttcctgaaccccttccagagcgagagctacagccccagcatgaccatgagcgtgtag

SEQ ID NO: 99060 - DNA, 945 bp, synthetic construct
  misc_feature 1..945: note = Description of Artificial Sequence: Synthetic coding sequence
  source 1..945: mol_type = other DNA
atgggcaagaacatcaccctgggcgagccccccggcttcctgcacagctggtggtgcgtgttctgggacctgtactgcgccgcccccgagagaagagagacctgcgagcacagcagcgaggccaaggccttccacgactacagcgccgccgccgcccccagccccgtgctgggcaacatcccccccggcgacggcatgcccgtgggccccgtgccccccggcttcttccagcccttcatgagccccagataccccggcggccccagaccccccctgagaatccccaaccaggccctgggcggcgtgcccggcagccagcccctgctgcccagcggcatggaccccaccagacagcagggccaccccaacatgggcggccccatgcagagaatgaccccccccagaggcatggtgcccctgggcccccagaactacggcggcgccatgagaccccccctgaacgccctgggcggccccggcatgcccggcatgaacatgggccccggcggcggcagaccctggcccaaccccaccaacgccaacagcatcccctacagcagcgccagccccggcaactacgtgggcccccccggcggcggcggcccccccggcacccccatcatgcccagccccgccgacagcaccaacagcggcgacaacatgtacaccctgatgaacgccgtgccccccggccccaacagacccaacttccccatgggccccggcagcgacggccccatgggcggcctgggcggcatggagagccaccacatgaacggcagcctgggcagcggcgacatggacagcatcagcaagaacagccccaacaacatgagcctgagcaaccagcccggcacccccagagacgacggcgagatgggcggcaacttcctgaaccccttccagagcgagagctacagccccagcatgaccatgagcgtgtag

SEQ ID NO: 99061 - DNA, 1026 bp, synthetic construct
  misc_feature 1..1026: note = Description of Artificial Sequence: Synthetic coding sequence
  source 1..1026: mol_type = other DNA
atgtacggcaagggcaagagcaacagcagcgccgtgcccagcgacagccaggccagagagaagctggccctgtacgtgtacgagtacctgctgcacgtgggcgcccagaagagcgcccagaccttcctgagcgagatcagatgggagaagaacatcaccctgggcgagccccccggcttcctgcacagctggtggtgcgtgttctgggacctgtactgcgccgcccccgagagaagagagacctgcgagcacagcagcgaggccaaggccttccacgactacagcgccgccgccgcccccagccccgtgctgggcaacatcccccccggcgacggcatgcccgtgggccccgtgccccccggcttcttccaggccctgggcggcgtgcccggcagccagcccctgctgcccagcggcatggaccccaccagacagcagggccaccccaacatgggcggccccatgcagagaatgaccccccccagaggcatggtgcccctgggcccccagaactacggcggcgccatgagaccccccctgaacgccctgggcggccccggcatgcccggcatgaacatgggccccggcggcggcagaccctggcccaaccccaccaacgccaacagcatcccctacagcagcgccagccccggcaactacgtgggcccccccggcggcggcggcccccccggcacccccatcatgcccagccccgccgacagcaccaacagcggcgacaacatgtacaccctgatgaacgccgtgccccccggccccaacagacccaacttccccatgggccccggcagcgacggccccatgggcggcctgggcggcatggagagccaccacatgaacggcagcctgggcagcggcgacatggacagcatcagcaagaacagccccaacaacatgagcctgagcaaccagcccggcacccccagagacgacggcgagatgggcggcaacttcctgaaccccttccagagcgagagctacagccccagcatgaccatgagcgtgtag

SEQ ID NO: 99062 - DNA, 1200 bp, synthetic construct
  misc_feature 1..1200: note = Description of Artificial Sequence: Synthetic coding sequence
  source 1..1200: mol_type = other DNA
atggccttctggggctggagagccgccgccgccctgagactgtggggcagagtggtggagagagtggaggccggcggcggcgtgggccccttccaggcctgcggctgcagactggtgctgggcggcagagacgacgtgagcgccggcctgagaggcagccacggcgccagaggcgagcccctggaccccgccagacccctgcagagaccccccagacccgaggtgcccagagccttcagaagacagcccagagccgccgcccccagcttcttcttcagcagcatcaagggcggcagaagaagcatcagcttcagcgtgggcgccagcagcgtggtgggcagcggcggcagcagcgacaagggcaagctgagcctgcaggacgtggccgagctgatcagagccagagcctgccagagagtggtggtgatggtgggcgccggcatcagcacccccagcggcatccccgacttcagaagccccggcagcggcctgtacagcaacctgcagcagtacgacctgccctaccccgaggccatcttcgagctgcccttcttcttccacaaccccaagcccttcttcaccctggccaaggagctgtaccccggcaactacaagcccaacgtgacccactacttcctgagactgctgcacgacaagggcctgctgctgagactgtacacccagaacatcgacggcctggagagagtgagcggcatccccgccagcaagctggtggaggcccacggcaccttcgccagcgccacctgcaccgtgtgccagagacccttccccggcgaggacatcagagccgacgtgatggccgacagagtgcccagatgccccgtgtgcaccggcgtggtgaagcccgacatcgtgttcttcggcgagcccctgccccagagattcctgctgcacgtggtggacttccccatggccgacctgctgctgatcctgggcaccagcctggaggtggagcccttcgccagcctgaccgaggccgtgagaagcagcgtgcccagactgctgatcaacagagacctggtgggccccctggcctggcaccccagaagcagagacgtggcccagctgggcgacgtggtgcacggcgtggagagcctggtggagctgctgggctggaccgaggagatgagagacctggtgcagagagagaccggcaagctggacggccccgacaagtag

SEQ ID NO: 99063 - DNA, 957 bp, synthetic construct
  misc_feature 1..957: note = Description of Artificial Sequence: Synthetic coding sequence
  source 1..957: mol_type = other DNA
atggccttctggggctggagagccgccgccgccctgagactgtggggcagagtggtggagagagtggaggccggcggcggcgtgggccccttccaggcctgcggctgcagactggtgctgggcggcagagacgacgacgtggccgagctgatcagagccagagcctgccagagagtggtggtgatggtgggcgccggcatcagcacccccagcggcatccccgacttcagaagccccggcagcggcctgtacagcaacctgcagcagtacgacctgccctaccccgaggccatcttcgagctgcccttcttcttccacaaccccaagcccttcttcaccctggccaaggagctgtaccccggcaactacaagcccaacgtgacccactacttcctgagactgctgcacgacaagggcctgctgctgagactgtacacccagaacatcgacggcctggagagagtgagcggcatccccgccagcaagctggtggaggcccacggcaccttcgccagcgccacctgcaccgtgtgccagagacccttccccggcgaggacatcagagccgacgtgatggccgacagagtgcccagatgccccgtgtgcaccggcgtggtgaagcccgacatcgtgttcttcggcgagcccctgccccagagattcctgctgcacgtggtggacttccccatggccgacctgctgctgatcctgggcaccagcctggaggtggagcccttcgccagcctgaccgaggccgtgagaagcagcgtgcccagactgctgatcaacagagacctggtgggccccctggcctggcaccccagaagcagagacgtggcccagctgggcgacgtggtgcacggcgtggagagcctggtggagctgctgggctggaccgaggagatgagagacctggtgcagagagagaccggcaagctggacggccccgacaagtag

SEQ ID NO: 99064 - DNA, 774 bp, synthetic construct
  misc_feature 1..774: note = Description of Artificial Sequence: Synthetic coding sequence
  source 1..774: mol_type = other DNA
atggtgggcgccggcatcagcacccccagcggcatccccgacttcagaagccccggcagcggcctgtacagcaacctgcagcagtacgacctgccctaccccgaggccatcttcgagctgcccttcttcttccacaaccccaagcccttcttcaccctggccaaggagctgtaccccggcaactacaagcccaacgtgacccactacttcctgagactgctgcacgacaagggcctgctgctgagactgtacacccagaacatcgacggcctggagagagtgagcggcatccccgccagcaagctggtggaggcccacggcaccttcgccagcgccacctgcaccgtgtgccagagacccttccccggcgaggacatcagagccgacgtgatggccgacagagtgcccagatgccccgtgtgcaccggcgtggtgaagcccgacatcgtgttcttcggcgagcccctgccccagagattcctgctgcacgtggtggacttccccatggccgacctgctgctgatcctgggcaccagcctggaggtggagcccttcgccagcctgaccgaggccgtgagaagcagcgtgcccagactgctgatcaacagagacctggtgggccccctggcctggcaccccagaagcagagacgtggcccagctgggcgacgtggtgcacggcgtggagagcctggtggagctgctgggctggaccgaggagatgagagacctggtgcagagagagaccggcaagctggacggccccgacaagtag

SEQ ID NO: 99065 - DNA, 945 bp, synthetic construct
  misc_feature 1..945: note = Description of Artificial Sequence: Synthetic coding sequence
  source 1..945: mol_type = other DNA
atgaagatgagcttcgccctgaccttcagaagcgccaagggcagatggatcgccaaccccagccagccctgcagcaaggccagcatcggcctgttcgtgcccgccagcccccccctggaccccgagaaggtgaaggagctgcagagattcatcaccctgagcaagagactgctggtgatgaccggcgccggcatcagcaccgagagcggcatccccgactacagaagcgagaaggtgggcctgtacgccagaaccgacagaagacccatccagcacggcgacttcgtgagaagcgcccccatcagacagagatactgggccagaaacttcgtgggctggccccagttcagcagccaccagcccaaccccgcccactgggccctgagcacctgggagaagctgggcaagctgtactggctggtgacccagaacgtggacgccctgcacaccaaggccggcagcagaagactgaccgagctgcacggctgcatggacagagtgctgtgcctggactgcggcgagcagacccccagaggcgtgctgcaggagagattccaggtgctgaaccccacctggagcgccgaggcccacggcctggcccccgacggcgacgtgttcctgagcgaggagcaggtgagaagcttccaggtgcccacctgcgtgcagtgcggcggccacctgaagcccgacgtggtgttcttcggcgacaccgtgaaccccgacaaggtggacttcgtgcacaagagagtgaaggaggccgacagcctgctggtggtgggcagcagcctgcaggtgtacagcggctacagattcatcctgaccgcctgggagaagaagctgcccatcgccatcctgaacatcggccccaccagaagcgacgacctggcctgcctgaagctgaacagcagatgcggcgagctgctgcccctgatcgacccctgctag

SEQ ID NO: 99066 - DNA, 879 bp, synthetic construct
  misc_feature 1..879: note = Description of Artificial Sequence: Synthetic coding sequence
  source 1..879: mol_type = other DNA
atgagacccctgcagatcgtgcccagcagactgatcagccagctgtactgcggcctgaagccccccgccagcaccagaaaccagatctgcctgaagatggccagacccagcagcagcatggccgacttcagaaagttcttcgccaaggccaagcacatcgtgatcatcagcggcgccggcgtgagcgccgagagcggcgtgcccaccttcagaggcgccggcggctactggagaaagtggcaggcccaggacctggccacccccctggccttcgcccacaaccccagcagagtgtgggagttctaccactacagaagagaggtgatgggcagcaaggagcccaacgccggccacagagccatcgccgagtgcgagaccagactgggcaagcagggcagaagagtggtggtgatcacccagaacatcgacgagctgcacagaaaggccggcaccaagaacctgctggagatccacggcagcctgttcaagaccagatgcaccagctgcggcgtggtggccgagaactacaagagccccatctgccccgccctgagcggcaagggctgcgaggaggccggctgcggcggcctgctgagaccccacgtggtgtggttcggcgagaacctggaccccgccatcctggaggaggtggacagagagctggcccactgcgacctgtgcctggtggtgggcaccagcagcgtggtgtaccccgccgccatgttcgccccccaggtggccgccagaggcgtgcccgtggccgagttcaacaccgagaccacccccgccaccaacagattcagattccacttccagggcccctgcggcaccaccctgcccgaggccctggcctgccacgagaacgagaccgtgagctag

SEQ ID NO: 99067 - DNA, 933 bp, synthetic construct
  misc_feature 1..933: note = Description of Artificial Sequence: Synthetic coding sequence
  source 1..933: mol_type = other DNA
atgagacccctgcagatcgtgcccagcagactgatcagccagctgtactgcggcctgaagccccccgccagcaccagaaaccagatctgcctgaagatggccagacccagcagcagcatggccgacttcagaaagttcttcgccaaggccaagcacatcgtgatcatcagcggcgccggcgtgagcgccgagagcggcgtgcccaccttcagaggcgccggcggctactggagaaagtggcaggcccaggacctggccacccccctggccttcgcccacaaccccagcagagtgtgggagttctaccactacagaagagaggtgatgggcagcaaggagcccaacgccggccacagagccatcgccgagtgcgagaccagactgggcaagcagggcagaagagtggtggtgatcacccagaacatcgacgagctgcacagaaaggccggcaccaagaacctgctggagatccacggcagcctgttcaagaccagatgcaccagctgcggcgtggtggccgagaactacaagagccccatctgccccgccctgagcggcaagggcgcccccgagcccggcacccaggacgccagcatccccgtggagaagctgcccagatgcgaggaggccggctgcggcggcctgctgagaccccacgtggtgtggttcggcgagaacctggaccccgccatcctggaggaggtggacagagagctggcccactgcgacctgtgcctggtggtgggcaccagcagcgtggtgtaccccgccgccatgttcgccccccaggtggccgccagaggcgtgcccgtggccgagttcaacaccgagaccacccccgccaccaacagattcagattccacttccagggcccctgcggcaccaccctgcccgaggccctggcctgccacgagaacgagaccgtgagctag

SEQ ID NO: 99068 - DNA, 900 bp, synthetic construct
  misc_feature 1..900: note = Description of Artificial Sequence: Synthetic coding sequence
  source 1..900: mol_type = other DNA
atgagacccctgcagatcgtgcccagcagactgatcagccagctgtactgcggcctgaagccccccgccagcaccagaaaccagatctgcctgaagatggccagacccagcagcagcatggccgacttcagaaagttcttcgccaaggccaagcacatcgtgatcatcagcggcgccggcgtgagcgccgagagcggcgtgcccaccttcagaggcgccggcggctactggagaaagtggcaggcccaggacctggccacccccctggccttcgcccacaaccccagcagagtgtgggagttctaccactacagaagagaggtgatgggcagcaaggagcccaacgccggccacagagccatcgccgagtgcgagaccagactgggcaagcagggcagaagagtggtggtgatcacccagaacatcgacgagctgcacagaaaggccggcaccaagaacctgctggagatccacggcagcctgttcaagaccagatgcaccagctgcggcgtggtggccgagaactacaagagccccatctgccccgccctgagcggcaagggcgcccccgagcccggcacccaggacgccagcatccccgtggagaagctgcccagatgcgaggaggccggctgcggcggcctgctgagaccccacgtggtgtggttcggcgagaacctggaccccgccatcctggaggaggtggacagagagctggcccactgcgacctgtgcctggtggtgggcaccagcagcgtggtgtaccccgccgccatgttcgccccccaggtggccgccagaggcgtgcccgtggccgagttcaacaccgagaccacccccgccaccaacagattcagccacctgatcagcatcagcagcctgatcatcatcaagaactag

SEQ ID NO: 99069 - DNA, 609 bp, synthetic construct
  misc_feature 1..609: note = Description of Artificial Sequence: Synthetic coding sequence
  source 1..609: mol_type = other DNA
atgggcagcaaggagcccaacgccggccacagagccatcgccgagtgcgagaccagactgggcaagcagggcagaagagtggtggtgatcacccagaacatcgacgagctgcacagaaaggccggcaccaagaacctgctggagatccacggcagcctgttcaagaccagatgcaccagctgcggcgtggtggccgagaactacaagagccccatctgccccgccctgagcggcaagggcgcccccgagcccggcacccaggacgccagcatccccgtggagaagctgcccagatgcgaggaggccggctgcggcggcctgctgagaccccacgtggtgtggttcggcgagaacctggaccccgccatcctggaggaggtggacagagagctggcccactgcgacctgtgcctggtggtgggcaccagcagcgtggtgtaccccgccgccatgttcgccccccaggtggccgccagaggcgtgcccgtggccgagttcaacaccgagaccacccccgccaccaacagattcagattccacttccagggcccctgcggcaccaccctgcccgaggccctggcctgccacgagaacgagaccgtgagctag

SEQ ID NO: 99070 - DNA, 1203 bp, synthetic construct
  misc_feature 1..1203: note = Description of Artificial Sequence: Synthetic coding sequence
  source 1..1203: mol_type = other DNA
atggccgccggcggcctgagcagaagcgagagaaaggccgccgagagagtgagaagactgagagaggagcagcagagagagagactgagacaggtgagcagaatcctgagaaaggccgccgccgagagaagcgccgaggagggcagactgctggccgagagcgccgacctggtgaccgagctgcagggcagaagcagaagaagagagggcctgaagagaagacaggaggaggtgtgcgacgaccccgaggagctgagaggcaaggtgagagagctggccagcgccgtgagaaacgccaagtacctggtggtgtacaccggcgccggcatcagcaccgccgccagcatccccgactacagaggccccaacggcgtgtggaccctgctgcagaagggcagaagcgtgagcgccgccgacctgagcgaggccgagcccaccctgacccacatgagcatcaccagactgcacgagcagaagctggtgcagcacgtggtgagccagaactgcgacggcctgcacctgagaagcggcctgcccagaaccgccatcagcgagctgcacggcaacatgtacatcgaggtgtgcaccagctgcgtgcccaacagagagtacgtgagagtgttcgacgtgaccgagagaaccgccctgcacagacaccagaccggcagaacctgccacaagtgcggcacccagctgagagacaccatcgtgcacttcggcgagagaggcaccctgggccagcccctgaactgggaggccgccaccgaggccgccagcagagccgacaccatcctgtgcctgggcagcagcctgaaggtgctgaagaagtaccccagactgtggtgcatgaccaagccccccagcagaagacccaagctgtacatcgtgaacctgcagtggacccccaaggacgactgggccgccctgaagctgcacggcaagtgcgacgacgtgatgagactgctgatggccgagctgggcctggagatccccgcctacagcagatggcaggaccccatcttcagcctggccacccccctgagagccggcgaggagggcagccacagcagaaagagcctgtgcagaagcagagaggaggccccccccggcgacagaggcgcccccctgagcagcgcccccatcctgggcggctggttcggcagaggctgcaccaagagaaccaagagaaagaaggtgacctag

SEQ ID NO: 99071 - DNA, 963 bp, synthetic construct
  misc_feature 1..963: note = Description of Artificial Sequence: Synthetic coding sequence
  source 1..963: mol_type = other DNA
atgcccggccccagaagaagaagccccagcgcctgcccccaggtgagcagaatcctgagaaaggccgccgccgagagaagcgccgaggagggcagactgctggccgagagcgccgacctggtgaccgagctgcagggcagaagcagaagaagagagggcctgaagagaagacaggaggaggtgtgcgacgaccccgaggagctgagaggcaaggtgagagagctggccagcgccgtgagaaacgccaagtacctggtggtgtacaccggcgccggcatcagcaccgccgccagcatccccgactacagaggccccaacggcgtgtggaccctgctgcagaagggcagaagcgtgagcgccgccgacctgagcgaggccgagcccaccctgacccacatgagcatcaccagactgcacgagcagaagctggtgcagcacgtggtgagccagaactgcgacggcctgcacctgagaagcggcctgcccagaaccgccatcagcgagctgcacggcaacatgtacatcgaggtgtgcaccagctgcgtgcccaacagagagtacgtgagagtgttcgacgtgaccgagagaaccgccctgcacagacaccagaccggcagaacctgccacaagtgcggcacccagctgagagacaccatcgtgcacttcggcgagagaggcaccctgggccagcccctgaactgggaggccgccaccgaggccgccagcagagccgacaccatcctgtgcctgggcagcagcctgaaggtgctgaagaagtaccccagactgtggtgcatgaccaagccccccagcagaagacccaagctgtacatcgtgaacctgcagtggacccccaaggacgactgggccgccctgaagctgcacggcaagtgcgacgacgtgatgagactgctgatggccgagctgggcctggagatccccgcctacagcagagtgctgtag

SEQ ID NO: 99072 - DNA, 855 bp, synthetic construct
  misc_feature 1..855: note = Description of Artificial Sequence: Synthetic coding sequence
  source 1..855: mol_type = other DNA
atgagcatgctgcccagcttcggcttcacccaggagcaggtggcctgcgtgtgcgaggtgctgcagcagggcggcaacctggagagactgggcagattcctgtggagcctgcccgcctgcgaccacctgcacaagaacgagagcgtgctgaaggccaaggccgtggtggccttccacagaggcaacttcagagagctgtacaagatcctggagagccaccagttcagcccccacaaccaccccaagctgcagcagctgtggctgaaggcccactacgtggaggccgagaagctgagaggcagacccctgggcgccgtgggcaagtacagagtgagaagaaagttccccctgcccagaaccatctgggacggcgaggagaccagctactgcttcaaggagaagagcagaggcgtgctgagagagtggtacgcccacaacccctaccccagccccagagagaagagagagctggccgaggccaccggcctgaccaccacccaggtgagcaactggttcaagaacagaagacagagagacagagccgccgaggccaaggagagagagaacaccgagaacaacaacagcagcagcaacaagcagaaccagctgagccccctggagggcggcaagcccctgatgagcagcagcgaggaggagttcagccccccccagagccccgaccagaacagcgtgctgctgctgcagggcaacatgggccacgccagaagcagcaactacagcctgcccggcctgaccgccagccagcccagccacggcctgcagacccaccagcaccagctgcaggacagcctgctgggccccctgaccagcagcctggtggacctgggcagctag

SEQ ID NO: 99073 - DNA, 876 bp, synthetic construct
  misc_feature 1..876: note = Description of Artificial Sequence: Synthetic coding sequence
  source 1..876: mol_type = other DNA
atgagcatgctgcccaccttcggcttcacccaggagcaggtggcctgcgtgtgcgaggtgctgcagcagggcggcaacatcgagagactgggcagattcctgtggagcctgcccgcctgcgagcacctgcacaagaacgagagcgtgctgaaggccaaggccgtggtggccttccacagaggcaacttcagagagctgtacaagatcctggagagccaccagttcagcccccacaaccacgccaagctgcagcagctgtggctgaaggcccactacatcgaggccgagaagctgagaggcagacccctgggcgccgtgggcaagtacagagtgagaagaaagttccccctgcccagaagcatctgggacggcgaggagaccagctactgcttcaaggagaagagcagaagcgtgctgagagagtggtacgcccacaacccctaccccagccccagagagaagagagagctggccgaggccaccggcctgaccaccacccaggtgagcaactggttcaagaacagaagacagagagacagagccgccgaggccaaggagagagagaacaacgagaacagcaacagcaacagccacaaccccctgaacggcagcggcaagagcgtgctgggcagcagcgaggacgagaagacccccagcggcacccccgaccacagcagcagcagccccgccctgctgctgagcccccccccccccggcctgcccagcctgcacagcctgggccacccccccggccccagcgccgtgcccgtgcccgtgcccggcggcggcggcgccgaccccctgcagcaccaccacggcctgcaggacagcatcctgaaccccatgagcgccaacctggtggacctgggcagctag

SEQ ID NO: 99074 - DNA, 999 bp, synthetic construct
  misc_feature 1..999: note = Description of Artificial Sequence: Synthetic coding sequence
  source 1..999: mol_type = other DNA
atggtgttcagaagccccctggacctgtacagcagccacttcctgctgcccaacttcgccgacagccaccacagaagcatcctgctggccagcagcggcggcggcaacggcgccggcggcggcggcggcgccggcggcggcagcggcggcggcaacggcgccggcggcggcggcgccggcggcgccggcggcggcggcggcggcggcagcagagccccccccgaggagctgagcatgttccagctgcccaccctgaacttcagccccgagcaggtggccagcgtgtgcgagaccctggaggagaccggcgacatcgagagactgggcagattcctgtggagcctgcccgtggcccccggcgcctgcgaggccatcaacaagcacgagagcatcctgagagccagagccgtggtggccttccacaccggcaacttcagagacctgtaccacatcctggagaaccacaagttcaccaaggagagccacggcaagctgcaggccatgtggctggaggcccactaccaggaggccgagaagctgagaggcagacccctgggccccgtggacaagtacagagtgagaaagaagttccccctgcccagaaccatctgggacggcgagcagaagacccactgcttcaaggagagaaccagaagcctgctgagagagtggtacctgcaggacccctaccccaaccccagcaagaagagagagctggcccaggccaccggcctgacccccacccaggtgggcaactggttcaagaacagaagacagagagacagagccgccgccgccaagaacagactgcagcaccaggccatcggccccagcggcatgagaagcctggccgagcccggctgccccacccacggcagcgccgagagccccagcaccgccgccagccccaccaccagcgtgagcagcctgaccgagagagccgacaccggcaccagcatcctgagcgtgaccagcagcgacagcgagtgcgacgtgtag

SEQ ID NO: 99075 - DNA, 1020 bp, synthetic construct; identical to SEQ ID NO: 78904
  misc_feature 1..1020: note = Description of Artificial Sequence: Synthetic coding sequence
  source 1..1020: mol_type = other DNA

SEQ ID NO: 99076 - DNA, 2220 bp, synthetic construct
  misc_feature 1..2220: note = Description of Artificial Sequence: Synthetic coding sequence
  source 1..2220: mol_type = other DNA
atggccaccctgcccgccgagcccagcgccggccccgccgccggcggcgaggccgtggccgccgccgccgccaccgaggaggaggaggaggaggccagacagctgctgcagaccctgcaggccgccgagggcgaggccgccgccgccgccggcgccggcgccggcgccgccgccgccggcgccgagggccccggcagccccggcgtgcccggcagcccccccgaggccgccagcgagccccccaccggcctgagattcagccccgagcaggtggcctgcgtgtgcgaggccctgctgcaggccggccacgccggcagactgagcagattcctgggcgccctgccccccgccgagagactgagaggcagcgaccccgtgctgagagccagagccctggtggccttccagagaggcgagtacgccgagctgtacagactgctggagagcagacccttccccgccgcccaccacgccttcctgcaggacctgtacctgagagccagataccacgaggccgagagagccagaggcagagccctgggcgccgtggacaagtacagactgagaaagaagttccccctgcccaagaccatctgggacggcgaggagaccgtgtactgcttcaaggagagaagcagagccgccctgaaggcctgctacagaggcaacagataccccacccccgacgagaagagaagactggccaccctgaccggcctgagcctgacccaggtgagcaactggttcaagaacagaagacagagagacagaaccggcgccggcggcggcgccccctgcaagagcgagagcgacggcaaccccaccaccgaggacgagagcagcagaagccccgaggacctggagagaggcgccgcccccgtgagcgccgaggccgccgcccagggcagcatcttcctggccggcaccggcccccccgccccctgccccgccagcagcagcatcctggtgaacggcagcttcctggccgccagcggcagccccgccgtgctgctgaacggcggccccgtgatcatcaacggcctggccctgggcgaggccagcagcctgggccccctgctgctgaccggcggcggcggcgccccccccccccagcccagcccccagggcgccagcgagaccaagaccagcctggtgctggacccccagaccggcgaggtgagactggaggaggcccagagcgaggcccccgagaccaagggcgcccaggtggccgcccccggccccgccctgggcgaggaggtgctgggccccctggcccaggtggtgcccggcccccccaccgccgccaccttccccctgccccccggccccgtgcccgccgtggccgccccccaggtggtgcccctgagccccccccccggctaccccaccggcctgagccccaccagccccctgctgaacctgccccaggtggtgcccaccagccaggtggtgaccctgccccaggccgtgggccccctgcagctgctggccgccggccccggcagccccgtgaaggtggccgccgccgccggccccgccaacgtgcacctgatcaacagcggcgtgggcgtgaccgccctgcagctgcccagcgccaccgcccccggcaacttcctgctggccaaccccgtgagcggcagccccatcgtgaccggcgtggccctgcagcagggcaagatcatcctgaccgccaccttccccaccagcatgctggtgagccaggtgctgccccccgcccccggcctggccctgcccctgaagcccgagaccgccatcagcgtgcccgagggcggcctgcccgtggcccccagccccgccctgcccgaggcccacgccctgggcaccctgagcgcccagcagcccccccccgccgccgccaccaccagcagcaccagcctgcccttcagccccgacagccccggcctgctgcccaacttccccgcccccccccccgagggcctgatgctgagccccgccgccgtgcccgtgtggagcgccggcctggagctgagcgccggcaccgagggcctgctggaggccgagaagggcctgggcacccaggccccccacaccgtgctgagactgcccgaccccgaccccgagggcctgctgctgggcgccaccgccggcggcgaggtggacgagggcctggaggccgaggccaaggtgctgacccagctgcagagcgtgcccgtggaggagcccctggagctgtag

SEQ ID NO: 99077 - DNA, 741 bp, synthetic construct
  misc_feature 1..741: note = Description of Artificial Sequence: Synthetic coding sequence
  source 1..741: mol_type = other DNA
atgttccagctgcccatcctgaacttcagcccccagcaggtggccggcgtgtgcgagaccctggaggagagcggcgacgtggagagactgggcagattcctgtggagcctgcccgtggcccccgccgcctgcgaggccctgaacaagaacgagagcgtgctgagagccagagccatcgtggccttccacggcggcaactacagagagctgtaccacatcctggagaaccacaagttcaccaaggagagccacgccaagctgcaggccctgtggctggaggcccactaccaggaggccgagaagctgagaggcagacccctgggccccgtggacaagtacagagtgagaaagaagttccccctgcccagaaccatctgggacggcgagcagaagacccactgcttcaaggagagaaccagacacctgctgagagagtggtacctgcaggacccctaccccaaccccagcaagaagagagagctggcccaggccaccggcctgacccccacccaggtgggcaactggttcaagaacagaagacagagagacagagccgccgccgccaagaacagactgcagcagcaggtgctgagccagggcagcggcagagccctgagagccgagggcgacggcacccccgaggtgctgggcgtggccaccagccccgccgccagcctgagcagcaaggccgccaccagcgccatcagcatcaccagcagcgacagcgagtgcgacatctag

SEQ ID NO: 99078 - DNA, 360 bp, synthetic construct
  misc_feature 1..360: note = Description of Artificial Sequence: Synthetic coding sequence
  source 1..360: mol_type = other DNA
atgacccagcagggcgccgccctgcagaactacaacaacgagctggtgaagtgcatcgaggagctgtgccagaagagagaggagctgtgcagacagatccaggaggaggaggacgagaagcagagactgcagaacgaggtgagacagctgaccgagaagctggccagagtgaacgagaacctggccagaaagatcgccagcagaaacgagttcgacagaaccatcgccgagaccgaggccgcctacctgaagatcctggagagcagccagaccctgctgagcgtgctgaagagagaggccggcaacctgaccaaggccaccgcccccgaccagaagagcagcggcggcagagacagctag

SEQ ID NO: 99079 - DNA, 666 bp, synthetic construct
  misc_feature 1..666: note = Description of Artificial Sequence: Synthetic coding sequence
  source 1..666: mol_type = other DNA
atgctgtggctgttccagagcctgctgttcgtgttctgcttcggccccggccagctgagaaacatccaggtgaccaaccacagccagctgttccagaacatgacctgcgagctgcacctgacctgcagcgtggaggacgccgacgacaacgtgagcttcagatgggaggccctgggcaacaccctgagcagccagcccaacctgaccgtgagctgggaccccagaatcagcagcgagcaggactacacctgcatcgccgagaacgccgtgagcaacctgagcttcagcgtgagcgcccagaagctgtgcgaggacgtgaagatccagtacaccgacaccaagatgatcctgttcatggtgagcggcatctgcatcgtgttcggcttcatcatcctgctgctgctggtgctgagaaagagaagagacagcctgagcctgagcacccagagaacccagggccccgccgagagcgccagaaacctggagtacgtgagcgtgagccccaccaacaacaccgtgtacgccagcgtgacccacagcaacagagagaccgagatctggacccccagagagaacgacaccatcaccatctacagcaccatcaaccacagcaaggagagcaagcccaccttcagcagagccaccgccctggacaacgtggtgtag

SEQ ID NO: 99080 - DNA, 999 bp, synthetic construct
  misc_feature 1..999: note = Description of Artificial Sequence: Synthetic coding sequence
  source 1..999: mol_type = other DNA
atgctgtggctgttccagagcctgctgttcgtgttctgcttcggccccggcaacgtggtgagccagagcagcctgacccccctgatggtgaacggcatcctgggcgagagcgtgaccctgcccctggagttccccgccggcgagaaggtgaacttcatcacctggctgttcaacgagaccagcctggccttcatcgtgccccacgagaccaagagccccgagatccacgtgaccaaccccaagcagggcaagagactgaacttcacccagagctacagcctgcagctgagcaacctgaagatggaggacaccggcagctacagagcccagatcagcaccaagaccagcgccaagctgagcagctacaccctgagaatcctgagacagctgagaaacatccaggtgaccaaccacagccagctgttccagaacatgacctgcgagctgcacctgacctgcagcgtggaggacgccgacgacaacgtgagcttcagatgggaggccctgggcaacaccctgagcagccagcccaacctgaccgtgagctgggaccccagaatcagcagcgagcaggactacacctgcatcgccgagaacgccgtgagcaacctgagcttcagcgtgagcgcccagaagctgtgcgaggacgtgaagatccagtacaccgacaccaagatgatcctgttcatggtgagcggcatctgcatcgtgttcggcttcatcatcctgctgctgctggtgctgagaaagagaagagacagcctgagcctgagcacccagagaacccagggccccgccgagagcgccagaaacctggagtacgtgagcgtgagccccaccaacaacaccgtgtacgccagcgtgacccacagcaacagagagaccgagatctggacccccagagagaacgacaccatcaccatctacagcaccatcaaccacagcaaggagagcaagcccaccttcagcagagccaccgccctggacaacgtggtgtag

SEQ ID NO: 99081 - DNA, 996 bp, synthetic construct
  misc_feature 1..996: note = Description of Artificial Sequence: Synthetic coding sequence
  source 1..996: mol_type = other DNA
atgctgtggctgttccagagcctgctgttcgtgttctgcttcggccccggcaacgtggtgagccagagcagcctgacccccctgatggtgaacggcatcctgggcgagagcgtgaccctgcccctggagttccccgccggcgagaaggtgaacttcatcacctggctgttcaacgagaccagcctggccttcatcgtgccccacgagaccaagagccccgagatccacgtgaccaaccccaagcagggcaagagactgaacttcacccagagctacagcctgcagctgagcaacctgaagatggaggacaccggcagctacagagcccagatcagcaccaagaccagcgccaagctgagcagctacaccctgagaatcctgagacagctgagaaacatccaggtgaccaaccacagccagctgttccagaacatgacctgcgagctgcacctgacctgcagcgtggaggacgccgacgacaacgtgagcttcagatgggaggccctgggcaacaccctgagcagccagcccaacctgaccgtgagctgggaccccagaatcagcagcgagcaggactacacctgcatcgccgagaacgccgtgagcaacctgagcttcagcgtgagcgcccagaagctgtgcgaggacgtgaagatccagtacaccgacaccaagatgatcctgttcatggtgagcggcatctgcatcgtgttcggcttcatcatcctgctgctgctggtgctgagaaagagaagagacagcctgagcctgagcacccagagaacccagggccccgagagcgccagaaacctggagtacgtgagcgtgagccccaccaacaacaccgtgtacgccagcgtgacccacagcaacagagagaccgagatctggacccccagagagaacgacaccatcaccatctacagcaccatcaaccacagcaaggagagcaagcccaccttcagcagagccaccgccctggacaacgtggtgtag

SEQ ID NO: 99082 - DNA, 891 bp, synthetic construct
  misc_feature 1..891: note = Description of Artificial Sequence: Synthetic coding sequence
  source 1..891: mol_type = other DNA
atggccggcagccccacctgcctgaccctgatctacatcctgtggcagctgaccggcagcgccgccagcggccccgtgaaggagctggtgggcagcgtgggcggcgccgtgaccttccccctgaagagcaaggtgaagcaggtggacagcatcgtgtggaccttcaacaccacccccctggtgaccatccagcccgagggcggcaccatcatcgtgacccagaacagaaacagagagagagtggacttccccgacggcggctacagcctgaagctgagcaagctgaagaagaacgacagcggcatctactacgtgggcatctacagcagcagcctgcagcagcccagcacccaggagtacgtgctgcacgtgtacgagcacctgagcaagcccaaggtgaccatgggcctgcagagcaacaagaacggcacctgcgtgaccaacctgacctgctgcatggagcacggcgaggaggacgtgatctacacctggaaggccctgggccaggccgccaacgagagccacaacggcagcatcctgcccatcagctggagatggggcgagagcgacatgaccttcatctgcgtggccagaaaccccgtgagcagaaacttcagcagccccatcctggccagaaagctgtgcgagggcgccgccgacgaccccgacagcagcatggtgctgctgtgcctgctgctggtgcccctgctgctgagcctgttcgtgctgggcctgttcctgtggttcctgaagagagagagacaggaggagaacaaccccaagggcagaagcagcaagtacggcctgctgcactgcggcaacaccgagaaggacggcaagagccccctgaccgcccacgacgccagacacaccaaggccatctgcctgtag

SEQ ID NO: 99083 - DNA, 687 bp, synthetic construct
  misc_feature 1..687: note = Description of Artificial Sequence: Synthetic coding sequence
  source 1..687: mol_type = other DNA
atggccggcagccccacctgcctgaccctgatctacatcctgtggcagctgaccgagcacctgagcaagcccaaggtgaccatgggcctgcagagcaacaagaacggcacctgcgtgaccaacctgacctgctgcatggagcacggcgaggaggacgtgatctacacctggaaggccctgggccaggccgccaacgagagccacaacggcagcatcctgcccatcagctggagatggggcgagagcgacatgaccttcatctgcgtggccagaaaccccgtgagcagaaacttcagcagccccatcctggccagaaagctgtgcgagggcgccgccgacgaccccgacagcagcatggtgctgctgtgcctgctgctggtgcccctgctgctgagcctgttcgtgctgggcctgttcctgtggttcctgaagagagagagacaggaggagtacatcgaggagaagaagagagtggacatctgcagagagacccccaacatctgcccccacagcggcgagaacaccgagtacgacaccatcccccacaccaacagaaccatcctgaaggaggaccccgccaacaccgtgtacagcaccgtggagatccccaagaagatggagaacccccacagcctgctgaccatgcccgacacccccagactgttcgcctacgagaacgtgatctag

SEQ ID NO: 99084 - DNA, 1008 bp, synthetic construct
  misc_feature 1..1008: note = Description of Artificial Sequence: Synthetic coding sequence
  source 1..1008: mol_type = other DNA
atggccggcagccccacctgcctgaccctgatctacatcctgtggcagctgaccggcagcgccgccagcggccccgtgaaggagctggtgggcagcgtgggcggcgccgtgaccttccccctgaagagcaaggtgaagcaggtggacagcatcgtgtggaccttcaacaccacccccctggtgaccatccagcccgagggcggcaccatcatcgtgacccagaacagaaacagagagagagtggacttccccgacggcggctacagcctgaagctgagcaagctgaagaagaacgacagcggcatctactacgtgggcatctacagcagcagcctgcagcagcccagcacccaggagtacgtgctgcacgtgtacgagcacctgagcaagcccaaggtgaccatgggcctgcagagcaacaagaacggcacctgcgtgaccaacctgacctgctgcatggagcacggcgaggaggacgtgatctacacctggaaggccctgggccaggccgccaacgagagccacaacggcagcatcctgcccatcagctggagatggggcgagagcgacatgaccttcatctgcgtggccagaaaccccgtgagcagaaacttcagcagccccatcctggccagaaagctgtgcgagggcgccgccgacgaccccgacagcagcatggtgctgctgtgcctgctgctggtgcccctgctgctgagcctgttcgtgctgggcctgttcctgtggttcctgaagagagagagacaggaggagtacatcgaggagaagaagagagtggacatctgcagagagacccccaacatctgcccccacagcggcgagaacaccgagtacgacaccatcccccacaccaacagaaccatcctgaaggaggaccccgccaacaccgtgtacagcaccgtggagatccccaagaagatggagaacccccacagcctgctgaccatgcccgacacccccagactgttcgcctacgagaacgtgatctag

SEQ ID NO: 99085 - DNA, 615 bp, synthetic construct
  misc_feature 1..615: note = Description of Artificial Sequence: Synthetic coding sequence
  source 1..615: mol_type = other DNA
atggccggcagccccacctgcctgaccctgatctacatcctgtggcagctgaccggcagcgccgccagcggccccgtgaaggagctggtgggcagcgtgggcggcgccgtgaccttccccctgaagagcaaggtgaagcaggtggacagcatcgtgtggaccttcaacaccacccccctggtgaccatccagcccgagggcggcaccatcatcgtgacccagaacagaaacagagagagagtggacttccccgacggcggctacagcctgaagctgagcaagctgaagaagaacgacagcggcatctactacgtgggcatctacagcagcagcctgcagcagcccagcacccaggagtacgtgctgcacgtgtacgagtacatcgaggagaagaagagagtggacatctgcagagagacccccaacatctgcccccacagcggcgagaacaccgagtacgacaccatcccccacaccaacagaaccatcctgaaggaggaccccgccaacaccgtgtacagcaccgtggagatccccaagaagatggagaacccccacagcctgctgaccatgcccgacacccccagactgttcgcctacgagaacgtgatctag

SEQ ID NO: 99086 - DNA, 498 bp, synthetic construct
  misc_feature 1..498: note = Description of Artificial Sequence: Synthetic coding sequence
  source 1..498: mol_type = other DNA
atggccggcagccccacctgcctgaccctgatctacatcctgtggcagctgaccggcagcgccgccagcggccccgtgaaggagctggtgggcagcgtgggcggcgccgtgaccttccccctgaagagcaaggtgaagcaggtggacagcatcgtgtggaccttcaacaccacccccctggtgaccatccagcccgagggcggcaccatcatcgtgacccagaacagaaacagagagagagtggacttccccgacggcggctacagcctgaagctgagcaagctgaagaagaacgacagcggcatctactacgtgggcatctacagcagcagcctgcagcagcccagcacccaggagtacgtgctgcacgtgtacgagaacaaccccaagggcagaagcagcaagtacggcctgctgcactgcggcaacaccgagaaggacggcaagagccccctgaccgcccacgacgccagacacaccaaggccatctgcctgtag

SEQ ID NO: 99087 - DNA, 450 bp, synthetic construct
  misc_feature 1..450: note = Description of Artificial Sequence: Synthetic coding sequence
  source 1..450: mol_type = other DNA
atggccggcagccccacctgcctgaccctgatctacatcctgtggcagctgaccgagcacctgagcaagcccaaggtgaccatgggcctgcagagcaacaagaacggcacctgcgtgaccaacctgacctgctgcatggagcacggcgaggaggacgtgatctacacctggaaggccctgggccaggccgccaacgagagccacaacggcagcatcctgcccatcagctggagatggggcgagagcgacatgaccttcatctgcgtggccagaaaccccgtgagcagaaacttcagcagccccatcctggccagaaagctgtgcgaggagaacaaccccaagggcagaagcagcaagtacggcctgctgcactgcggcaacaccgagaaggacggcaagagccccctgaccgcccacgacgccagacacaccaaggccatctgcctgtag

SEQ ID NO: 99088 - DNA, 567 bp, synthetic construct
  misc_feature 1..567: note = Description of Artificial Sequence: Synthetic coding sequence
  source 1..567: mol_type = other DNA
atggccggcagccccacctgcctgaccctgatctacatcctgtggcagctgaccgagcacctgagcaagcccaaggtgaccatgggcctgcagagcaacaagaacggcacctgcgtgaccaacctgacctgctgcatggagcacggcgaggaggacgtgatctacacctggaaggccctgggccaggccgccaacgagagccacaacggcagcatcctgcccatcagctggagatggggcgagagcgacatgaccttcatctgcgtggccagaaaccccgtgagcagaaacttcagcagccccatcctggccagaaagctgtgcgaggagtacatcgaggagaagaagagagtggacatctgcagagagacccccaacatctgcccccacagcggcgagaacaccgagtacgacaccatcccccacaccaacagaaccatcctgaaggaggaccccgccaacaccgtgtacagcaccgtggagatccccaagaagatggagaacccccacagcctgctgaccatgcccgacacccccagactgttcgcctacgagaacgtgatctag

SEQ ID NO: 99089 - DNA, 858 bp, synthetic construct
  misc_feature 1..858: note = Description of Artificial Sequence: Synthetic coding sequence
  source 1..858: mol_type = other DNA
atggtgatgagacccctgtggagcctgctgctgtgggaggccctgctgcccatcaccgtgaccggcgcccaggtgctgagcaaggtgggcggcagcgtgctgctggtggccgccagaccccccggcttccaggtgagagaggccatctggagaagcctgtggcccagcgaggagctgctggccaccttcttcagaggcagcctggagaccctgtaccacagcagattcctgggcagagcccagctgcacagcaacctgagcctggagctgggccccctggagagcggcgacagcggcaacttcagcgtgctgatggtggacaccagaggccagccctggacccagaccctgcagctgaaggtgtacgacgccgtgcccagacccgtggtgcaggtgttcatcgccgtggagagagacgcccagcccagcaagacctgccaggtgttcctgagctgctgggcccccaacatcagcgagatcacctacagctggagaagagagaccaccatggacttcggcatggagccccacagcctgttcaccgacggccaggtgctgagcatcagcctgggccccggcgacagagacgtggcctacagctgcatcgtgagcaaccccgtgagctgggacctggccaccgtgaccccctgggacagctgccaccacgaggccgcccccggcaaggccagctacaaggacgtgctgctggtggtggtgcccgtgagcctgctgctgatgctggtgaccctgttcagcgcctggcactggtgcccctgcagcggcaagaagaagaaggacgtgcacgccgacagagtgggccccgagaccgagaaccccctggtgcaggacctgccctag

SEQ ID NO: 99090 - DNA, 531 bp, synthetic construct
  misc_feature 1..531: note = Description of Artificial Sequence: Synthetic coding sequence
  source 1..531: mol_type = other DNA
atggtgatgagacccctgtggagcctgctgctgtgggaggacgccgtgcccagacccgtggtgcaggtgttcatcgccgtggagagagacgcccagcccagcaagacctgccaggtgttcctgagctgctgggcccccaacatcagcgagatcacctacagctggagaagagagaccaccatggacttcggcatggagccccacagcctgttcaccgacggccaggtgctgagcatcagcctgggccccggcgacagagacgtggcctacagctgcatcgtgagcaaccccgtgagctgggacctggccaccgtgaccccctgggacagctgccaccacgaggccgcccccggcaaggccagctacaaggacgtgctgctggtggtggtgcccgtgagcctgctgctgatgctggtgaccctgttcagcgcctggcactggtgcccctgcagcggcaagaagaagaaggacgtgcacgccgacagagtgggccccgagaccgagaaccccctggtgcaggacctgccctag

SEQ ID NO: 99091 - DNA, 444 bp, synthetic construct
  misc_feature 1..444: note = Description of Artificial Sequence: Synthetic coding sequence
  source 1..444: mol_type = other DNA
atgggcggcagacaccacctgcagagacaggtgagcgagagcatgagcgccctgttccaggccgtgagactggagagcgcctgggccgacagagtgagatacatggtggtggtgtacagcagcggcagacaggacaccgaggagaacatcctgctgggcgtggacttcagcagcaaggagagcggcttcagcgtgagcaccgccggcagaatgcacatcttcaagcccgtgagcgtgcaggccatgtggagcgccctgcaggtgctgcacaaggcctgcgaggtggccagaagacacaactacttccccggcggcgtggccctgatctgggccacctactacgagagctgcatcagcagcgagcagagctgcatcaacgagtggaacgccatgcaggacctggagagcaccagacccgacagccccgccctgttcgtggactag

SEQ ID NO: 99092 - DNA, 2112 bp, synthetic construct
  misc_feature 1..2112: note = Description of Artificial Sequence: Synthetic coding sequence
  source 1..2112: mol_type = other DNA
atggccagagccagaagagccgtggtgggcagcgtgagagacgtgagcaccgccgccaccaacctgttctacttcaccgacttctgcatcttcctgcagcccacccactgcttctgctgccccgaggtgagcagcagcaactacctgagcgagagcttcttcatggtgaagggcgccgccctgttcctgcagcagggcagcagcccccagggccagagaagcctgcagcacccccacaagcacgccggcgacctgccccagcacctgcaggtgatgatcaacctgctgagatgcgaggacagaatcaagctggccgtgagactggagagcgcctgggccgacagagtgagatacatggtggtggtgtacagcagcggcagacaggacaccgaggagaacatcctgctgggcgtggacttcagcagcaaggagagcaagagctgcaccatcggcatggtgctgagactgtggagcgacaccaagatccacctggacggcgacggcggcttcagcgtgagcaccgccggcagaatgcacatcttcaagcccgtgagcgtgcaggccatgtggagcgccctgcaggtgctgcacaaggcctgcgaggtggccagaagacacaactacttccccggcggcgtggccctgatctgggccacctactacgagagctgcatcagcagcgagcagagctgcatcaacgagtggaacgccatgcaggacctggagagcaccagacccgacagccccgccctgttcgtggacaagcccaccgagggcgagagaaccgagagactgatcaaggccaagctgagaagcatcatgatgagccaggacctggagaacgtgaccagcaaggagatcagaaacgagctggagaagcagatgaactgcaacctgaaggagctgaaggagttcatcgacaacgagatgctgctgatcctgggccagatggacaagcccagcctgatcttcgaccacctgtacctgggcagcgagtggaacgccagcaacctggaggagctgcagggcagcggcgtggactacatcctgaacgtgaccagagagatcgacaacttcttccccggcctgttcgcctaccacaacatcagagtgtacgacgaggagaccaccgacctgctggcccactggaacgaggcctaccacttcatcaacaaggccaagagaaaccacagcaagtgcctggtgcactgcaagatgggcgtgagcagaagcgccagcaccgtgatcgcctacgccatgaaggagttcggctggcccctggagaaggcctacaactacgtgaagcagaagagaagcatcaccagacccaacgccggcttcatgagacagctgagcgagtacgagggcatcctggacgccagcaagcagagacacaacaagctgtggagacagcagaccgacagcagcctgcagcagcccgtggacgaccccgccggccccggcgacttcctgcccgagacccccgacggcacccccgagagccagctgcccttcctggacgacgccgcccagcccggcctgggcccccccctgccctgctgcttcagaagactgagcgaccccctgctgcccagccccgaggacgagaccggcagcctggtgcacctggaggaccccgagagagaggccctgctggaggaggccgccccccccgccgaggtgcacagacccgccagacagccccagcagggcagcggcctgtgcgagaaggacgtgaagaagaagctggagttcggcagccccaagggcagaagcggcagcctgctgcaggtggaggagaccgagagagaggagggcctgggcgccggcagatggggccagctgcccacccagctggaccagaacctgctgaacagcgagaacctgaacaacaacagcaagagaagctgccccaacggcatggaggtgggcagagccagacccgccggctggcacacccccagcctgcccagccacagcaactggcccaccagcgccagcgtggtgggcaccaccggcaccagacaccacacccagctgatcttcttctactgcctgctgtgggcccccagcagccacctgcagggccccgagggcagcttcaccggctag

SEQ ID NO: 99093 - DNA, 3150 bp, synthetic construct
  misc_feature 1..3150: note = Description of Artificial Sequence: Synthetic coding sequence
  source 1..3150: mol_type = other DNA
atggccctggtgaccctgcagagaagccccacccccagcgccgccagcagcagcgccagcaacagcgagctggaggccggcagcgaggaggacagaaagctgaacctgagcctgagcgagagcttcttcatggtgaagggcgccgccctgttcctgcagcagggcagcagcccccagggccagagaagcctgcagcacccccacaagcacgccggcgacctgccccagcacctgcaggtgatgatcaacctgctgagatgcgaggacagaatcaagctggccgtgagactggagagcgcctgggccgacagagtgagatacatggtggtggtgtacagcagcggcagacaggacaccgaggagaacatcctgctgggcgtggacttcagcagcaaggagagcaagagctgcaccatcggcatggtgctgagactgtggagcgacaccaagatccacctggacggcgacggcggcttcagcgtgagcaccgccggcagaatgcacatcttcaagcccgtgagcgtgcaggccatgtggagcgccctgcaggtgctgcacaaggcctgcgaggtggccagaagacacaactacttccccggcggcgtggccctgatctgggccacctactacgagagctgcatcagcagcgagcagagctgcatcaacgagtggaacgccatgcaggacctggagagcaccagacccgacagccccgccctgttcgtggacaagcccaccgagggcgagagaaccgagagactgatcaaggccaagctgagaagcatcatgatgagccaggacctggagaacgtgaccagcaaggagatcagaaacgagctggagaagcagatgaactgcaacctgaaggagctgaaggagttcatcgacaacgagatgctgctgatcctgggccagatggacaagcccagcctgatcttcgaccacctgtacctgggcagcgagtggaacgccagcaacctggaggagctgcagggcagcggcgtggactacatcctgaacgtgaccagagagatcgacaacttcttccccggcctgttcgcctaccacaacatcagagtgtacgacgaggagaccaccgacctgctggcccactggaacgaggcctaccacttcatcaacaaggccaagagaaaccacagcaagtgcctggtgcactgcaagatgggcgtgagcagaagcgccagcaccgtgatcgcctacgccatgaaggagttcggctggcccctggagaaggcctacaactacgtgaagcagaagagaagcatcaccagacccaacgccggcttcatgagacagctgagcgagtacgagggcatcctggacgccagcaagcagagacacaacaagctgtggagacagcagaccgacagcagcctgcagcagcccgtggacgaccccgccggccccggcgacttcctgcccgagacccccgacggcacccccgagagccagctgcccttcctggacgacgccgcccagcccggcctgggcccccccctgccctgctgcttcagaagactgagcgaccccctgctgcccagccccgaggacgagaccggcagcctggtgcacctggaggaccccgagagagaggccctgctggaggaggccgccccccccgccgaggtgcacagacccgccagacagccccagcagggcagcggcctgtgcgagaaggacgtgaagaagaagctggagttcggcagccccaagggcagaagcggcagcctgctgcaggtggaggagaccgagagagaggagggcctgggcgccggcagatggggccagctgcccacccagctggaccagaacctgctgaacagcgagaacctgaacaacaacagcaagagaagctgccccaacggcatggaggacgacgccatcttcggcatcctgaacaaggtgaagcccagctacaagagctgcgccgactgcatgtaccccaccgccagcggcgcccccgaggccagcagagagagatgcgaggaccccaacgcccccgccatctgcacccagcccgccttcctgccccacatcaccagcagccccgtggcccacctggccagcagaagcagagtgcccgagaagcccgccagcggccccaccgagcccccccccttcctgccccccgccggcagcagaagagccgacaccagcggccccggcgccggcgccgccctggagccccccgccagcctgctggagcccagcagagagacccccaaggtgctgcccaagagcctgctgctgaagaacagccactgcgacaagaacccccccagcaccgaggtggtgatcaaggaggagagcagccccaagaaggacatgaagcccgccaaggacctgagactgctgttcagcaacgagagcgagaagcccaccaccaacagctacctgatgcagcaccaggagagcatcatccagctgcagaaggccggcctggtgagaaagcacaccaaggagctggagagactgaagagcgtgcccgccgaccccgccccccccagcagagacggccccgccagcagactggaggccagcatccccgaggagagccaggaccccgccgccctgcacgagctgggccccctggtgatgcccagccaggccggcagcgacgagaagagcgaggccgcccccgccagcctggagggcggcagcctgaagagccccccccccttcttctacagactggaccacaccagcagcttcagcaaggacttcctgaagaccatctgctacacccccaccagcagcagcatgagcagcaacctgaccagaagcagcagcagcgacagcatccacagcgtgagaggcaagcccggcctggtgaagcagagaacccaggagatcgagaccagactgagactggccggcctgaccgtgagcagccccctgaagagaagccacagcctggccaagctgggcagcctgaccttcagcaccgaggacctgagcagcgaggccgaccccagcaccgtggccgacagccaggacaccaccctgagcgagagcagcttcctgcacgagccccagggcacccccagagaccccgccgccaccagcaagcccagcggcaagcccgcccccgagaacctgaagagccccagctggatgagcaagagctag

SEQ ID NO: 99094 - DNA, 2214 bp, synthetic construct
  misc_feature 1..2214: note = Description of Artificial Sequence: Synthetic coding sequence
  source 1..2214: mol_type = other DNA
atgagatgctacctgagctgggacagatggaccagcccccccctgagcagcatcatcttcatcagcgtggactacatcctgaacgtgaccagagagatcgacaacttcttccccggcctgttcgcctaccacaacatcagagtgtacgacgaggagaccaccgacctgctggcccactggaacgaggcctaccacttcatcaacaaggccaagagaaaccacagcaagtgcctggtgcactgcaagatgggcgtgagcagaagcgccagcaccgtgatcgcctacgccatgaaggagttcggctggcccctggagaaggcctacaactacgtgaagcagaagagaagcatcaccagacccaacgccggcttcatgagacagctgagcgagtacgagggcatcctggacgccagcaagcagagacacaacaagctgtggagacagcagaccgacagcagcctgcagcagcccgtggacgaccccgccggccccggcgacttcctgcccgagacccccgacggcacccccgagagccagctgcccttcctggacgacgccgcccagcccggcctgggcccccccctgccctgctgcttcagaagactgagcgaccccctgctgcccagccccgaggacgagaccggcagcctggtgcacctggaggaccccgagagagaggccctgctggaggaggccgccccccccgccgaggtgcacagacccgccagacagccccagcagggcagcggcctgtgcgagaaggacgtgaagaagaagctggagttcggcagccccaagggcagaagcggcagcctgctgcaggtggaggagaccgagagagaggagggcctgggcgccggcagatggggccagctgcccacccagctggaccagaacctgctgaacagcgagaacctgaacaacaacagcaagagaagctgccccaacggcatggaggacgacgccatcttcggcatcctgaacaaggtgaagcccagctacaagagctgcgccgactgcatgtaccccaccgccagcggcgcccccgaggccagcagagagagatgcgaggaccccaacgcccccgccatctgcacccagcccgccttcctgccccacatcaccagcagccccgtggcccacctggccagcagaagcagagtgcccgagaagcccgccagcggccccaccgagcccccccccttcctgccccccgccggcagcagaagagccgacaccagcggccccggcgccggcgccgccctggagccccccgccagcctgctggagcccagcagagagacccccaaggtgctgcccaagagcctgctgctgaagaacagccactgcgacaagaacccccccagcaccgaggtggtgatcaaggaggagagcagccccaagaaggacatgaagcccgccaaggacctgagactgctgttcagcaacgagagcgagaagcccaccaccaacagctacctgatgcagcaccaggagagcatcatccagctgcagaaggccggcctggtgagaaagcacaccaaggagctggagagactgaagagcgtgcccgccgaccccgccccccccagcagagacggccccgccagcagactggaggccagcatccccgaggagagccaggaccccgccgccctgcacgagctgggccccctggtgatgcccagccaggccggcagcgacgagaagagcgaggccgcccccgccagcctggagggcggcagcctgaagagccccccccccttcttctacagactggaccacaccagcagcttcagcaaggacttcctgaagaccatctgctacacccccaccagcagcagcatgagcagcaacctgaccagaagcagcagcagcgacagcatccacagcgtgagaggcaagcccggcctggtgaagcagagaacccaggagatcgagaccagactgagactggccggcctgaccgtgagcagccccctgaagagaagccacagcctggccaagctgggcagcctgaccttcagcaccgaggacctgagcagcgaggccgaccccagcaccgtggccgacagccaggacaccaccctgagcgagagcagcttcctgcacgagccccagggcacccccagagaccccgccgccaccagcaagcccagcggcaagcccgcccccgagaacctgaagagccccagctggatgagcaagagctag

SEQ ID NO: 99095 - DNA, 2079 bp, synthetic construct
  misc_feature 1..2079: note = Description of Artificial Sequence: Synthetic coding sequence
  source 1..2079: mol_type = other DNA
atggccctggtgaccctgcagagaagccccacccccagcgccgccagcagcagcgccagcaacagcgagctggaggccggcagcgaggaggacagaaagctgaacctgagcctgagcgagagcttcttcatggtgaagggcgccgccctgttcctgcagcagggcagcagcccccagggccagagaagcctgcagcacccccacaagcacgccggcgacctgccccagcacctgcaggtgatgatcaacctgctgagatgcgaggacagaatcaagctggccgtgagactggagagcgcctgggccgacagagtgagatacatggtggtggtgtacagcagcggcagacaggacaccgaggagaacatcctgctgggcgtggacttcagcagcaaggagagcaagagctgcaccatcggcatggtgctgagactgtggagcgacaccaagatccacctggacggcgacggcggcttcagcgtgagcaccgccggcagaatgcacatcttcaagcccgtgagcgtgcaggccatgtggagcgccctgcaggtgctgcacaaggcctgcgaggtggccagaagacacaactacttccccggcggcgtggccctgatctgggccacctactacgagagctgcatcagcagcgagcagagctgcatcaacgagtggaacgccatgcaggacctggagagcaccagacccgacagccccgccctgttcgtggacaagcccaccgagggcgagagaaccgagagactgatcaaggccaagctgagaagcatcatgatgagccaggacctggagaacgtgaccagcaaggagatcagaaacgagctggagaagcagatgaactgcaacctgaaggagctgaaggagttcatcgacaacgagatgctgctgatcctgggccagatggacaagcccagcctgatcttcgaccacctgtacctgggcagcgagtggaacgccagcaacctggaggagctgcagggcagcggcgtggactacatcctgaacgtgaccagagagatcgacaacttcttccccggcctgttcgcctaccacaacatcagagtgtacgacgaggagaccaccgacctgctggcccactggaacgaggcctaccacttcatcaacaaggccaagagaaaccacagcaagtgcctggtgcactgcaagatgggcgtgagcagaagcgccagcaccgtgatcgcctacgccatgaaggagttcggctggcccctggagaaggcctacaactacgtgaagcagaagagaagcatcaccagacccaacgccggcttcatgagacagctgagcgagtacgagggcatcctggacgccagcaagcagagacacaacaagctgtggagacagcagaccgacagcagcctgcagcagcccgtggacgaccccgccggccccggcgacttcctgcccgagacccccgacggcacccccgagagccagctgcccttcctggacgacgccgcccagcccggcctgggcccccccctgccctgctgcttcagaagactgagcgaccccctgctgcccagccccgaggacgagaccggcagcctggtgcacctggaggaccccgagagagaggccctgctggaggaggccgccccccccgccgaggtgcacagacccgccagacagccccagcagggcagcggcctgtgcgagaaggacgtgaagaagaagctggagttcggcagccccaagggcagaagcggcagcctgctgcaggtggaggagaccgagagagaggagggcctgggcgccggcagatggggccagctgcccacccagctggaccagaacctgctgaacagcgagaacctgaacaacaacagcaagagaagctgccccaacggcatggaggtgggcagagccagacccgccggctggcacacccccagcctgcccagccacagcaactggcccaccagcgccagcgtggtgggcaccaccggcaccagacaccacacccagctgatcttcttctactgcctgctgtgggcccccagcagccacctgcagggccccgagggcagcttcaccggctag

SEQ ID NO: 99096 - DNA, 4272 bp, synthetic construct
  misc_feature 1..4272: note = Description of Artificial Sequence: Synthetic coding sequence
  source 1..4272: mol_type = other DNA
atggccctggtgaccgtgcagagaagccccacccccagcaccaccagcagcccctgcgccagcgaggccgacagcggcgaggaggagtgcagaagccagcccagaagcatcagcgagagcttcctgaccgtgaagggcgccgccctgttcctgcccagaggcaacggcagcagcacccccagaatcagccacagaagaaacaagcacgccggcgacctgcagcagcacctgcaggccatgttcatcctgctgagacccgaggacaacatcagactggccgtgagactggagagcacctaccagaacagaaccagatacatggtggtggtgagcaccaacggcagacaggacaccgaggagagcatcgtgctgggcatggacttcagcagcaacgacagcagcacctgcaccatgggcctggtgctgcccctgtggagcgacaccctgatccacctggacggcgacggcggcttcagcgtgagcaccgacaacagagtgcacatcttcaagcccgtgagcgtgcaggccatgtggagcgccctgcagagcctgcacaaggcctgcgaggtggccagagcccacaactactaccccggcagcctgttcctgacctgggtgagctactacgagagccacatcaacagcgaccagagcagcgtgaacgagtggaacgccatgcaggacgtgcagagccacagacccgacagccccgccctgttcaccgacatccccaccgagagagagagaaccgagagactgatcaagaccaagctgagagagatcatgatgcagaaggacctggagaacatcaccagcaaggagatcagaaccgagctggagatgcagatggtgtgcaacctgagagagttcaaggagttcatcgacaacgagatgatcgtgatcctgggccagatggacagccccacccagatcttcgagcacgtgttcctgggcagcgagtggaacgccagcaacctggaggacctgcagaacagaggcgtgagatacatcctgaacgtgaccagagagatcgacaacttcttccccggcgtgttcgagtaccacaacatcagagtgtacgacgaggaggccaccgacctgctggcctactggaacgacacctacaagttcatcagcaaggccaagaagcacggcagcaagtgcctggtgcactgcaagatgggcgtgagcagaagcgccagcaccgtgatcgcctacgccatgaaggagtacggctggaacctggacagagcctacgactacgtgaaggagagaagaaccgtgaccaagcccaaccccagcttcatgagacagctggaggagtaccagggcatcctgctggccagcaagcagagacacaacaagctgtggagaagccacagcgacagcgacctgagcgaccaccacgagcccatctgcaagcccggcctggagctgaacaagaaggacatcaccaccagcgccgaccagatcgccgaggtgaagaccatggagagccacccccccatcccccccgtgttcgtggagcacatggtgccccaggacgccaaccagaagggcctgtgcaccaaggagagaatgatctgcctggagttcaccagcagagagttccacgccggccagatcgaggacgagctgaacctgaacgacatcaacggctgcagcagcggctgctgcctgaacgagagcaagttccccctggacaactgccacgccagcaaggccctgatccagcccggccacgtgcccgagatggccaacaagttccccgacctgaccgtggaggacctggagaccgacgccctgaaggccgacatgaacgtgcacctgctgcccatggaggagctgaccagccccctgaaggacccccccatgagccccgaccccgagagccccagcccccagcccagctgccagaccgagatcagcgacttcagcaccgacagaatcgacttcttcagcgccctggagaagttcgtggagctgagccaggagaccagaagcagaagcttcagccacagcagaatggaggagctgggcggcggcagaaacgagagctgcagactgagcgtggtggaggtggcccccagcaaggtgaccgccgacgaccagagaagcagcagcctgagcaacaccccccacgccagcgaggagagcagcatggacgaggagcagagcaaggccatcagcgagctggtgagccccgacatcttcatgcagagccacagcgagaacgccatcagcgtgaaggagatcgtgaccgagatcgagagcatcagccagggcgtgggccagatccagctgaagggcgacatcctgcccaacccctgccacacccccaagaagaacagcatccacgagctgctgctggagagagcccagacccccgagaacaagcccggccacatggagcaggacgaggacagctgcaccgcccagcccgagctggccaaggacagcggcatgtgcaaccccgagggctgcctgaccacccacagcagcatcgccgacctggaggagggcgagcccgccgagggcgagcaggagctgcagggcagcggcatgcaccccggcgccaagtggtaccccggcagcgtgagaagagccaccctggagttcgaggagagactgagacaggagcaggagcaccacggcgccgcccccacctgcaccagcctgagcaccagaaagaacagcaagaacgacagcagcgtggccgacctggcccccaagggcaagagcgacgaggccccccccgagcacagcttcgtgctgaaggagcccgagatgagcaagggcaagggcaagtacagcggcagcgaggccggcagcctgagccacagcgagcagaacgccaccgtgcccgcccccagagtgctggagttcgaccacctgcccgacccccaggagggccccggcagcgacaccggcacccagcaggagggcgtgctgaaggacctgagaaccgtgatcccctaccaggagagcgagacccaggccgtgcccctgcccctgcccaagagagtggagatcatcgagtacacccacatcgtgaccagccccaaccacaccggccccggcagcgagatcgccaccagcgagaagagcggcgagcagggcctgagaaaggtgaacatggagaagagcgtgaccgtgctgtgcaccctggacgagaacctgaacagaaccctggaccccaaccaggtgagcctgcacccccaggtgctgcccctgccccacagcagcagccccgagcacaacagacccaccgaccaccccaccagcatcctgagcagccccgaggacagaggcagcagcctgagcaccgccctggagaccgccgcccccttcgtgagccacaccacccacctgctgagcgccagcctggactacctgcacccccagaccatggtgcacctggagggcttcaccgagcagagcagcaccaccgacgagcccagcgccgagcaggtgagctgggaggagagccaggagagccccctgagcagcggcagcgaggtgccctacaaggacagccagctgagcagcgccgacctgagcctgatcagcaagctgggcgacaacaccggcgagctgcaggagaagatggaccccctgcccgtggcctgcagactgccccacagcagcagcagcgagaacatcaagagcctgagccacagccccggcgtggtgaaggagagagccaaggagatcgagagcagagtggtgttccaggccggcctgaccaagcccagccagatgagaagaagcgccagcctggccaagctgggctacctggacctgtgcaaggactgcctgcccgagagagagcccgccagctgcgagagcccccacctgaagctgctgcagcccttcctgagaaccgacagcggcatgcacgccatggaggaccaggagagcctggagaaccccggcgccccccacaaccccgagcccaccaagagcttcgtggagcagctgaccaccaccgagtgcatcgtgcagagcaagcccgtggagagacccctggtgcagtacgccaaggagttcggcagcagccagcagtacctgctgcccagagccggcctggagctgaccagcagcgagggcggcctgcccgtgctgcagacccagggcctgcagtgcgcctgccccgcccccggcctggccgtggcccccagacagcagcacggcagaacccaccccctgagaagactgaagaaggccaacgacaagaagagaaccaccaaccccttctacaacaccatgtag

SEQ ID NO: 99097 - DNA, 609 bp, synthetic construct
  misc_feature 1..609: note = Description of Artificial Sequence: Synthetic coding sequence
  source 1..609: mol_type = other DNA
atgaccctgagcaccctggccagaaagagaaaggcccccctggcctgcacctgcagcctgggcggccccgacatgatcccctacttcagcgccaacgccgtgatcagccagaacgccatcaaccagctgatcagcgagagcttcctgaccgtgaagggcgccgccctgttcctgcccagaggcaacggcagcagcacccccagaatcagccacagaagaaacaagcacgccggcgacctgcagcagcacctgcaggccatgttcatcctgctgagacccgaggacaacatcagactggccgtgagactggagagcacctaccagaacagaaccagatacatggtggtggtgagcaccaacggcagacaggacaccgaggagagcatcgtgctgggcatggacttcagcagcaacgacagcagcacctgcaccatgggcctggtgctgcccctgtggagcgacaccctgatccacctggacggcgacggcggcttcagcgtgagcaccgacaacagagtgcacatcttcaagcccgtgagcgtgcaggccatgtgggtggacagagacagcagaaacaagcactgcgacgtgctgctggtggaggagtag

SEQ ID NO: 99098 - DNA, 1350 bp, synthetic construct
  misc_feature 1..1350: note = Description of Artificial Sequence: Synthetic coding sequence
  source 1..1350: mol_type = other DNA
atggccctggtgaccgtgcagagaagccccacccccagcaccaccagcagcccctgcgccagcgaggccgacagcggcgaggaggagtgcagaagccagcccagaagcatcagcgagagcttcctgaccgtgaagggcgccgccctgttcctgcccagaggcaacggcagcagcacccccagaatcagccacagaagaaacaagcacgccggcgacctgcagcagcacctgcaggccatgttcatcctgctgagacccgaggacaacatcagactggccgtgagactggagagcacctaccagaacagaaccagatacatggtggtggtgagcaccaacggcagacaggacaccgaggagagcatcgtgctgggcatggacttcagcagcaacgacagcagcacctgcaccatgggcctggtgctgcccctgtggagcgacaccctgatccacctggacggcgacggcggcttcagcgtgagcaccgacaacagagtgcacatcttcaagcccgtgagcgtgcaggccatgtggagcgccctgcagagcctgcacaaggcctgcgaggtggccagagcccacaactactaccccggcagcctgttcctgacctgggtgagctactacgagagccacatcaacagcgaccagagcagcgtgaacgagtggaacgccatgcaggacgtgcagagccacagacccgacagccccgccctgttcaccgacatccccaccgagagagagagaaccgagagactgatcaagaccaagctgagagagatcatgatgcagaaggacctggagaacatcaccagcaaggagatcagaaccgagctggagatgcagatggtgtgcaacctgagagagttcaaggagttcatcgacaacgagatgatcgtgatcctgggccagatggacagccccacccagatcttcgagcacgtgttcctgggcagcgagtggaacgccagcaacctggaggacctgcagaacagaggcgtgagatacatcctgaacgtgaccagagagatcgacaacttcttccccggcgtgttcgagtaccacaacatcagagtgtacgacgaggaggccaccgacctgctggcctactggaacgacacctacaagttcatcagcaaggccaagaagcacggcagcaagtgcctggtgcactgcaagatgggcgtgagcagaagcgccagcaccgtgatcgcctacgccatgaaggagtacggctggaacctggacagagcctacgactacgtgaaggagagaagaaccgtgaccaagcccaaccccagcttcatgagacagctggaggagtaccagggcatcctgctggccagatag

SEQ ID NO: 99099 - DNA, 4353 bp, synthetic construct
  misc_feature 1..4353: note = Description of Artificial Sequence: Synthetic coding sequence
  source 1..4353: mol_type = other DNA
atggccctggtgaccgtgcagagaagccccacccccagcaccaccagcagcccctgcgccagcagcagccacctggaggacagcgagagcgccgccctgctgtgctgcgagtgcgaggagagcgagatcttcaccgacagcaacgaggccgacagcggcgaggaggagtgcagaagccagcccagaagcatcagcgagagcttcctgaccgtgaagggcgccgccctgttcctgcccagaggcaacggcagcagcacccccagaatcagccacagaagaaacaagcacgccggcgacctgcagcagcacctgcaggccatgttcatcctgctgagacccgaggacaacatcagactggccgtgagactggagagcacctaccagaacagaaccagatacatggtggtggtgagcaccaacggcagacaggacaccgaggagagcatcgtgctgggcatggacttcagcagcaacgacagcagcacctgcaccatgggcctggtgctgcccctgtggagcgacaccctgatccacctggacggcgacggcggcttcagcgtgagcaccgacaacagagtgcacatcttcaagcccgtgagcgtgcaggccatgtggagcgccctgcagagcctgcacaaggcctgcgaggtggccagagcccacaactactaccccggcagcctgttcctgacctgggtgagctactacgagagccacatcaacagcgaccagagcagcgtgaacgagtggaacgccatgcaggacgtgcagagccacagacccgacagccccgccctgttcaccgacatccccaccgagagagagagaaccgagagactgatcaagaccaagctgagagagatcatgatgcagaaggacctggagaacatcaccagcaaggagatcagaaccgagctggagatgcagatggtgtgcaacctgagagagttcaaggagttcatcgacaacgagatgatcgtgatcctgggccagatggacagccccacccagatcttcgagcacgtgttcctgggcagcgagtggaacgccagcaacctggaggacctgcagaacagaggcgtgagatacatcctgaacgtgaccagagagatcgacaacttcttccccggcgtgttcgagtaccacaacatcagagtgtacgacgaggaggccaccgacctgctggcctactggaacgacacctacaagttcatcagcaaggccaagaagcacggcagcaagtgcctggtgcactgcaagatgggcgtgagcagaagcgccagcaccgtgatcgcctacgccatgaaggagtacggctggaacctggacagagcctacgactacgtgaaggagagaagaaccgtgaccaagcccaaccccagcttcatgagacagctggaggagtaccagggcatcctgctggccagcaagcagagacacaacaagctgtggagaagccacagcgacagcgacctgagcgaccaccacgagcccatctgcaagcccggcctggagctgaacaagaaggacatcaccaccagcgccgaccagatcgccgaggtgaagaccatggagagccacccccccatcccccccgtgttcgtggagcacatggtgccccaggacgccaaccagaagggcctgtgcaccaaggagagaatgatctgcctggagttcaccagcagagagttccacgccggccagatcgaggacgagctgaacctgaacgacatcaacggctgcagcagcggctgctgcctgaacgagagcaagttccccctggacaactgccacgccagcaaggccctgatccagcccggccacgtgcccgagatggccaacaagttccccgacctgaccgtggaggacctggagaccgacgccctgaaggccgacatgaacgtgcacctgctgcccatggaggagctgaccagccccctgaaggacccccccatgagccccgaccccgagagccccagcccccagcccagctgccagaccgagatcagcgacttcagcaccgacagaatcgacttcttcagcgccctggagaagttcgtggagctgagccaggagaccagaagcagaagcttcagccacagcagaatggaggagctgggcggcggcagaaacgagagctgcagactgagcgtggtggaggtggcccccagcaaggtgaccgccgacgaccagagaagcagcagcctgagcaacaccccccacgccagcgaggagagcagcatggacgaggagcagagcaaggccatcagcgagctggtgagccccgacatcttcatgcagagccacagcgagaacgccatcagcgtgaaggagatcgtgaccgagatcgagagcatcagccagggcgtgggccagatccagctgaagggcgacatcctgcccaacccctgccacacccccaagaagaacagcatccacgagctgctgctggagagagcccagacccccgagaacaagcccggccacatggagcaggacgaggacagctgcaccgcccagcccgagctggccaaggacagcggcatgtgcaaccccgagggctgcctgaccacccacagcagcatcgccgacctggaggagggcgagcccgccgagggcgagcaggagctgcagggcagcggcatgcaccccggcgccaagtggtaccccggcagcgtgagaagagccaccctggagttcgaggagagactgagacaggagcaggagcaccacggcgccgcccccacctgcaccagcctgagcaccagaaagaacagcaagaacgacagcagcgtggccgacctggcccccaagggcaagagcgacgaggccccccccgagcacagcttcgtgctgaaggagcccgagatgagcaagggcaagggcaagtacagcggcagcgaggccggcagcctgagccacagcgagcagaacgccaccgtgcccgcccccagagtgctggagttcgaccacctgcccgacccccaggagggccccggcagcgacaccggcacccagcaggagggcgtgctgaaggacctgagaaccgtgatcccctaccaggagagcgagacccaggccgtgcccctgcccctgcccaagagagtggagatcatcgagtacacccacatcgtgaccagccccaaccacaccggccccggcagcgagatcgccaccagcgagaagagcggcgagcagggcctgagaaaggtgaacatggagaagagcgtgaccgtgctgtgcaccctggacgagaacctgaacagaaccctggaccccaaccaggtgagcctgcacccccaggtgctgcccctgccccacagcagcagccccgagcacaacagacccaccgaccaccccaccagcatcctgagcagccccgaggacagaggcagcagcctgagcaccgccctggagaccgccgcccccttcgtgagccacaccacccacctgctgagcgccagcctggactacctgcacccccagaccatggtgcacctggagggcttcaccgagcagagcagcaccaccgacgagcccagcgccgagcaggtgagctgggaggagagccaggagagccccctgagcagcggcagcgaggtgccctacaaggacagccagctgagcagcgccgacctgagcctgatcagcaagctgggcgacaacaccggcgagctgcaggagaagatggaccccctgcccgtggcctgcagactgccccacagcagcagcagcgagaacatcaagagcctgagccacagccccggcgtggtgaaggagagagccaaggagatcgagagcagagtggtgttccaggccggcctgaccaagcccagccagatgagaagaagcgccagcctggccaagctgggctacctggacctgtgcaaggactgcctgcccgagagagagcccgccagctgcgagagcccccacctgaagctgctgcagcccttcctgagaaccgacagcggcatgcacgccatggaggaccaggagagcctggagaaccccggcgccccccacaaccccgagcccaccaagagcttcgtggagcagctgaccaccaccgagtgcatcgtgcagagcaagcccgtggagagacccctggtgcagtacgccaaggagttcggcagcagccagcagtacctgctgcccagagccggcctggagctgaccagcagcgagggcggcctgcccgtgctgcagacccagggcctgcagtgcgcctgccccgcccccggcctggccgtggcccccagacagcagcacggcagaacccaccccctgagaagactgaagaaggccaacgacaagaagagaaccaccaaccccttctacaacaccatgtag

SEQ ID NO: 99100 - DNA, 1980 bp, synthetic construct
  misc_feature 1..1980: note = Description of Artificial Sequence: Synthetic coding sequence
  source 1..1980: mol_type = other DNA
atggccctggtgaccgtgagcagaagcccccccggcagcggcgccagcacccccgtgggcccctgggaccaggccgtgcagagaagaagcagactgcagagaagacagagcttcgccgtgctgagaggcgccgtgctgggcctgcaggacggcggcgacaacgacgacgccgccgaggccagcagcgagcccaccgagaaggcccccagcgaggaggagctgcacggcgaccagaccgacttcggccagggcagccagagcccccagaagcaggaggagcagagacagcacctgcacctgatggtgcagctgctgagaccccaggacgacatcagactggccgcccagctggaggcccccagaccccccagactgagatacctgctggtggtgagcaccagagagggcgagggcctgagccaggacgagaccgtgctgctgggcgtggacttccccgacagcagcagccccagctgcaccctgggcctggtgctgcccctgtggagcgacacccaggtgtacctggacggcgacggcggcttcagcgtgaccagcggcggccagagcagaatcttcaagcccatcagcatccagaccatgtgggccaccctgcaggtgctgcaccaggcctgcgaggccgccctgggcagcggcctggtgcccggcggcagcgccctgacctgggccagccactaccaggagagactgaacagcgagcagagctgcctgaacgagtggaccgccatggccgacctggagagcctgagaccccccagcgccgagcccggcggcagcagcgagcaggagcagatggagcaggccatcagagccgagctgtggaaggtgctggacgtgagcgacctggagagcgtgaccagcaaggagatcagacaggccctggagctgagactgggcctgcccctgcagcagtacagagacttcatcgacaaccagatgctgctgctggtggcccagagagacagagccagcagaatcttcccccacctgtacctgggcagcgagtggaacgccgccaacctggaggagctgcagagaaacagagtgacccacatcctgaacatggccagagagatcgacaacttctaccccgagagattcacctaccacaacgtgagactgtgggacgaggagagcgcccagctgctgccccactggaaggagacccacagattcatcgaggccgccagagcccagggcacccacgtgctggtgcactgcaagatgggcgtgagcagaagcgccgccaccgtgctggcctacgccatgaagcagtacgagtgcagcctggagcaggccctgagacacgtgcaggagctgagacccatcgccagacccaaccccggcttcctgagacagctgcagatctaccagggcatcctgaccgccagcagacagagccacgtgtgggagcagaaggtgggcggcgtgagccccgaggagcaccccgcccccgaggtgagcacccccttcccccccctgccccccgagcccgagggcggcggcgaggagaaggtggtgggcatggaggagagccaggccgcccccaaggaggagcccggccccagacccagaatcaacctgagaggcgtgatgagaagcatcagcctgctggagcccagcctggagctggagagcaccagcgagaccagcgacatgcccgaggtgttcagcagccacgagagcagccacgaggagcccctgcagcccttcccccagctggccagaaccaagggcggccagcaggtggacagaggcccccagcccgccctgaagagcagacagagcgtggtgaccctgcagggcagcgccgtggtggccaacagaacccaggccttccaggagcaggagcagggccagggccagggccagggcgagccctgcatcagcagcacccccagattcagaaaggtggtgagacaggccagcgtgcacgacagcggcgaggagggcgaggcctag

SEQ ID NO: 99101 - DNA, 2091 bp, synthetic construct
  misc_feature 1..2091: note = Description of Artificial Sequence: Synthetic coding sequence
  source 1..2091: mol_type = other DNA
atgctgctgtggatcctgctgctggagaccagcctgtgcttcgccgccggcaacgtgaccggcgacgtgtgcaaggagaagatctgcagctgcaacgagatcgagggcgacctgcacgtggactgcgagaagaagggcttcaccagcctgcagagattcaccgcccccaccagccagttctaccacctgttcctgcacggcaacagcctgaccagactgttccccaacgagttcgccaacttctacaacgccgtgagcctgcacatggagaacaacggcctgcacgagatcgtgcccggcgccttcctgggcctgcagctggtgaagagactgcacatcaacaacaacaagatcaagagcttcagaaagcagaccttcctgggcctggacgacctggagtacctgcaggccgacttcaacctgctgagagacatcgaccccggcgccttccaggacctgaacaagctggaggtgctgatcctgaacgacaacctgatcagcaccctgcccgccaacgtgttccagtacgtgcccatcacccacctggacctgagaggcaacagactgaagaccctgccctacgaggaggtgctggagcagatccccggcatcgccgagatcctgctggaggacaacccctgggactgcacctgcgacctgctgagcctgaaggagtggctggagaacatccccaagaacgccctgatcggcagagtggtgtgcgaggcccccaccagactgcagggcaaggacctgaacgagaccaccgagcaggacctgtgccccctgaagaacagagtggacagcagcctgcccgccccccccgcccaggaggagaccttcgcccccggccccctgcccacccccttcaagaccaacggccaggaggaccacgccacccccggcagcgcccccaacggcggcaccaagatccccggcaactggcagatcaagatcagacccaccgccgccatcgccaccggcagcagcagaaacaagcccctggccaacagcctgccctgccccggcggctgcagctgcgaccacatccccggcagcggcctgaagatgaactgcaacaacagaaacgtgagcagcctggccgacctgaagcccaagctgagcaacgtgcaggagctgttcctgagagacaacaagatccacagcatcagaaagagccacttcgtggactacaagaacctgatcctgctggacctgggcaacaacaacatcgccaccgtggagaacaacaccttcaagaacctgctggacctgagatggctgtacatggacagcaactacctggacaccctgagcagagagaagttcgccggcctgcagaacctggagtacctgaacgtggagtacaacgccatccagctgatcctgcccggcaccttcaacgccatgcccaagctgagaatcctgatcctgaacaacaacctgctgagaagcctgcccgtggacgtgttcgccggcgtgagcctgagcaagctgagcctgcacaacaactacttcatgtacctgcccgtggccggcgtgctggaccagctgaccagcatcatccagatcgacctgcacggcaacccctgggagtgcagctgcaccatcgtgcccttcaagcagtgggccgagagactgggcagcgaggtgctgatgagcgacctgaagtgcgagacccccgtgaacttcttcagaaaggacttcatgctgctgagcaacgacgagatctgcccccagctgtacgccagaatcagccccaccctgaccagccacagcaagaacagcaccggcctggccgagaccggcacccacagcaacagctacctggacaccagcagagtgagcatcagcgtgctggtgcccggcctgctgctggtgttcgtgaccagcgccttcaccgtggtgggcatgctggtgttcatcctgagaaacagaaagagaagcaagagaagagacgccaacagcagcgccagcgagatcaacagcctgcagaccgtgtgcgacagcagctactggcacaacggcccctacaacgccgacggcgcccacagagtgtacgactgcggcagccacagcctgagcgactag

SEQ ID NO: 99102 - DNA, 2175 bp, synthetic construct
  misc_feature 1..2175: note = Description of Artificial Sequence: Synthetic coding sequence
  source 1..2175: mol_type = other DNA
atgctgagcggcgtgtggttcctgagcgtgctgaccgtggccggcatcctgcagaccgagagcagaaagaccgccaaggacatctgcaagatcagatgcctgtgcgaggagaaggagaacgtgctgaacatcaactgcgagaacaagggcttcaccaccgtgagcctgctgcagcccccccagtacagaatctaccagctgttcctgaacggcaacctgctgaccagactgtaccccaacgagttcgtgaactacagcaacgccgtgaccctgcacctgggcaacaacggcctgcaggagatcagaaccggcgccttcagcggcctgaagaccctgaagagactgcacctgaacaacaacaagctggagatcctgagagaggacaccttcctgggcctggagagcctggagtacctgcaggccgactacaactacatcagcgccatcgaggccggcgccttcagcaagctgaacaagctgaaggtgctgatcctgaacgacaacctgctgctgagcctgcccagcaacgtgttcagattcgtgctgctgacccacctggacctgagaggcaacagactgaaggtgatgcccttcgccggcgtgctggagcacatcggcggcatcatggagatccagctggaggagaacccctggaactgcacctgcgacctgctgcccctgaaggcctggctggacaccatcaccgtgttcgtgggcgagatcgtgtgcgagacccccttcagactgcacggcaaggacgtgacccagctgaccagacaggacctgtgccccagaaagagcgccagcgacagcagccagagaggcagccacgccgacacccacgtgcagagactgagccccaccatgaaccccgccctgaaccccaccagagcccccaaggccagcagaccccccaagatgagaaacagacccacccccagagtgaccgtgagcaaggacagacagagcttcggccccatcatggtgtaccagaccaagagccccgtgcccctgacctgccccagcagctgcgtgtgcaccagccagagcagcgacaacggcctgaacgtgaactgccaggagagaaagttcaccaacatcagcgacctgcagcccaagcccaccagccccaagaagctgtacctgaccggcaactacctgcagaccgtgtacaagaacgacctgctggagtacagcagcctggacctgctgcacctgggcaacaacagaatcgccgtgatccaggagggcgccttcaccaacctgaccagcctgagaagactgtacctgaacggcaactacctggaggtgctgtaccccagcatgttcgacggcctgcagagcctgcagtacctgtacctggagtacaacgtgatcaaggagatcaagcccctgaccttcgacgccctgatcaacctgcagctgctgttcctgaacaacaacctgctgagaagcctgcccgacaacatcttcggcggcaccgccctgaccagactgaacctgagaaacaaccacttcagccacctgcccgtgaagggcgtgctggaccagctgcccgccttcatccagatcgacctgcaggagaacccctgggactgcacctgcgacatcatgggcctgaaggactggaccgagcacgccaacagccccgtgatcatcaacgaggtgacctgcgagagccccgccaagcacgccggcgagatcctgaagttcctgggcagagaggccatctgccccgacagccccaacctgagcgacggcaccgtgctgagcatgaaccacaacaccgacacccccagaagcctgagcgtgagccccagcagctaccccgagctgcacaccgaggtgcccctgagcgtgctgatcctgggcctgctggtggtgttcatcctgagcgtgtgcttcggcgccggcctgttcgtgttcgtgctgaagagaagaaagggcgtgcccagcgtgcccagaaacaccaacaacctggacgtgagcagcttccagctgcagtacggcagctacaacaccgagacccacgacaagaccgacggccacgtgtacaactacatccccccccccgtgggccagatgtgccagaaccccatctacatgcagaaggagggcgaccccgtggcctactacagaaacctgcaggagttcagctacagcaacctggagtag

SEQ ID NO: 99103 - DNA, 2538 bp, synthetic construct
  misc_feature 1..2538: note = Description of Artificial Sequence: Synthetic coding sequence
  source 1..2538: mol_type = other DNA
atgctgagcggcgtgtggttcctgagcgtgctgaccgtggccggcatcctgcagaccgagagcagaaagaccgccaaggacatctgcaagatcagatgcctgtgcgaggagaaggagaacgtgctgaacatcaactgcgagaacaagggcttcaccaccgtgagcctgctgcagcccccccagtacagaatctaccagctgttcctgaacggcaacctgctgaccagactgtaccccaacgagttcgtgaactacagcaacgccgtgaccctgcacctgggcaacaacggcctgcaggagatcagaaccggcgccttcagcggcctgaagaccctgaagagactgcacctgaacaacaacaagctggagatcctgagagaggacaccttcctgggcctggagagcctggagtacctgcaggccgactacaactacatcagcgccatcgaggccggcgccttcagcaagctgaacaagctgaaggtgctgatcctgaacgacaacctgctgctgagcctgcccagcaacgtgttcagattcgtgctgctgacccacctggacctgagaggcaacagactgaaggtgatgcccttcgccggcgtgctggagcacatcggcggcatcatggagatccagctggaggagaacccctggaactgcacctgcgacctgctgcccctgaaggcctggctggacaccatcaccgtgttcgtgggcgagatcgtgtgcgagacccccttcagactgcacggcaaggacgtgacccagctgaccagacaggacctgtgccccagaaagagcgccagcgacagcagccagagaggcagccacgccgacacccacgtgcagagactgagccccaccatgaaccccgccctgaaccccaccagagcccccaaggccagcagaccccccaagatgagaaacagacccacccccagagtgaccgtgagcaaggacagacagagcttcggccccatcatggtgtaccagaccaagagccccgtgcccctgacctgccccagcagctgcgtgtgcaccagccagagcagcgacaacggcctgaacgtgaactgccaggagagaaagttcaccaacatcagcgacctgcagcccaagcccaccagccccaagaagctgtacctgaccggcaactacctgcagaccgtgtacaagaacgacctgctggagtacagcagcctggacctgctgcacctgggcaacaacagaatcgccgtgatccaggagggcgccttcaccaacctgaccagcctgagaagactgtacctgaacggcaactacctggaggtgctgtaccccagcatgttcgacggcctgcagagcctgcagtacctgtacctggagtacaacgtgatcaaggagatcaagcccctgaccttcgacgccctgatcaacctgcagctgctgttcctgaacaacaacctgctgagaagcctgcccgacaacatcttcggcggcaccgccctgaccagactgaacctgagaaacaaccacttcagccacctgcccgtgaagggcgtgctggaccagctgcccgccttcatccagatcgacctgcaggagaacccctgggactgcacctgcgacatcatgggcctgaaggactggaccgagcacgccaacagccccgtgatcatcaacgaggtgacctgcgagagccccgccaagcacgccggcgagatcctgaagttcctgggcagagaggccatctgccccgacagccccaacctgagcgacggcaccgtgctgagcatgaaccacaacaccgacacccccagaagcctgagcgtgagccccagcagctaccccgagctgcacaccgaggtgcccctgagcgtgctgatcctgggcctgctggtggtgttcatcctgagcgtgtgcttcggcgccggcctgttcgtgttcgtgctgaagagaagaaagggcgtgcccagcgtgcccagaaacaccaacaacctggacgtgagcagcttccagctgcagtacggcagctacaacaccgagacccacgacaagaccgacggccacgtgtacaactacatccccccccccgtgggccagatgtgccagaaccccatctacatgcagaaggagggcgaccccgtggcctactacagaaacctgcaggagttcagctacagcaacctggaggagaagaaggaggagcccgccacccccgcctacaccatcagcgccaccgagctgctggagaagcaggccacccccagagagcccgagctgctgtaccagaacatcgccgagagagtgaaggagctgcccagcgccggcctggtgcactacaacttctgcaccctgcccaagagacagttcgcccccagctacgagagcagaagacagaaccaggacagaatcaacaagaccgtgctgtacggcacccccagaaagtgcttcgtgggccagagcaagcccaaccaccccctgctgcaggccaagccccagagcgagcccgactacctggaggtgctggagaagcagaccgccatcagccagctgtag

SEQ ID NO: 99104 - DNA, 2538 bp, synthetic construct; identical to SEQ ID NO: 99103
  misc_feature 1..2538: note = Description of Artificial Sequence: Synthetic coding sequence
  source 1..2538: mol_type = other DNA

SEQ ID NO: 99105 - DNA, 2538 bp, synthetic construct; identical to SEQ ID NO: 99103
  misc_feature 1..2538: note = Description of Artificial Sequence: Synthetic coding sequence
  source 1..2538: mol_type = other DNA

SEQ ID NO: 99106 - DNA, 2538 bp, synthetic construct; identical to SEQ ID NO: 99103
  misc_feature 1..2538: note = Description of Artificial Sequence: Synthetic coding sequence
  source 1..2538: mol_type = other DNA

SEQ ID NO: 99107 - DNA, 2538 bp, synthetic construct; identical to SEQ ID NO: 99103
  misc_feature 1..2538: note = Description of Artificial Sequence: Synthetic coding sequence
  source 1..2538: mol_type = other DNA

SEQ ID NO: 99108 - DNA, 2934 bp, synthetic construct
  misc_feature 1..2934: note = Description of Artificial Sequence: Synthetic coding sequence
  source 1..2934: mol_type = other DNA
atgaagcccagcatcgccgagatgctgcacagaggcagaatgctgtggatcatcctgctgagcaccatcgccctgggctggaccacccccatccccctgatcgaggacagcgaggagatcgacgagccctgcttcgacccctgctactgcgaggtgaaggagagcctgttccacatccactgcgacagcaagggcttcaccaacatcagccagatcaccgagttctggagcagacccttcaagctgtacctgcagagaaacagcatgagaaagctgtacaccaacagcttcctgcacctgaacaacgccgtgagcatcaacctgggcaacaacgccctgcaggacatccagaccggcgccttcaacggcctgaagatcctgaagagactgtacctgcacgagaacaagctggacgtgttcagaaacgacaccttcctgggcctggagagcctggagtacctgcaggccgactacaacgtgatcaagagaatcgagagcggcgccttcagaaacctgagcaagctgagagtgctgatcctgaacgacaacctgatccccatgctgcccaccaacctgttcaaggccgtgagcctgacccacctggacctgagaggcaacagactgaaggtgctgttctacagaggcatgctggaccacatcggcagaagcctgatggagctgcagctggaggagaacccctggaactgcacctgcgagatcgtgcagctgaagagctggctggagagaatcccctacaccgccctggtgggcgacatcacctgcgagacccccttccacttccacggcaaggacctgagagagatcagaaagaccgagctgtgccccctgctgagcgacagcgaggtggaggccagcctgggcatcccccacagcagcagcagcaaggagaacgcctggcccaccaagcccagcagcatgctgagcagcgtgcacttcaccgccagcagcgtggagtacaagagcagcaacaagcagcccaagcccaccaagcagcccagaacccccagaccccccagcaccagccaggccctgtaccccggccccaaccagccccccatcgccccctaccagaccagaccccccatccccatcatctgccccaccggctgcacctgcaacctgcacatcaacgacctgggcctgaccgtgaactgcaaggagagaggcttcaacaacatcagcgagctgctgcccagacccctgaacgccaagaagctgtacctgagcagcaacctgatccagaagatctacagaagcgacttctggaacttcagcagcctggacctgctgcacctgggcaacaacagaatcagctacgtgcaggacggcgccttcatcaacctgcccaacctgaagagcctgttcctgaacggcaacgacatcgagaagctgacccccggcatgttcagaggcctgcagagcctgcactacctgtacttcgagttcaacgtgatcagagagatccagcccgccgccttcagcctgatgcccaacctgaagctgctgttcctgaacaacaacctgctgagaaccctgcccaccgacgccttcgccggcaccagcctggccagactgaacctgagaaagaactacttcctgtacctgcccgtggccggcgtgctggagcacctgaacgccatcgtgcagatcgacctgaacgagaacccctgggactgcacctgcgacctggtgcccttcaagcagtggatcgagaccatcagcagcgtgagcgtggtgggcgacgtgctgtgcagaagccccgagaacctgacccacagagacgtgagaaccatcgagctggaggtgctgtgccccgagatgctgcacgtggcccccgccggcgagagccccgcccagcccggcgacagccacctgatcggcgcccccaccagcgccagcccctacgagttcagcccccccggcggccccgtgcccctgagcgtgctgatcctgagcctgctggtgctgttcttcagcgccgtgttcgtggccgccggcctgttcgcctacgtgctgagaagaagaagaaagaagctgcccttcagaagcaagagacaggagggcgtggacctgaccggcatccagatgcagtgccacagactgttcgaggacggcggcggcggcggcggcggcagcggcggcggcggcagacccaccctgagcagccccgagaaggccccccccgtgggccacgtgtacgagtacatcccccaccccgtgacccagatgtgcaacaaccccatctacaagcccagagaggaggaggaggtggccgtgagcagcgcccaggaggccggcagcgccgagagaggcggccccggcacccagccccccggcatgggcgaggccctgctgggcagcgagcagttcgccgagacccccaaggagaaccacagcaactacagaaccctgctggagaaggagaaggagtgggccctggccgtgagcagcagccagctgaacaccatcgtgaccgtgaaccaccaccacccccaccaccccgccgtgggcggcgtgagcggcgtggtgggcggcaccggcggcgacctggccggcttcagacaccacgagaagaacggcggcgtggtgctgttcccccccggcggcggctgcggcagcggcagcatgctgctggacagagagagaccccagcccgccccctgcaccgtgggcttcgtggactgcctgtacggcaccgtgcccaagctgaaggagctgcacgtgcacccccccggcatgcagtaccccgacctgcagcaggacgccagactgaaggagaccctgctgttcagcgccggcaagggcttcaccgaccaccagacccagaagagcgactacctggagctgagagccaagctgcagaccaagcccgactacctggaggtgctggagaagaccacctacagattctag

SEQ ID NO: 99109 - DNA, 2934 bp, synthetic construct; identical to SEQ ID NO: 99108
  misc_feature 1..2934: note = Description of Artificial Sequence: Synthetic coding sequence
  source 1..2934: mol_type = other DNA

SEQ ID NO: 99110 - DNA, 492 bp, synthetic construct
  misc_feature 1..492: note = Description of Artificial Sequence: Synthetic coding sequence
  source 1..492: mol_type = other DNA
atgaagcccagcatcgccgagatgctgcacagaggcagaatgctgtggatcatcctgctgagcaccatcgccctgggctggaccacccccatccccctgatcgaggacagcgaggagatcgacgagccctgcttcgacccctgctactgcgaggtgaaggagagcctgttccacatccactgcgacagcaagggcttcaccaacatcagccagatcaccgagttctggagcagacccttcaagctgtacctgcagagaaacagcatgagaaagctgtacaccaacagcttcctgcacctgaacaacgccgtgagcatcaacctgggcaacaacgccctgcaggacatccagaccggcgccttcaacggcctgaagatcctgaagagactgtacctgcacgagaacaagctggacgtgttcagaaacgacaccttcctgggcctggagagcctggagtacctgcaggccgactacaacgtgatcaagagatag

SEQ ID NO: 99111 - DNA, 2514 bp, synthetic construct
  misc_feature 1..2514: note = Description of Artificial Sequence: Synthetic coding sequence
  source 1..2514: mol_type = other DNA
atgttcctgtggctgttcctgatcctgagcgccctgatcagcagcaccaacgccgacagcgacatcagcgtggagatctgcaacgtgtgcagctgcgtgagcgtggagaacgtgctgtacgtgaactgcgagaaggtgagcgtgtacagacccaaccagctgaagcccccctggagcaacttctaccacctgaacttccagaacaacttcctgaacatcctgtaccccaacaccttcctgaacttcagccacgccgtgagcctgcacctgggcaacaacaagctgcagaacatcgagggcggcgccttcctgggcctgagcgccctgaagcagctgcacctgaacaacaacgagctgaagatcctgagagccgacaccttcctgggcatcgagaacctggagtacctgcaggccgactacaacctgatcaagtacatcgagagaggcgccttcaacaagctgcacaagctgaaggtgctgatcctgaacgacaacctgatcagcttcctgcccgacaacatcttcagattcgccagcctgacccacctggacatcagaggcaacagaatccagaagctgccctacatcggcgtgctggagcacatcggcagagtggtggagctgcagctggaggacaacccctggaactgcagctgcgacctgctgcccctgaaggcctggctggagaacatgccctacaacatctacatcggcgaggccatctgcgagacccccagcgacctgtacggcagactgctgaaggagaccaacaagcaggagctgtgccccatgggcaccggcagcgacttcgacgtgagaatcctgccccccagccagctggagaacggctacaccacccccaacggccacaccacccagaccagcctgcacagactggtgaccaagccccccaagaccaccaaccccagcaagatcagcggcatcgtggccggcaaggccctgagcaacagaaacctgagccagatcgtgagctaccagaccagagtgccccccctgaccccctgccccgccccctgcttctgcaagacccaccccagcgacctgggcctgagcgtgaactgccaggagaagaacatccagagcatgagcgagctgatccccaagcccctgaacgccaagaagctgcacgtgaacggcaacagcatcaaggacgtggacgtgagcgacttcaccgacttcgagggcctggacctgctgcacctgggcagcaaccagatcaccgtgatcaagggcgacgtgttccacaacctgaccaacctgagaagactgtacctgaacggcaaccagatcgagagactgtaccccgagatcttcagcggcctgcacaacctgcagtacctgtacctggagtacaacctgatcaaggagatcagcgccggcaccttcgacagcatgcccaacctgcagctgctgtacctgaacaacaacctgctgaagagcctgcccgtgtacatcttcagcggcgcccccctggccagactgaacctgagaaacaacaagttcatgtacctgcccgtgagcggcgtgctggaccagctgcagagcctgacccagatcgacctggagggcaacccctgggactgcacctgcgacctggtggccctgaagctgtgggtggagaagctgagcgacggcatcgtggtgaaggagctgaagtgcgagacccccgtgcagttcgccaacatcgagctgaagagcctgaagaacgagatcctgtgccccaagctgctgaacaagcccagcgcccccttcaccagccccgcccccgccatcaccttcaccacccccctgggccccatcagaagcccccccggcggccccgtgcccctgagcatcctgatcctgagcatcctggtggtgctgatcctgaccgtgttcgtggccttctgcctgctggtgttcgtgctgagaagaaacaagaagcccaccgtgaagcacgagggcctgggcaaccccgactgcggcagcatgcagctgcagctgagaaagcacgaccacaagaccaacaagaaggacggcctgagcaccgaggccttcatcccccagaccatcgagcagatgagcaagagccacacctgcggcctgaaggagagcgagaccggcttcatgttcagcgacccccccggccagaaggtggtgatgagaaacgtggccgacaaggagaaggacctgctgcacgtggacaccagaaagagactgagcaccatcgacgagctggacgagctgttccccagcagagacagcaacgtgttcatccagaacttcctggagagcaagaaggagtacaacagcatcggcgtgagcggcttcgagatcagataccccgagaagcagcccgacaagaagagcaagaagagcctgatcggcggcaaccacagcaagatcgtggtggagcagagaaagagcgagtacttcgagctgaaggccaagctgcagagcagccccgactacctgcaggtgctggaggagcagaccgccctgaacaagatctag

SEQ ID NO: 99112 - DNA, 2514 bp, synthetic construct; identical to SEQ ID NO: 99111
  misc_feature 1..2514: note = Description of Artificial Sequence: Synthetic coding sequence
  source 1..2514: mol_type = other DNA

SEQ ID NO: 99113 - DNA, 2514 bp, synthetic construct; identical to SEQ ID NO: 99111
  misc_feature 1..2514: note = Description of Artificial Sequence: Synthetic coding sequence
  source 1..2514: mol_type = other DNA

SEQ ID NO: 99114 - DNA, 2877 bp, synthetic construct
  misc_feature 1..2877: note = Description of Artificial Sequence: Synthetic coding sequence
  source 1..2877: mol_type = other DNA
atgcacacctgctgcccccccgtgaccctggagcaggacctgcacagaaagatgcacagctggatgctgcagaccctggccttcgccgtgaccagcctggtgctgagctgcgccgagaccatcgactactacggcgagatctgcgacaacgcctgcccctgcgaggagaaggacggcatcctgaccgtgagctgcgagaacagaggcatcatcagcctgagcgagatcagcccccccagattccccatctaccacctgctgctgagcggcaacctgctgaacagactgtaccccaacgagttcgtgaactacaccggcgccagcatcctgcacctgggcagcaacgtgatccaggacatcgagaccggcgccttccacggcctgagaggcctgagaagactgcacctgaacaacaacaagctggagctgctgagagacgacaccttcctgggcctggagaacctggagtacctgcaggtggactacaactacatcagcgtgatcgagcccaacgccttcggcaagctgcacctgctgcaggtgctgatcctgaacgacaacctgctgagcagcctgcccaacaacctgttcagattcgtgcccctgacccacctggacctgagaggcaacagactgaagctgctgccctacgtgggcctgctgcagcacatggacaaggtggtggagctgcagctggaggagaacccctggaactgcagctgcgagctgatcagcctgaaggactggctggacagcatcagctacagcgccctggtgggcgacgtggtgtgcgagacccccttcagactgcacggcagagacctggacgaggtgagcaagcaggagctgtgccccagaagactgatcagcgactacgagatgagaccccagacccccctgagcaccaccggctacctgcacaccacccccgccagcgtgaacagcgtggccaccagcagcagcgccgtgtacaagccccccctgaagccccccaagggcaccagacagcccaacaagcccagagtgagacccaccagcagacagcccagcaaggacctgggctacagcaactacggccccagcatcgcctaccagaccaagagccccgtgcccctggagtgccccaccgcctgcagctgcaacctgcagatcagcgacctgggcctgaacgtgaactgccaggagagaaagatcgagagcatcgccgagctgcagcccaagccctacaaccccaagaagatgtacctgaccgagaactacatcgccgtggtgagaagaaccgacttcctggaggccaccggcctggacctgctgcacctgggcaacaacagaatcagcatgatccaggacagagccttcggcgacctgaccaacctgagaagactgtacctgaacggcaacagaatcgagagactgagccccgagctgttctacggcctgcagagcctgcagtacctgttcctgcagtacaacctgatcagagagatccagagcggcaccttcgaccccgtgcccaacctgcagctgctgttcctgaacaacaacctgctgcaggccatgcccagcggcgtgttcagcggcctgaccctgctgagactgaacctgagaagcaaccacttcaccagcctgcccgtgagcggcgtgctggaccagctgaagagcctgatccagatcgacctgcacgacaacccctgggactgcacctgcgacatcgtgggcatgaagctgtgggtggagcagctgaaggtgggcgtgctggtggacgaggtgatctgcaaggcccccaagaagttcgccgagaccgacatgagaagcatcaagagcgagctgctgtgccccgactacagcgacgtggtggtgagcacccccacccccagcagcatccaggtgcccgccagaaccagcgccgtgacccccgccgtgagactgaacagcaccggcgcccccgccagcctgggcgccggcggcggcgccagcagcgtgcccctgagcgtgctgatcctgagcctgctgctggtgttcatcatgagcgtgttcgtggccgccggcctgttcgtgctggtgatgaagagaagaaagaagaaccagagcgaccacaccagcaccaacaacagcgacgtgagcagcttcaacatgcagtacagcgtgtacggcggcggcggcggcaccggcggccacccccacgcccacgtgcaccacagaggccccgccctgcccaaggtgaagacccccgccggccacgtgtacgagtacatcccccaccccctgggccacatgtgcaagaaccccatctacagaagcagagagggcaacagcgtggaggactacaaggacctgcacgagctgaaggtgacctacagcagcaaccaccacctgcagcagcagcagcagccccccccccccccccagcagccccagcagcagccccccccccagctgcagctgcagcccggcgaggaggagagaagagagagccaccacctgagaagccccgcctacagcgtgagcaccatcgagcccagagaggacctgctgagccccgtgcaggacgccgacagattctacagaggcatcctggagcccgacaagcactgcagcaccacccccgccggcaacagcctgcccgagtaccccaagttcccctgcagccccgccgcctacaccttcagccccaactacgacctgagaagaccccaccagtacctgcaccccggcgccggcgacagcagactgagagagcccgtgctgtacagcccccccagcgccgtgttcgtggagcccaacagaaacgagtacctggagctgaaggccaagctgaacgtggagcccgactacctggaggtgctggagaagcagaccaccttcagccagttctag

SEQ ID NO: 99115 - DNA, 2154 bp, synthetic construct
  misc_feature 1..2154: note = Description of Artificial Sequence: Synthetic coding sequence
  source 1..2154: mol_type = other DNA
atgggcgccggcaagcacagagagggcggcggcggcgaccccaccagcctgaacggctgcgccgacctgatccagagaagaaccgagatcagcagagacctggacgaggtgagcaagcaggagctgtgccccagaagactgatcagcgactacgagatgagaccccagacccccctgagcaccaccggctacctgcacaccacccccgccagcgtgaacagcgtggccaccagcagcagcgccgtgtacaagccccccctgaagccccccaagggcaccagacagcccaacaagcccagagtgagacccaccagcagacagcccagcaaggacctgggctacagcaactacggccccagcatcgcctaccagaccaagagccccgtgcccctggagtgccccaccgcctgcagctgcaacctgcagatcagcgacctgggcctgaacgtgaactgccaggagagaaagatcgagagcatcgccgagctgcagcccaagccctacaaccccaagaagatgtacctgaccgagaactacatcgccgtggtgagaagaaccgacttcctggaggccaccggcctggacctgctgcacctgggcaacaacagaatcagcatgatccaggacagagccttcggcgacctgaccaacctgagaagactgtacctgaacggcaacagaatcgagagactgagccccgagctgttctacggcctgcagagcctgcagtacctgttcctgcagtacaacctgatcagagagatccagagcggcaccttcgaccccgtgcccaacctgcagctgctgttcctgaacaacaacctgctgcaggccatgcccagcggcgtgttcagcggcctgaccctgctgagactgaacctgagaagcaaccacttcaccagcctgcccgtgagcggcgtgctggaccagctgaagagcctgatccagatcgacctgcacgacaacccctgggactgcacctgcgacatcgtgggcatgaagctgtgggtggagcagctgaaggtgggcgtgctggtggacgaggtgatctgcaaggcccccaagaagttcgccgagaccgacatgagaagcatcaagagcgagctgctgtgccccgactacagcgacgtggtggtgagcacccccacccccagcagcatccaggtgcccgccagaaccagcgccgtgacccccgccgtgagactgaacagcaccggcgcccccgccagcctgggcgccggcggcggcgccagcagcgtgcccctgagcgtgctgatcctgagcctgctgctggtgttcatcatgagcgtgttcgtggccgccggcctgttcgtgctggtgatgaagagaagaaagaagaaccagagcgaccacaccagcaccaacaacagcgacgtgagcagcttcaacatgcagtacagcgtgtacggcggcggcggcggcaccggcggccacccccacgcccacgtgcaccacagaggccccgccctgcccaaggtgaagacccccgccggccacgtgtacgagtacatcccccaccccctgggccacatgtgcaagaaccccatctacagaagcagagagggcaacagcgtggaggactacaaggacctgcacgagctgaaggtgacctacagcagcaaccaccacctgcagcagcagcagcagccccccccccccccccagcagccccagcagcagccccccccccagctgcagctgcagcccggcgaggaggagagaagagagagccaccacctgagaagccccgcctacagcgtgagcaccatcgagcccagagaggacctgctgagccccgtgcaggacgccgacagattctacagaggcatcctggagcccgacaagcactgcagcaccacccccgccggcaacagcctgcccgagtaccccaagttcccctgcagccccgccgcctacaccttcagccccaactacgacctgagaagaccccaccagtacctgcaccccggcgccggcgacagcagactgagagagcccgtgctgtacagcccccccagcgccgtgttcgtggagcccaacagaaacgagtacctggagctgaaggccaagctgaacgtggagcccgactacctggaggtgctggagaagcagaccaccttcagccagttctag

SEQ ID NO: 99116 - DNA, 2526 bp, synthetic construct
  misc_feature 1..2526: note = Description of Artificial Sequence: Synthetic coding sequence
  source 1..2526: mol_type = other DNA
atgaagctgtggatccacctgttctacagcagcctgctggcctgcatcagcctgcacagccagacccccgtgctgagcagcagaggcagctgcgacagcctgtgcaactgcgaggagaaggacggcaccatgctgatcaactgcgaggccaagggcatcaagatggtgagcgagatcagcgtgccccccagcagacccttccagctgagcctgctgaacaacggcctgaccatgctgcacaccaacgacttcagcggcctgaccaacgccatcagcatccacctgggcttcaacaacatcgccgacatcgagatcggcgccttcaacggcctgggcctgctgaagcagctgcacatcaaccacaacagcctggagatcctgaaggaggacaccttccacggcctggagaacctggagttcctgcaggccgacaacaacttcatcaccgtgatcgagcccagcgccttcagcaagctgaacagactgaaggtgctgatcctgaacgacaacgccatcgagagcctgccccccaacatcttcagattcgtgcccctgacccacctggacctgagaggcaaccagctgcagaccctgccctacgtgggcttcctggagcacatcggcagaatcctggacctgcagctggaggacaacaagtgggcctgcaactgcgacctgctgcagctgaagacctggctggagaacatgcccccccagagcatcatcggcgacgtggtgtgcaacagcccccccttcttcaagggcagcatcctgagcagactgaagaaggagagcatctgccccaccccccccgtgtacgaggagcacgaggaccccagcggcagcctgcacctggccgccaccagcagcatcaacgacagcagaatgagcaccaagaccaccagcatcctgaagctgcccaccaaggcccccggcctgatcccctacatcaccaagcccagcacccagctgcccggcccctactgccccatcccctgcaactgcaaggtgctgagccccagcggcctgctgatccactgccaggagagaaacatcgagagcctgagcgacctgagaccccccccccagaaccccagaaagctgatcctggccggcaacatcatccacagcctgatgaagagcgacctggtggagtacttcaccctggagatgctgcacctgggcaacaacagaatcgaggtgctggaggagggcagcttcatgaacctgaccagactgcagaagctgtacctgaacggcaaccacctgaccaagctgagcaagggcatgttcctgggcctgcacaacctggagtacctgtacctggagtacaacgccatcaaggagatcctgcccggcaccttcaaccccatgcccaagctgaaggtgctgtacctgaacaacaacctgctgcaggtgctgcccccccacatcttcagcggcgtgcccctgaccaaggtgaacctgaagaccaaccagttcacccacctgcccgtgagcaacatcctggacgacctggacctgctgacccagatcgacctggaggacaacccctgggactgcagctgcgacctggtgggcctgcagcagtggatccagaagctgagcaagaacaccgtgaccgacgacatcctgtgcaccagccccggccacctggacaagaaggagctgaaggccctgaacagcgagatcctgtgccccggcctggtgaacaaccccagcatgcccacccagaccagctacctgatggtgaccacccccgccaccaccaccaacaccgccgacaccatcctgagaagcctgaccgacgccgtgcccctgagcgtgctgatcctgggcctgctgatcatgttcatcaccatcgtgttctgcgccgccggcatcgtggtgctggtgctgcacagaagaagaagatacaagaagaagcaggtggacgagcagatgagagacaacagccccgtgcacctgcagtacagcatgtacggccacaagaccacccaccacaccaccgagagacccagcgccagcctgtacgagcagcacatggtgagccccatggtgcacgtgtacagaagccccagcttcggccccaagcacctggaggaggaggaggagagaaacgagaaggagggcagcgacgccaagcacctgcagagaagcctgctggagcaggagaaccacagccccctgaccggcagcaacatgaagtacaagaccaccaaccagagcaccgagttcctgagcttccaggacgccagcagcctgtacagaaacatcctggagaaggagagagagctgcagcagctgggcatcaccgagtacctgagaaagaacatcgcccagctgcagcccgacatggaggcccactaccccggcgcccacgaggagctgaagctgatggagaccctgatgtacagcagacccagaaaggtgctggtggagcagaccaagaacgagtacttcgagctgaaggccaacctgcacgccgagcccgactacctggaggtgctggagcagcagacctag

SEQ ID NO: 99117 - DNA, 4578 bp, synthetic construct
  misc_feature 1..4578: note = Description of Artificial Sequence: Synthetic coding sequence
  source 1..4578: mol_type = other DNA
atgagaggcgtgggctggcagatgctgagcctgagcctgggcctggtgctggccatcctgaacaaggtggccccccaggcctgccccgcccagtgcagctgcagcggcagcaccgtggactgccacggcctggccctgagaagcgtgcccagaaacatccccagaaacaccgagagactggacctgaacggcaacaacatcaccagaatcaccaagaccgacttcgccggcctgagacacctgagagtgctgcagctgatggagaacaagatcagcaccatcgagagaggcgccttccaggacctgaaggagctggagagactgagactgaacagaaaccacctgcagctgttccccgagctgctgttcctgggcaccgccaagctgtacagactggacctgagcgagaaccagatccaggccatccccagaaaggccttcagaggcgccgtggacatcaagaacctgcagctggactacaaccagatcagctgcatcgaggacggcgccttcagagccctgagagacctggaggtgctgaccctgaacaacaacaacatcaccagactgagcgtggccagcttcaaccacatgcccaagctgagaaccttcagactgcacagcaacaacctgtactgcgactgccacctggcctggctgagcgactggctgagacagagacccagagtgggcctgtacacccagtgcatgggccccagccacctgagaggccacaacgtggccgaggtgcagaagagagagttcgtgtgcagcggcaagggcgagggccaccagagcttcatggcccccagctgcagcgtgctgcactgccccgccgcctgcacctgcagcaacaacatcgtggactgcagaggcaagggcctgaccgagatccccaccaacctgcccgagaccatcaccgagatcagactggagcagaacaccatcaaggtgatcccccccggcgccttcagcccctacaagaagctgagaagaatcgacctgagcaacaaccagatcagcgagctggcccccgacgccttccagggcctgagaagcctgaacagcctggtgctgtacggcaacaagatcaccgagctgcccaagagcctgttcgagggcctgttcagcctgcagctgctgctgctgaacgccaacaagatcaactgcctgagagtggacgccttccaggacctgcacaacctgaacctgctgagcctgtacgacaacaagctgcagaccatcgccaagggcaccttcagccccctgagagccatccagaccatgcacctggcccagaaccccttcatctgcgactgccacctgaagtggctggccgactacctgcacaccaaccccatcgagaccagcggcgccagatgcaccagccccagaagactggccaacaagagaatcggccagatcaagagcaagaagttcagatgcagcggcaccgaggactacagaagcaagctgagcggcgactgcttcgccgacctggcctgccccgagaagtgcagatgcgagggcaccaccgtggactgcagcaaccagaagctgaacaagatccccgagcacatcccccagtacaccgccgagctgagactgaacaacaacgagttcaccgtgctggaggccaccggcatcttcaagaagctgccccagctgagaaagatcaacttcagcaacaacaagatcaccgacatcgaggagggcgccttcgagggcgccagcggcgtgaacgagatcctgctgaccagcaacagactggagaacgtgcagcacaagatgttcaagggcctggagagcctgaagaccctgatgctgagaagcaacagaatcacctgcgtgggcaacgacagcttcatcggcctgagcagcgtgagactgctgagcctgtacgacaaccagatcaccaccgtggcccccggcgccttcgacaccctgcacagcctgagcaccctgaacctgctggccaaccccttcaactgcaactgctacctggcctggctgggcgagtggctgagaaagaagagaatcgtgaccggcaaccccagatgccagaagccctacttcctgaaggagatccccatccaggacgtggccatccaggacttcacctgcgacgacggcaacgacgacaacagctgcagccccctgagcagatgccccaccgagtgcacctgcctggacaccgtggtgagatgcagcaacaagggcctgaaggtgctgcccaagggcatccccagagacgtgaccgagctgtacctggacggcaaccagttcaccctggtgcccaaggagctgagcaactacaagcacctgaccctgatcgacctgagcaacaacagaatcagcaccctgagcaaccagagcttcagcaacatgacccagctgctgaccctgatcctgagctacaacagactgagatgcatcccccccagaaccttcgacggcctgaagagcctgagactgctgagcctgcacggcaacgacatcagcgtggtgcccgagggcgccttcaacgacctgagcgccctgagccacctggccatcggcgccaaccccctgtactgcgactgcaacatgcagtggctgagcgactgggtgaagagcgagtacaaggagcccggcatcgccagatgcgccggccccggcgagatggccgacaagctgctgctgaccacccccagcaagaagttcacctgccagggccccgtggacgtgaacatcctggccaagtgcaacccctgcctgagcaacccctgcaagaacgacggcacctgcaacagcgaccccgtggacttctacagatgcacctgcccctacggcttcaagggccaggactgcgacgtgcccatccacgcctgcatcagcaacccctgcaagcacggcggcacctgccacctgaaggagggcgaggaggacggcttctggtgcatctgcgccgacggcttcgagggcgagaactgcgaggtgaacgtggacgactgcgaggacaacgactgcgagaacaacagcacctgcgtggacggcatcaacaactacacctgcctgtgcccccccgagtacaccggcgagctgtgcgaggagaagctggacttctgcgcccaggacctgaacccctgccagcacgacagcaagtgcatcctgacccccaagggcttcaagtgcgactgcacccccggctacgtgggcgagcactgcgacatcgacttcgacgactgccaggacaacaagtgcaagaacggcgcccactgcaccgacgccgtgaacggctacacctgcatctgccccgagggctacagcggcctgttctgcgagttcagcccccccatggtgctgcccagaaccagcccctgcgacaacttcgactgccagaacggcgcccagtgcatcgtgagaatcaacgagcccatctgccagtgcctgcccggctaccagggcgagaagtgcgagaagctggtgagcgtgaacttcatcaacaaggagagctacctgcagatccccagcgccaaggtgagaccccagaccaacatcaccctgcagatcgccaccgacgaggacagcggcatcctgctgtacaagggcgacaaggaccacatcgccgtggagctgtacagaggcagagtgagagccagctacgacaccggcagccaccccgccagcgccatctacagcgtggagaccatcaacgacggcaacttccacatcgtggagctgctggccctggaccagagcctgagcctgagcgtggacggcggcaaccccaagatcatcaccaacctgagcaagcagagcaccctgaacttcgacagccccctgtacgtgggcggcatgcccggcaagagcaacgtggccagcctgagacaggcccccggccagaacggcaccagcttccacggctgcatcagaaacctgtacatcaacagcgagctgcaggacttccagaaggtgcccatgcagaccggcatcctgcccggctgcgagccctgccacaagaaggtgtgcgcccacggcacctgccagcccagcagccaggccggcttcacctgcgagtgccaggagggctggatgggccccctgtgcgaccagagaaccaacgacccctgcctgggcaacaagtgcgtgcacggcacctgcctgcccatcaacgccttcagctacagctgcaagtgcctggagggccacggcggcgtgctgtgcgacgaggaggaggacctgttcaacccctgccaggccatcaagtgcaagcacggcaagtgcagactgagcggcctgggccagccctactgcgagtgcagcagcggctacaccggcgacagctgcgacagagagatcagctgcagaggcgagagaatcagagactactaccagaagcagcagggctacgccgcctgccagaccaccaagaaggtgagcagactggagtgcagaggcggctgcgccggcggccagtgctgcggccccctgagaagcaagagaagaaagtacagcttcgagtgcaccgacggcagcagcttcgtggacgaggtggagaaggtggtgaagtgcggctgcaccagatgcgtgagctag

SEQ ID NO: 99118 - DNA, 4566 bp, synthetic construct
  misc_feature 1..4566: note = Description of Artificial Sequence: Synthetic coding sequence
  source 1..4566: mol_type = other DNA
atgagaggcgtgggctggcagatgctgagcctgagcctgggcctggtgctggccatcctgaacaaggtggccccccaggcctgccccgcccagtgcagctgcagcggcagcaccgtggactgccacggcctggccctgagaagcgtgcccagaaacatccccagaaacaccgagagactggacctgaacggcaacaacatcaccagaatcaccaagaccgacttcgccggcctgagacacctgagagtgctgcagctgatggagaacaagatcagcaccatcgagagaggcgccttccaggacctgaaggagctggagagactgagactgaacagaaaccacctgcagctgttccccgagctgctgttcctgggcaccgccaagctgtacagactggacctgagcgagaaccagatccaggccatccccagaaaggccttcagaggcgccgtggacatcaagaacctgcagctggactacaaccagatcagctgcatcgaggacggcgccttcagagccctgagagacctggaggtgctgaccctgaacaacaacaacatcaccagactgagcgtggccagcttcaaccacatgcccaagctgagaaccttcagactgcacagcaacaacctgtactgcgactgccacctggcctggctgagcgactggctgagacagagacccagagtgggcctgtacacccagtgcatgggccccagccacctgagaggccacaacgtggccgaggtgcagaagagagagttcgtgtgcagcggccaccagagcttcatggcccccagctgcagcgtgctgcactgccccgccgcctgcacctgcagcaacaacatcgtggactgcagaggcaagggcctgaccgagatccccaccaacctgcccgagaccatcaccgagatcagactggagcagaacaccatcaaggtgatcccccccggcgccttcagcccctacaagaagctgagaagaatcgacctgagcaacaaccagatcagcgagctggcccccgacgccttccagggcctgagaagcctgaacagcctggtgctgtacggcaacaagatcaccgagctgcccaagagcctgttcgagggcctgttcagcctgcagctgctgctgctgaacgccaacaagatcaactgcctgagagtggacgccttccaggacctgcacaacctgaacctgctgagcctgtacgacaacaagctgcagaccatcgccaagggcaccttcagccccctgagagccatccagaccatgcacctggcccagaaccccttcatctgcgactgccacctgaagtggctggccgactacctgcacaccaaccccatcgagaccagcggcgccagatgcaccagccccagaagactggccaacaagagaatcggccagatcaagagcaagaagttcagatgcagcggcaccgaggactacagaagcaagctgagcggcgactgcttcgccgacctggcctgccccgagaagtgcagatgcgagggcaccaccgtggactgcagcaaccagaagctgaacaagatccccgagcacatcccccagtacaccgccgagctgagactgaacaacaacgagttcaccgtgctggaggccaccggcatcttcaagaagctgccccagctgagaaagatcaacttcagcaacaacaagatcaccgacatcgaggagggcgccttcgagggcgccagcggcgtgaacgagatcctgctgaccagcaacagactggagaacgtgcagcacaagatgttcaagggcctggagagcctgaagaccctgatgctgagaagcaacagaatcacctgcgtgggcaacgacagcttcatcggcctgagcagcgtgagactgctgagcctgtacgacaaccagatcaccaccgtggcccccggcgccttcgacaccctgcacagcctgagcaccctgaacctgctggccaaccccttcaactgcaactgctacctggcctggctgggcgagtggctgagaaagaagagaatcgtgaccggcaaccccagatgccagaagccctacttcctgaaggagatccccatccaggacgtggccatccaggacttcacctgcgacgacggcaacgacgacaacagctgcagccccctgagcagatgccccaccgagtgcacctgcctggacaccgtggtgagatgcagcaacaagggcctgaaggtgctgcccaagggcatccccagagacgtgaccgagctgtacctggacggcaaccagttcaccctggtgcccaaggagctgagcaactacaagcacctgaccctgatcgacctgagcaacaacagaatcagcaccctgagcaaccagagcttcagcaacatgacccagctgctgaccctgatcctgagctacaacagactgagatgcatcccccccagaaccttcgacggcctgaagagcctgagactgctgagcctgcacggcaacgacatcagcgtggtgcccgagggcgccttcaacgacctgagcgccctgagccacctggccatcggcgccaaccccctgtactgcgactgcaacatgcagtggctgagcgactgggtgaagagcgagtacaaggagcccggcatcgccagatgcgccggccccggcgagatggccgacaagctgctgctgaccacccccagcaagaagttcacctgccagggccccgtggacgtgaacatcctggccaagtgcaacccctgcctgagcaacccctgcaagaacgacggcacctgcaacagcgaccccgtggacttctacagatgcacctgcccctacggcttcaagggccaggactgcgacgtgcccatccacgcctgcatcagcaacccctgcaagcacggcggcacctgccacctgaaggagggcgaggaggacggcttctggtgcatctgcgccgacggcttcgagggcgagaactgcgaggtgaacgtggacgactgcgaggacaacgactgcgagaacaacagcacctgcgtggacggcatcaacaactacacctgcctgtgcccccccgagtacaccggcgagctgtgcgaggagaagctggacttctgcgcccaggacctgaacccctgccagcacgacagcaagtgcatcctgacccccaagggcttcaagtgcgactgcacccccggctacgtgggcgagcactgcgacatcgacttcgacgactgccaggacaacaagtgcaagaacggcgcccactgcaccgacgccgtgaacggctacacctgcatctgccccgagggctacagcggcctgttctgcgagttcagcccccccatggtgctgcccagaaccagcccctgcgacaacttcgactgccagaacggcgcccagtgcatcgtgagaatcaacgagcccatctgccagtgcctgcccggctaccagggcgagaagtgcgagaagctggtgagcgtgaacttcatcaacaaggagagctacctgcagatccccagcgccaaggtgagaccccagaccaacatcaccctgcagatcgccaccgacgaggacagcggcatcctgctgtacaagggcgacaaggaccacatcgccgtggagctgtacagaggcagagtgagagccagctacgacaccggcagccaccccgccagcgccatctacagcgtggagaccatcaacgacggcaacttccacatcgtggagctgctggccctggaccagagcctgagcctgagcgtggacggcggcaaccccaagatcatcaccaacctgagcaagcagagcaccctgaacttcgacagccccctgtacgtgggcggcatgcccggcaagagcaacgtggccagcctgagacaggcccccggccagaacggcaccagcttccacggctgcatcagaaacctgtacatcaacagcgagctgcaggacttccagaaggtgcccatgcagaccggcatcctgcccggctgcgagccctgccacaagaaggtgtgcgcccacggcacctgccagcccagcagccaggccggcttcacctgcgagtgccaggagggctggatgggccccctgtgcgaccagagaaccaacgacccctgcctgggcaacaagtgcgtgcacggcacctgcctgcccatcaacgccttcagctacagctgcaagtgcctggagggccacggcggcgtgctgtgcgacgaggaggaggacctgttcaacccctgccaggccatcaagtgcaagcacggcaagtgcagactgagcggcctgggccagccctactgcgagtgcagcagcggctacaccggcgacagctgcgacagagagatcagctgcagaggcgagagaatcagagactactaccagaagcagcagggctacgccgcctgccagaccaccaagaaggtgagcagactggagtgcagaggcggctgcgccggcggccagtgctgcggccccctgagaagcaagagaagaaagtacagcttcgagtgcaccgacggcagcagcttcgtggacgaggtggagaaggtggtgaagtgcggctgcaccagatgcgtgagctag

SEQ ID NO: 99119 - DNA, 4578 bp, synthetic construct
  misc_feature 1..4578: note = Description of Artificial Sequence: Synthetic coding sequence
  source 1..4578: mol_type = other DNA
atgagaggcgtgggctggcagatgctgagcctgagcctgggcctggtgctggccatcctgaacaaggtggccccccaggcctgccccgcccagtgcagctgcagcggcagcaccgtggactgccacggcctggccctgagaagcgtgcccagaaacatccccagaaacaccgagagactggacctgaacggcaacaacatcaccagaatcaccaagaccgacttcgccggcctgagacacctgagagtgctgcagctgatggagaacaagatcagcaccatcgagagaggcgccttccaggacctgaaggagctggagagactgagactgaacagaaaccacctgcagctgttccccgagctgctgttcctgggcaccgccaagctgtacagactggacctgagcgagaaccagatccaggccatccccagaaaggccttcagaggcgccgtggacatcaagaacctgcagctggactacaaccagatcagctgcatcgaggacggcgccttcagagccctgagagacctggaggtgctgaccctgaacaacaacaacatcaccagactgagcgtggccagcttcaaccacatgcccaagctgagaaccttcagactgcacagcaacaacctgtactgcgactgccacctggcctggctgagcgactggctgagacagagacccagagtgggcctgtacacccagtgcatgggccccagccacctgagaggccacaacgtggccgaggtgcagaagagagagttcgtgtgcagcgacgaggaggagggccaccagagcttcatggcccccagctgcagcgtgctgcactgccccgccgcctgcacctgcagcaacaacatcgtggactgcagaggcaagggcctgaccgagatccccaccaacctgcccgagaccatcaccgagatcagactggagcagaacaccatcaaggtgatcccccccggcgccttcagcccctacaagaagctgagaagaatcgacctgagcaacaaccagatcagcgagctggcccccgacgccttccagggcctgagaagcctgaacagcctggtgctgtacggcaacaagatcaccgagctgcccaagagcctgttcgagggcctgttcagcctgcagctgctgctgctgaacgccaacaagatcaactgcctgagagtggacgccttccaggacctgcacaacctgaacctgctgagcctgtacgacaacaagctgcagaccatcgccaagggcaccttcagccccctgagagccatccagaccatgcacctggcccagaaccccttcatctgcgactgccacctgaagtggctggccgactacctgcacaccaaccccatcgagaccagcggcgccagatgcaccagccccagaagactggccaacaagagaatcggccagatcaagagcaagaagttcagatgcagcggcaccgaggactacagaagcaagctgagcggcgactgcttcgccgacctggcctgccccgagaagtgcagatgcgagggcaccaccgtggactgcagcaaccagaagctgaacaagatccccgagcacatcccccagtacaccgccgagctgagactgaacaacaacgagttcaccgtgctggaggccaccggcatcttcaagaagctgccccagctgagaaagatcaacttcagcaacaacaagatcaccgacatcgaggagggcgccttcgagggcgccagcggcgtgaacgagatcctgctgaccagcaacagactggagaacgtgcagcacaagatgttcaagggcctggagagcctgaagaccctgatgctgagaagcaacagaatcacctgcgtgggcaacgacagcttcatcggcctgagcagcgtgagactgctgagcctgtacgacaaccagatcaccaccgtggcccccggcgccttcgacaccctgcacagcctgagcaccctgaacctgctggccaaccccttcaactgcaactgctacctggcctggctgggcgagtggctgagaaagaagagaatcgtgaccggcaaccccagatgccagaagccctacttcctgaaggagatccccatccaggacgtggccatccaggacttcacctgcgacgacggcaacgacgacaacagctgcagccccctgagcagatgccccaccgagtgcacctgcctggacaccgtggtgagatgcagcaacaagggcctgaaggtgctgcccaagggcatccccagagacgtgaccgagctgtacctggacggcaaccagttcaccctggtgcccaaggagctgagcaactacaagcacctgaccctgatcgacctgagcaacaacagaatcagcaccctgagcaaccagagcttcagcaacatgacccagctgctgaccctgatcctgagctacaacagactgagatgcatcccccccagaaccttcgacggcctgaagagcctgagactgctgagcctgcacggcaacgacatcagcgtggtgcccgagggcgccttcaacgacctgagcgccctgagccacctggccatcggcgccaaccccctgtactgcgactgcaacatgcagtggctgagcgactgggtgaagagcgagtacaaggagcccggcatcgccagatgcgccggccccggcgagatggccgacaagctgctgctgaccacccccagcaagaagttcacctgccagggccccgtggacgtgaacatcctggccaagtgcaacccctgcctgagcaacccctgcaagaacgacggcacctgcaacagcgaccccgtggacttctacagatgcacctgcccctacggcttcaagggccaggactgcgacgtgcccatccacgcctgcatcagcaacccctgcaagcacggcggcacctgccacctgaaggagggcgaggaggacggcttctggtgcatctgcgccgacggcttcgagggcgagaactgcgaggtgaacgtggacgactgcgaggacaacgactgcgagaacaacagcacctgcgtggacggcatcaacaactacacctgcctgtgcccccccgagtacaccggcgagctgtgcgaggagaagctggacttctgcgcccaggacctgaacccctgccagcacgacagcaagtgcatcctgacccccaagggcttcaagtgcgactgcacccccggctacgtgggcgagcactgcgacatcgacttcgacgactgccaggacaacaagtgcaagaacggcgcccactgcaccgacgccgtgaacggctacacctgcatctgccccgagggctacagcggcctgttctgcgagttcagcccccccatggtgctgcccagaaccagcccctgcgacaacttcgactgccagaacggcgcccagtgcatcgtgagaatcaacgagcccatctgccagtgcctgcccggctaccagggcgagaagtgcgagaagctggtgagcgtgaacttcatcaacaaggagagctacctgcagatccccagcgccaaggtgagaccccagaccaacatcaccctgcagatcgccaccgacgaggacagcggcatcctgctgtacaagggcgacaaggaccacatcgccgtggagctgtacagaggcagagtgagagccagctacgacaccggcagccaccccgccagcgccatctacagcgtggagaccatcaacgacggcaacttccacatcgtggagctgctggccctggaccagagcctgagcctgagcgtggacggcggcaaccccaagatcatcaccaacctgagcaagcagagcaccctgaacttcgacagccccctgtacgtgggcggcatgcccggcaagagcaacgtggccagcctgagacaggcccccggccagaacggcaccagcttccacggctgcatcagaaacctgtacatcaacagcgagctgcaggacttccagaaggtgcccatgcagaccggcatcctgcccggctgcgagccctgccacaagaaggtgtgcgcccacggcacctgccagcccagcagccaggccggcttcacctgcgagtgccaggagggctggatgggccccctgtgcgaccagagaaccaacgacccctgcctgggcaacaagtgcgtgcacggcacctgcctgcccatcaacgccttcagctacagctgcaagtgcctggagggccacggcggcgtgctgtgcgacgaggaggaggacctgttcaacccctgccaggccatcaagtgcaagcacggcaagtgcagactgagcggcctgggccagccctactgcgagtgcagcagcggctacaccggcgacagctgcgacagagagatcagctgcagaggcgagagaatcagagactactaccagaagcagcagggctacgccgcctgccagaccaccaagaaggtgagcagactggagtgcagaggcggctgcgccggcggccagtgctgcggccccctgagaagcaagagaagaaagtacagcttcgagtgcaccgacggcagcagcttcgtggacgaggtggagaaggtggtgaagtgcggctgcaccagatgcgtgagctag

SEQ ID NO: 99120 - DNA, 4590 bp, synthetic construct
  misc_feature 1..4590: note = Description of Artificial Sequence: Synthetic coding sequence
  source 1..4590: mol_type = other DNA
atgagaggcgtgggctggcagatgctgagcctgagcctgggcctggtgctggccatcctgaacaaggtggccccccaggcctgccccgcccagtgcagctgcagcggcagcaccgtggactgccacggcctggccctgagaagcgtgcccagaaacatccccagaaacaccgagagactggacctgaacggcaacaacatcaccagaatcaccaagaccgacttcgccggcctgagacacctgagagtgctgcagctgatggagaacaagatcagcaccatcgagagaggcgccttccaggacctgaaggagctggagagactgagactgaacagaaaccacctgcagctgttccccgagctgctgttcctgggcaccgccaagctgtacagactggacctgagcgagaaccagatccaggccatccccagaaaggccttcagaggcgccgtggacatcaagaacctgcagctggactacaaccagatcagctgcatcgaggacggcgccttcagagccctgagagacctggaggtgctgaccctgaacaacaacaacatcaccagactgagcgtggccagcttcaaccacatgcccaagctgagaaccttcagactgcacagcaacaacctgtactgcgactgccacctggcctggctgagcgactggctgagacagagacccagagtgggcctgtacacccagtgcatgggccccagccacctgagaggccacaacgtggccgaggtgcagaagagagagttcgtgtgcagcggccaccagagcttcatggcccccagctgcagcgtgctgcactgccccgccgcctgcacctgcagcaacaacatcgtggactgcagaggcaagggcctgaccgagatccccaccaacctgcccgagaccatcaccgagatcagactggagcagaacaccatcaaggtgatcccccccggcgccttcagcccctacaagaagctgagaagaatcgacctgagcaacaaccagatcagcgagctggcccccgacgccttccagggcctgagaagcctgaacagcctggtgctgtacggcaacaagatcaccgagctgcccaagagcctgttcgagggcctgttcagcctgcagctgctgctgctgaacgccaacaagatcaactgcctgagagtggacgccttccaggacctgcacaacctgaacctgctgagcctgtacgacaacaagctgcagaccatcgccaagggcaccttcagccccctgagagccatccagaccatgcacctggcccagaaccccttcatctgcgactgccacctgaagtggctggccgactacctgcacaccaaccccatcgagaccagcggcgccagatgcaccagccccagaagactggccaacaagagaatcggccagatcaagagcaagaagttcagatgcagcgccaaggagcagtacttcatccccggcaccgaggactacagaagcaagctgagcggcgactgcttcgccgacctggcctgccccgagaagtgcagatgcgagggcaccaccgtggactgcagcaaccagaagctgaacaagatccccgagcacatcccccagtacaccgccgagctgagactgaacaacaacgagttcaccgtgctggaggccaccggcatcttcaagaagctgccccagctgagaaagatcaacttcagcaacaacaagatcaccgacatcgaggagggcgccttcgagggcgccagcggcgtgaacgagatcctgctgaccagcaacagactggagaacgtgcagcacaagatgttcaagggcctggagagcctgaagaccctgatgctgagaagcaacagaatcacctgcgtgggcaacgacagcttcatcggcctgagcagcgtgagactgctgagcctgtacgacaaccagatcaccaccgtggcccccggcgccttcgacaccctgcacagcctgagcaccctgaacctgctggccaaccccttcaactgcaactgctacctggcctggctgggcgagtggctgagaaagaagagaatcgtgaccggcaaccccagatgccagaagccctacttcctgaaggagatccccatccaggacgtggccatccaggacttcacctgcgacgacggcaacgacgacaacagctgcagccccctgagcagatgccccaccgagtgcacctgcctggacaccgtggtgagatgcagcaacaagggcctgaaggtgctgcccaagggcatccccagagacgtgaccgagctgtacctggacggcaaccagttcaccctggtgcccaaggagctgagcaactacaagcacctgaccctgatcgacctgagcaacaacagaatcagcaccctgagcaaccagagcttcagcaacatgacccagctgctgaccctgatcctgagctacaacagactgagatgcatcccccccagaaccttcgacggcctgaagagcctgagactgctgagcctgcacggcaacgacatcagcgtggtgcccgagggcgccttcaacgacctgagcgccctgagccacctggccatcggcgccaaccccctgtactgcgactgcaacatgcagtggctgagcgactgggtgaagagcgagtacaaggagcccggcatcgccagatgcgccggccccggcgagatggccgacaagctgctgctgaccacccccagcaagaagttcacctgccagggccccgtggacgtgaacatcctggccaagtgcaacccctgcctgagcaacccctgcaagaacgacggcacctgcaacagcgaccccgtggacttctacagatgcacctgcccctacggcttcaagggccaggactgcgacgtgcccatccacgcctgcatcagcaacccctgcaagcacggcggcacctgccacctgaaggagggcgaggaggacggcttctggtgcatctgcgccgacggcttcgagggcgagaactgcgaggtgaacgtggacgactgcgaggacaacgactgcgagaacaacagcacctgcgtggacggcatcaacaactacacctgcctgtgcccccccgagtacaccggcgagctgtgcgaggagaagctggacttctgcgcccaggacctgaacccctgccagcacgacagcaagtgcatcctgacccccaagggcttcaagtgcgactgcacccccggctacgtgggcgagcactgcgacatcgacttcgacgactgccaggacaacaagtgcaagaacggcgcccactgcaccgacgccgtgaacggctacacctgcatctgccccgagggctacagcggcctgttctgcgagttcagcccccccatggtgctgcccagaaccagcccctgcgacaacttcgactgccagaacggcgcccagtgcatcgtgagaatcaacgagcccatctgccagtgcctgcccggctaccagggcgagaagtgcgagaagctggtgagcgtgaacttcatcaacaaggagagctacctgcagatccccagcgccaaggtgagaccccagaccaacatcaccctgcagatcgccaccgacgaggacagcggcatcctgctgtacaagggcgacaaggaccacatcgccgtggagctgtacagaggcagagtgagagccagctacgacaccggcagccaccccgccagcgccatctacagcgtggagaccatcaacgacggcaacttccacatcgtggagctgctggccctggaccagagcctgagcctgagcgtggacggcggcaaccccaagatcatcaccaacctgagcaagcagagcaccctgaacttcgacagccccctgtacgtgggcggcatgcccggcaagagcaacgtggccagcctgagacaggcccccggccagaacggcaccagcttccacggctgcatcagaaacctgtacatcaacagcgagctgcaggacttccagaaggtgcccatgcagaccggcatcctgcccggctgcgagccctgccacaagaaggtgtgcgcccacggcacctgccagcccagcagccaggccggcttcacctgcgagtgccaggagggctggatgggccccctgtgcgaccagagaaccaacgacccctgcctgggcaacaagtgcgtgcacggcacctgcctgcccatcaacgccttcagctacagctgcaagtgcctggagggccacggcggcgtgctgtgcgacgaggaggaggacctgttcaacccctgccaggccatcaagtgcaagcacggcaagtgcagactgagcggcctgggccagccctactgcgagtgcagcagcggctacaccggcgacagctgcgacagagagatcagctgcagaggcgagagaatcagagactactaccagaagcagcagggctacgccgcctgccagaccaccaagaaggtgagcagactggagtgcagaggcggctgcgccggcggccagtgctgcggccccctgagaagcaagagaagaaagtacagcttcgagtgcaccgacggcagcagcttcgtggacgaggtggagaaggtggtgaagtgcggctgcaccagatgcgtgagctag

SEQ ID NO: 99121 - DNA, 4419 bp, synthetic construct
  misc_feature 1..4419: note = Description of Artificial Sequence: Synthetic coding sequence
  source 1..4419: mol_type = other DNA
atggcccccggctgggccggcgtgggcgccgccgtgagagccagactggccctggccctggccctggccagcgtgctgagcggcccccccgccgtggcctgccccaccaagtgcacctgcagcgccgccagcgtggactgccacggcctgggcctgagagccgtgcccagaggcatccccagaaacgccgagagactggacctggacagaaacaacatcaccagaatcaccaagatggacttcgccggcctgaagaacctgagagtgctgcacctggaggacaaccaggtgagcgtgatcgagagaggcgccttccaggacctgaagcagctggagagactgagactgaacaagaacaagctgcaggtgctgcccgagctgctgttccagagcacccccaagctgaccagactggacctgagcgagaaccagatccagggcatccccagaaaggccttcagaggcatcaccgacgtgaagaacctgcagctggacaacaaccacatcagctgcatcgaggacggcgccttcagagccctgagagacctggagatcctgaccctgaacaacaacaacatcagcagaatcctggtgaccagcttcaaccacatgcccaagatcagaaccctgagactgcacagcaaccacctgtactgcgactgccacctggcctggctgagcgactggctgagacagagaagaaccgtgggccagttcaccctgtgcatggcccccgtgcacctgagaggcttcaacgtggccgacgtgcagaagaaggagtacgtgtgccccgccccccacagcgagccccccagctgcaacgccaacagcatcagctgccccagcccctgcacctgcagcaacaacatcgtggactgcagaggcaagggcctgatggagatccccgccaacctgcccgagggcatcgtggagatcagactggagcagaacagcatcaaggccatccccgccggcgccttcacccagtacaagaagctgaagagaatcgacatcagcaagaaccagatcagcgacatcgcccccgacgccttccagggcctgaagagcctgaccagcctggtgctgtacggcaacaagatcaccgagatcgtgaagggcctgttcgacggcctggtgagcctgcagctgctgctgctgaacgccaacaagatcaactgcctgagagtgaacaccttccaggacctgcagaacctgaacctgctgagcctgtacgacaacaagctgcagaccatcagcaagggcctgttcgcccccctgcagagcatccagaccctgcacctggcccagaaccccttcgtgtgcgactgccacctgaagtggctggccgactacctgcaggacaaccccatcgagaccagcggcgccagatgcagcagccccagaagactggccaacaagagaatcagccagatcaagagcaagaagttcagatgcagcggcagcgaggactacagaagcagattcagcagcgagtgcttcatggacctggtgtgccccgagaagtgcagatgcgagggcaccatcgtggactgcagcaaccagaagctggtgagaatccccagccacctgcccgagtacgtgaccgacctgagactgaacgacaacgaggtgagcgtgctggaggccaccggcatcttcaagaagctgcccaacctgagaaagatcaacctgagcaacaacaagatcaaggaggtgagagagggcgccttcgacggcgccgccagcgtgcaggagctgatgctgaccggcaaccagctggagaccgtgcacggcagagtgttcagaggcctgagcggcctgaagaccctgatgctgagaagcaacctgatcggctgcgtgagcaacgacaccttcgccggcctgagcagcgtgagactgctgagcctgtacgacaacagaatcaccaccatcacccccggcgccttcaccaccctggtgagcctgagcaccatcaacctgctgagcaaccccttcaactgcaactgccacctggcctggctgggcaagtggctgagaaagagaagaatcgtgagcggcaaccccagatgccagaagcccttcttcctgaaggagatccccatccaggacgtggccatccaggacttcacctgcgacggcaacgaggagagcagctgccagctgagccccagatgccccgagcagtgcacctgcatggagaccgtggtgagatgcagcaacaagggcctgagagccctgcccagaggcatgcccaaggacgtgaccgagctgtacctggagggcaaccacctgaccgccgtgcccagagagctgagcgccctgagacacctgaccctgatcgacctgagcaacaacagcatcagcatgctgaccaactacaccttcagcaacatgagccacctgagcaccctgatcctgagctacaacagactgagatgcatccccgtgcacgccttcaacggcctgagaagcctgagagtgctgaccctgcacggcaacgacatcagcagcgtgcccgagggcagcttcaacgacctgaccagcctgagccacctggccctgggcaccaaccccctgcactgcgactgcagcctgagatggctgagcgagtgggtgaaggccggctacaaggagcccggcatcgccagatgcagcagccccgagcccatggccgacagactgctgctgaccacccccacccacagattccagtgcaagggccccgtggacatcaacatcgtggccaagtgcaacgcctgcctgagcagcccctgcaagaacaacggcacctgcacccaggaccccgtggagctgtacagatgcgcctgcccctacagctacaagggcaaggactgcaccgtgcccatcaacacctgcatccagaacccctgccagcacggcggcacctgccacctgagcgacagccacaaggacggcttcagctgcagctgccccctgggcttcgagggccagagatgcgagatcaaccccgacgactgcgaggacaacgactgcgagaacaacgccacctgcgtggacggcatcaacaactacgtgtgcatctgcccccccaactacaccggcgagctgtgcgacgaggtgatcgaccactgcgtgcccgagctgaacctgtgccagcacgaggccaagtgcatccccctggacaagggcttcagctgcgagtgcgtgcccggctacagcggcaagctgtgcgagaccgacaacgacgactgcgtggcccacaagtgcagacacggcgcccagtgcgtggacaccatcaacggctacacctgcacctgcccccagggcttcagcggccccttctgcgagcaccccccccccatggtgctgctgcagaccagcccctgcgaccagtacgagtgccagaacggcgcccagtgcatcgtggtgcagcaggagcccacctgcagatgcccccccggcttcgccggccccagatgcgagaagctgatcaccgtgaacttcgtgggcaaggacagctacgtggagctggccagcgccaaggtgagaccccaggccaacatcagcctgcaggtggccaccgacaaggacaacggcatcctgctgtacaagggcgacaacgaccccctggccctggagctgtaccagggccacgtgagactggtgtacgacagcctgagcagcccccccaccaccgtgtacagcgtggagaccgtgaacgacggccagttccacagcgtggagctggtgaccctgaaccagaccctgaacctggtggtggacaagggcacccccaagagcctgggcaagctgcagaagcagcccgccgtgggcatcaacagccccctgtacctgggcggcatccccaccagcaccggcctgagcgccctgagacagggcaccgacagacccctgggcggcttccacggctgcatccacgaggtgagaatcaacaacgagctgcaggacttcaaggccctgcccccccagagcctgggcgtgagccccggctgcaagagctgcaccgtgtgcaagcacggcctgtgcagaagcgtggagaaggacagcgtggtgtgcgagtgcagacccggctggaccggccccctgtgcgaccaggaggccagagacccctgcctgggccacagatgccaccacggcaagtgcgtggccaccggcaccagctacatgtgcaagtgcgccgagggctacggcggcgacctgtgcgacaacaagaacgacagcgccaacgcctgcagcgccttcaagtgccaccacggccagtgccacatcagcgaccagggcgagccctactgcctgtgccagcccggcttcagcggcgagcactgccagcaggtgttcagagcccaggtgttccagagcagcctgcccggcaactgcagctggagctgctggccccccagaccccccatgccctag

SEQ ID NO: 99122 - DNA, 4572 bp, synthetic construct
  misc_feature 1..4572: note = Description of Artificial Sequence: Synthetic coding sequence
  source 1..4572: mol_type = other DNA
atggcccccggctgggccggcgtgggcgccgccgtgagagccagactggccctggccctggccctggccagcgtgctgagcggcccccccgccgtggcctgccccaccaagtgcacctgcagcgccgccagcgtggactgccacggcctgggcctgagagccgtgcccagaggcatccccagaaacgccgagagactggacctggacagaaacaacatcaccagaatcaccaagatggacttcgccggcctgaagaacctgagagtgctgcacctggaggacaaccaggtgagcgtgatcgagagaggcgccttccaggacctgaagcagctggagagactgagactgaacaagaacaagctgcaggtgctgcccgagctgctgttccagagcacccccaagctgaccagactggacctgagcgagaaccagatccagggcatccccagaaaggccttcagaggcatcaccgacgtgaagaacctgcagctggacaacaaccacatcagctgcatcgaggacggcgccttcagagccctgagagacctggagatcctgaccctgaacaacaacaacatcagcagaatcctggtgaccagcttcaaccacatgcccaagatcagaaccctgagactgcacagcaaccacctgtactgcgactgccacctggcctggctgagcgactggctgagacagagaagaaccgtgggccagttcaccctgtgcatggcccccgtgcacctgagaggcttcaacgtggccgacgtgcagaagaaggagtacgtgtgccccgccccccacagcgagccccccagctgcaacgccaacagcatcagctgccccagcccctgcacctgcagcaacaacatcgtggactgcagaggcaagggcctgatggagatccccgccaacctgcccgagggcatcgtggagatcagactggagcagaacagcatcaaggccatccccgccggcgccttcacccagtacaagaagctgaagagaatcgacatcagcaagaaccagatcagcgacatcgcccccgacgccttccagggcctgaagagcctgaccagcctggtgctgtacggcaacaagatcaccgagatcgtgaagggcctgttcgacggcctggtgagcctgcagctgctgctgctgaacgccaacaagatcaactgcctgagagtgaacaccttccaggacctgcagaacctgaacctgctgagcctgtacgacaacaagctgcagaccatcagcaagggcctgttcgcccccctgcagagcatccagaccctgcacctggcccagaaccccttcgtgtgcgactgccacctgaagtggctggccgactacctgcaggacaaccccatcgagaccagcggcgccagatgcagcagccccagaagactggccaacaagagaatcagccagatcaagagcaagaagttcagatgcagcggcagcgaggactacagaagcagattcagcagcgagtgcttcatggacctggtgtgccccgagaagtgcagatgcgagggcaccatcgtggactgcagcaaccagaagctggtgagaatccccagccacctgcccgagtacgtgaccgacctgagactgaacgacaacgaggtgagcgtgctggaggccaccggcatcttcaagaagctgcccaacctgagaaagatcaacctgagcaacaacaagatcaaggaggtgagagagggcgccttcgacggcgccgccagcgtgcaggagctgatgctgaccggcaaccagctggagaccgtgcacggcagagtgttcagaggcctgagcggcctgaagaccctgatgctgagaagcaacctgatcggctgcgtgagcaacgacaccttcgccggcctgagcagcgtgagactgctgagcctgtacgacaacagaatcaccaccatcacccccggcgccttcaccaccctggtgagcctgagcaccatcaacctgctgagcaaccccttcaactgcaactgccacctggcctggctgggcaagtggctgagaaagagaagaatcgtgagcggcaaccccagatgccagaagcccttcttcctgaaggagatccccatccaggacgtggccatccaggacttcacctgcgacggcaacgaggagagcagctgccagctgagccccagatgccccgagcagtgcacctgcatggagaccgtggtgagatgcagcaacaagggcctgagagccctgcccagaggcatgcccaaggacgtgaccgagctgtacctggagggcaaccacctgaccgccgtgcccagagagctgagcgccctgagacacctgaccctgatcgacctgagcaacaacagcatcagcatgctgaccaactacaccttcagcaacatgagccacctgagcaccctgatcctgagctacaacagactgagatgcatccccgtgcacgccttcaacggcctgagaagcctgagagtgctgaccctgcacggcaacgacatcagcagcgtgcccgagggcagcttcaacgacctgaccagcctgagccacctggccctgggcaccaaccccctgcactgcgactgcagcctgagatggctgagcgagtgggtgaaggccggctacaaggagcccggcatcgccagatgcagcagccccgagcccatggccgacagactgctgctgaccacccccacccacagattccagtgcaagggccccgtggacatcaacatcgtggccaagtgcaacgcctgcctgagcagcccctgcaagaacaacggcacctgcacccaggaccccgtggagctgtacagatgcgcctgcccctacagctacaagggcaaggactgcaccgtgcccatcaacacctgcatccagaacccctgccagcacggcggcacctgccacctgagcgacagccacaaggacggcttcagctgcagctgccccctgggcttcgagggccagagatgcgagatcaaccccgacgactgcgaggacaacgactgcgagaacaacgccacctgcgtggacggcatcaacaactacgtgtgcatctgcccccccaactacaccggcgagctgtgcgacgaggtgatcgaccactgcgtgcccgagctgaacctgtgccagcacgaggccaagtgcatccccctggacaagggcttcagctgcgagtgcgtgcccggctacagcggcaagctgtgcgagaccgacaacgacgactgcgtggcccacaagtgcagacacggcgcccagtgcgtggacaccatcaacggctacacctgcacctgcccccagggcttcagcggccccttctgcgagcaccccccccccatggtgctgctgcagaccagcccctgcgaccagtacgagtgccagaacggcgcccagtgcatcgtggtgcagcaggagcccacctgcagatgcccccccggcttcgccggccccagatgcgagaagctgatcaccgtgaacttcgtgggcaaggacagctacgtggagctggccagcgccaaggtgagaccccaggccaacatcagcctgcaggtggccaccgacaaggacaacggcatcctgctgtacaagggcgacaacgaccccctggccctggagctgtaccagggccacgtgagactggtgtacgacagcctgagcagcccccccaccaccgtgtacagcgtggagaccgtgaacgacggccagttccacagcgtggagctggtgaccctgaaccagaccctgaacctggtggtggacaagggcacccccaagagcctgggcaagctgcagaagcagcccgccgtgggcatcaacagccccctgtacctgggcggcatccccaccagcaccggcctgagcgccctgagacagggcaccgacagacccctgggcggcttccacggctgcatccacgaggtgagaatcaacaacgagctgcaggacttcaaggccctgcccccccagagcctgggcgtgagccccggctgcaagagctgcaccgtgtgcaagcacggcctgtgcagaagcgtggagaaggacagcgtggtgtgcgagtgcagacccggctggaccggccccctgtgcgaccaggaggccagagacccctgcctgggccacagatgccaccacggcaagtgcgtggccaccggcaccagctacatgtgcaagtgcgccgagggctacggcggcgacctgtgcgacaacaagaacgacagcgccaacgcctgcagcgccttcaagtgccaccacggccagtgccacatcagcgaccagggcgagccctactgcctgtgccagcccggcttcagcggcgagcactgccagcaggagaacccctgcctgggccaggtggtgagagaggtgatcagaagacagaagggctacgccagctgcgccaccgccagcaaggtgcccatcatggagtgcagaggcggctgcggcccccagtgctgccagcccaccagaagcaagagaagaaagtacgtgttccagtgcaccgacggcagcagcttcgtggaggaggtggagagacacctggagtgcggctgcctggcctgcagctag

SEQ ID NO: 99123 - DNA, 3258 bp, synthetic construct
  misc_feature 1..3258: note = Description of Artificial Sequence: Synthetic coding sequence
  source 1..3258: mol_type = other DNA
atgagcacccccagcagattcaagaaggacaaggagatcatcgccgagtacgagagccaggtgaaggagatcagagcccagctggtggagcagcagaagtgcctggagcagcagaccgagatgagagtgcagctgctgcaggacctgcaggacttcttcagaaagaaggccgagatcgagaccgagtacagcagaaacctggagaagctggccgagagattcatggccaagaccagaagcaccaaggaccaccagcagtacaagaaggaccagaacctgctgagccccgtgaactgctggtacctgctgctgaaccaggtgagaagagagagcaaggaccacgccaccctgagcgacatctacctgaacaacgtgatcatgagattcatgcagatcagcgaggacagcaccagaatgttcaagaagagcaaggagatcgccttccagctgcacgaggacctgatgaaggtgctgaacgagctgtacaccgtgatgaagacctaccacatgtaccacgccgagagcatcagcgccgagagcaagctgaaggaggccgagaagcaggaggagaagcagatcggcagaagcggcgaccccgtgttccacatcagactggaggagagacaccagagaagaagcagcgtgaagaagatcgagaagatgaaggagaagagacaggccaagtacagcgagaacaagctgaagagcatcaaggccagaaacgagtacctgctgaccctggaggccaccaacgccagcgtgttcaagtactacatccacgacctgagcgacctgatcgactgctgcgacctgggctaccacgccagcctgaacagagccctgagaacctacctgagcgccgagtacaacctggagaccagcagacacgagggcctggacatcatcgagaacgccgtggacaacctggagcccagaagcgacaagcagagattcatggagatgtaccccgccgccttctgcccccccatgaagttcgagttccagagccacatgggcgacgaggtgtgccaggtgagcgcccagcagcccgtgcaggccgagctgatgctgagataccagcagctgcagagcagactggccaccctgaagatcgagaacgaggaggtgaagaagaccaccgaggccaccctgcagaccatccaggacatggtgaccatcgaggactacgacgtgagcgagtgcttccagcacagcagaagcaccgagagcgtgaagagcaccgtgagcgagacctacctgagcaagcccagcatcgccaagagaagagccaaccagcaggagaccgagcagttctacttcatgaagctgagagagtacctggagggcagcaacctgatcaccaagctgcaggccaagcacgacctgctgcagagaaccctgggcgagggccacagagccgagtacatgaccaccagaccccccaacgtgccccccaagccccagaagcacagaaagagcagacccagaagccagtacaacaccaagctgttcaacggcgacctggagaccttcgtgaaggacagcggccaggtgatccccctgatcgtggagagctgcatcagattcatcaacctgtacggcctgcagcaccagggcatcttcagagtgagcggcagccaggtggaggtgaacgacatcaagaacagcttcgagagaggcgagaaccccctggccgacgaccagagcaaccacgacatcaacagcgtggccggcgtgctgaagctgtacttcagaggcctggagaaccccctgttccccaaggagagattcaacgacctgatcagctgcatcagaatcgacaacctgtacgagagagccctgcacatcagaaagctgctgctgaccctgcccagaagcgtgctgatcgtgatgagatacctgttcgccttcctgaaccacctgagccagtacagcgacgagaacatgatggacccctacaacctggccatctgcttcggccccaccctgatgcccgtgcccgagatccaggaccaggtgagctgccaggcccacgtgaacgagatcatcaagaccatcatcatccaccacgagaccatcttccccgacgccaaggagctggacggccccgtgtacgagaagtgcatggccggcgacgactactgcgacagcccctacagcgagcacggcaccctggaggaggtggaccaggacgccggcaccgagccccacaccagcgaggacgagtgcgagcccatcgaggccatcgccaagttcgactacgtgggcagaagcgccagagagctgagcttcaagaagggcgccagcctgctgctgtaccacagagccagcgaggactggtgggagggcagacacaacggcatcgacggcctggtgccccaccagtacatcgtggtgcaggacatggacgacaccttcagcgacaccctgagccagaaggccgacagcgaggccagcagcggccccgtgaccgaggacaagagcagcagcaaggacatgaacagccccaccgacagacaccccgacggctacctggccagacagagaaagagaggcgagccccccccccccgtgagaagacccggcagaaccagcgacggccactgccccctgcaccccccccacgccctgagcaacagcagcgtggacctgggcagccccagcctggccagccaccccagaggcctgctgcagaacagaggcctgaacaacgacagccccgagagaagaagaagacccggccacggcagcctgaccaacatcagcagacacgacagcctgaagaagatcgacagcccccccatcagaagaagcaccagcagcggccagtacaccggcttcaacgaccacaagcccctggaccccgagaccatcgcccaggacatcgaggagaccatgaacaccgccctgaacgagctgagagagctggagagacagagcaccgccaagcacgcccccgacgtggtgctggacaccctggagcaggtgaagaacagccccacccccgccaccagcaccgagagcctgagccccctgcacaacgtggccctgagaagcagcgagccccagatcagaagaagcaccagcagcagcagcgacaccatgagcaccttcaagcccatggtggcccccagaatgggcgtgcagctgaagccccccgccctgagacccaagcccgccgtgctgcccaagaccaaccccaccatcggccccgccccccccccccagggccccaccgacaagagctgcaccatgtag

SEQ ID NO: 99124 - DNA, 3189 bp, synthetic construct
  misc_feature 1..3189: note = Description of Artificial Sequence: Synthetic coding sequence
  source 1..3189: mol_type = other DNA
atgagcacccccagcagattcaagaaggacaaggagatcatcgccgagtacgagagccaggtgaaggagatcagagcccagctggtggagcagcagaagtgcctggagcagcagaccgagatgagagtgcagctgctgcaggacctgcaggacttcttcagaaagaaggccgagatcgagaccgagtacagcagaaacctggagaagctggccgagagattcatggccaagaccagaagcaccaaggaccaccagcagtacaagaaggaccagaacctgctgagccccgtgaactgctggtacctgctgctgaaccaggtgagaagagagagcaaggaccacgccaccctgagcgacatctacctgaacaacgtgatcatgagattcatgcagatcagcgaggacagcaccagaatgttcaagaagagcaaggagatcgccttccagctgcacgaggacctgatgaaggtgctgaacgagctgtacaccgtgatgaagacctaccacatgtaccacgccgagagcatcagcgccgagagcaagctgaaggaggccgagaagcaggaggagaagcagatcggcagaagcggcgaccccgtgttccacatcagactggaggagagacaccagagaagaagcagcgtgaagaagatcgagaagatgaaggagaagagacaggccaagtacagcgagaacaagctgaagagcatcaaggccagaaacgagtacctgctgaccctggaggccaccaacgccagcgtgttcaagtactacatccacgacctgagcgacctgatcgactgctgcgacctgggctaccacgccagcctgaacagagccctgagaacctacctgagcgccgagtacaacctggagaccagcagacacgagggcctggacatcatcgagaacgccgtggacaacctggagcccagaagcgacaagcagagattcatggagatgtaccccgccgccttctgcccccccatgaagttcgagttccagagccacatgggcgacgaggtgtgccaggtgagcgcccagcagcccgtgcaggccgagctgatgctgagataccagcagctgcagagcagactggccaccctgaagatcgagaacgaggaggtgaagaagaccaccgaggccaccctgcagaccatccaggacatggtgaccatcgaggactacgacgtgagcgagtgcttccagcacagcagaagcaccgagagcgtgaagagcaccgtgagcgagacctacctgagcaagcccagcatcgccaagagaagagccaaccagcaggagaccgagcagttctacttcatgaagctgagagagtacctggagggcagcaacctgatcaccaagctgcaggccaagcacgacctgctgcagagaaccctgggcgagggccacagagccgagtacatgaccaccagcagaggcagaagaaacagccacaccagacaccaggacagcggccaggtgatccccctgatcgtggagagctgcatcagattcatcaacctgtacggcctgcagcaccagggcatcttcagagtgagcggcagccaggtggaggtgaacgacatcaagaacagcttcgagagaggcgagaaccccctggccgacgaccagagcaaccacgacatcaacagcgtggccggcgtgctgaagctgtacttcagaggcctggagaaccccctgttccccaaggagagattcaacgacctgatcagctgcatcagaatcgacaacctgtacgagagagccctgcacatcagaaagctgctgctgaccctgcccagaagcgtgctgatcgtgatgagatacctgttcgccttcctgaaccacctgagccagtacagcgacgagaacatgatggacccctacaacctggccatctgcttcggccccaccctgatgcccgtgcccgagatccaggaccaggtgagctgccaggcccacgtgaacgagatcatcaagaccatcatcatccaccacgagaccatcttccccgacgccaaggagctggacggccccgtgtacgagaagtgcatggccggcgacgactactgcgacagcccctacagcgagcacggcaccctggaggaggtggaccaggacgccggcaccgagccccacaccagcgaggacgagtgcgagcccatcgaggccatcgccaagttcgactacgtgggcagaagcgccagagagctgagcttcaagaagggcgccagcctgctgctgtaccacagagccagcgaggactggtgggagggcagacacaacggcatcgacggcctggtgccccaccagtacatcgtggtgcaggacatggacgacaccttcagcgacaccctgagccagaaggccgacagcgaggccagcagcggccccgtgaccgaggacaagagcagcagcaaggacatgaacagccccaccgacagacaccccgacggctacctggccagacagagaaagagaggcgagccccccccccccgtgagaagacccggcagaaccagcgacggccactgccccctgcaccccccccacgccctgagcaacagcagcgtggacctgggcagccccagcctggccagccaccccagaggcctgctgcagaacagaggcctgaacaacgacagccccgagagaagaagaagacccggccacggcagcctgaccaacatcagcagacacgacagcctgaagaagatcgacagcccccccatcagaagaagcaccagcagcggccagtacaccggcttcaacgaccacaagcccctggaccccgagaccatcgcccaggacatcgaggagaccatgaacaccgccctgaacgagctgagagagctggagagacagagcaccgccaagcacgcccccgacgtggtgctggacaccctggagcaggtgaagaacagccccacccccgccaccagcaccgagagcctgagccccctgcacaacgtggccctgagaagcagcgagccccagatcagaagaagcaccagcagcagcagcgacaccatgagcaccttcaagcccatggtggcccccagaatgggcgtgcagctgaagccccccgccctgagacccaagcccgccgtgctgcccaagaccaaccccaccatcggccccgccccccccccccagggccccaccgacaagagctgcaccatgtag

SEQ ID NO: 99125 - DNA, 2958 bp, synthetic construct
  misc_feature 1..2958: note = Description of Artificial Sequence: Synthetic coding sequence
  source 1..2958: mol_type = other DNA
tgaaaggaccagaacgtgctgagccccgtgaactgctggaacctgctgctgaaccaggtgaagagagagagcagagaccacaccaccctgagcgacatctacctgaacaacatcatccccagattcgtgcaggtgagcgaggacagcggcagactgttcaagaagagcaaggaggtgggccagcagctgcaggacgacctgatgaaggtgctgaacgagctgtacagcgtgatgaagacctaccacatgtacaacgccgacagcatcagcgcccagagcaagctgaaggaggccgagaagcaggaggagaagcagatcggcaagagcgtgaagcaggaggacagacagacccccagaagccccgacagcaccgccaacgtgagaatcgaggagaagcacgtgagaagaagcagcgtgaagaagatcgagaagatgaaggagaagagacaggccaagtacaccgagaacaagctgaaggccatcaaggccagaaacgagtacctgctggccctggaggccaccaacgccagcgtgttcaagtactacatccacgacctgagcgacctgatcgaccagtgctgcgacctgggctaccacgccagcctgaacagagccctgagaaccttcctgagcgccgagctgaacctggagcagagcaagcacgagggcctggacgccatcgagaacgccgtggagaacctggacgccaccagcgacaagcagagactgatggagatgtacaacaacgtgttctgcccccccatgaagttcgagttccagccccacatgggcgacatggccagccagctgtgcgcccagcagcccgtgcagagcgagctggtgcagagatgccagcagctgcagagcagactgagcaccctgaagatcgagaacgaggaggtgaagaagaccatggaggccaccctgcagaccatccaggacatcgtgaccgtggaggacttcgacgtgagcgactgcttccagtacagcaacagcatggagagcgtgaagagcaccgtgagcgagaccttcatgagcaagcccagcatcgccaagagaagagccaaccagcaggagaccgagcagttctacttcaccaagatgaaggagtacctggagggcagaaacctgatcaccaagctgcaggccaagcacgacctgctgcagaagaccctgggcgagagccagagaaccgactgcagcctggccagaagaagcagcaccgtgagaaagcaggacagcagccaggccatccccctggtggtggagagctgcatcagattcatcagcagacacggcctgcagcacgagggcatcttcagagtgagcggcagccaggtggaggtgaacgacatcaagaacgccttcgagagaggcgaggaccccctggccggcgaccagaacgaccacgacatggacagcatcgccggcgtgctgaagctgtacttcagaggcctggagcaccccctgttccccaaggacatcttccacgacctgatggcctgcgtgaccatggacaacctgcaggagagagccctgcacatcagaaaggtgctgctggtgctgcccaagaccaccctgatcatcatgagatacctgttcgccttcctgaaccacctgagccagttcagcgaggagaacatgatggacccctacaacctggccatctgcttcggccccagcctgatgagcgtgcccgagggccacgaccaggtgagctgccaggcccacgtgaacgagctgatcaagaccatcatcatccagcacgagaacatcttccccagccccagagagctggagggccccgtgtacagcagaggcggcagcatggaggactactgcgacagcccccacggcgagaccaccagcgtggaggacagcacccaggacgtgaccgccgagcaccacaccagcgacgacgagtgcgagcccatcgaggccatcgccaagttcgactacgtgggcagaaccgccagagagctgagcttcaagaagggcgccagcctgctgctgtaccagagagccagcgacgactggtgggagggcagacacaacggcatcgacggcctgatcccccaccagtacatcgtggtgcaggacaccgaggacggcgtggtggagagaagcagccccaagagcgagatcgaggtgatcagcgagccccccgaggagaaggtgaccgccagagccggcgccagctgccccagcggcggccacgtggccgacatctacctggccaacatcaacaagcagagaaagagacccgagagcggcagcatcagaaagaccttcagaagcgacagccacggcctgagcagcagcctgaccgacagcagcagccccggcgtgggcgccagctgcagacccagcagccagcccatcatgagccagagcctgcccaaggagggccccgacaagtgcagcatcagcggccacggcagcctgaacagcatcagcagacacagcagcctgaagaacagactggacagcccccagatcagaaagaccgccaccgccggcagaagcaagagcttcaacaaccacagacccatggaccccgaggtgatcgcccaggacatcgaggccaccatgaacagcgccctgaacgagctgagagagctggagagacagagcagcgtgaagcacacccccgacgtggtgctggacaccctggagcccctgaagaccagccccgtggtggcccccaccagcgagcccagcagccccctgcacacccagctgctgaaggaccccgagcccgccttccagagaagcgccagcaccgccggcgacatcgcctgcgccttcagacccgtgaagagcgtgaagatggccgcccccgtgaagccccccgccaccagacccaagcccaccgtgttccccaagaccaacgccaccagccccggcgtgaacagcagcaccagcccccagagcaccgacaagagctgcaccgtgtag

SEQ ID NO: 99126 - DNA, 2796 bp, synthetic construct
  misc_feature 1..2796: note = Description of Artificial Sequence: Synthetic coding sequence
  source 1..2796: mol_type = other DNA
cagagcaaggaggtgggccagcagctgcaggacgacctgatgaaggtgctgaacgagctgtacagcgtgatgaagacctaccacatgtacaacgccgacagcatcagcgcccagagcaagctgaaggaggccgagaagcaggaggagaagcagatcggcaagagcgtgaagcaggaggacagacagacccccagaagccccgacagcaccgccaacgtgagaatcgaggagaagcacgtgagaagaagcagcgtgaagaagatcgagaagatgaaggagaagagacaggccaagtacaccgagaacaagctgaaggccatcaaggccagaaacgagtacctgctggccctggaggccaccaacgccagcgtgttcaagtactacatccacgacctgagcgacctgatcgaccagtgctgcgacctgggctaccacgccagcctgaacagagccctgagaaccttcctgagcgccgagctgaacctggagcagagcaagcacgagggcctggacgccatcgagaacgccgtggagaacctggacgccaccagcgacaagcagagactgatggagatgtacaacaacgtgttctgcccccccatgaagttcgagttccagccccacatgggcgacatggccagccagctgtgcgcccagcagcccgtgcagagcgagctggtgcagagatgccagcagctgcagagcagactgagcaccctgaagatcgagaacgaggaggtgaagaagaccatggaggccaccctgcagaccatccaggacatcgtgaccgtggaggacttcgacgtgagcgactgcttccagtacagcaacagcatggagagcgtgaagagcaccgtgagcgagaccttcatgagcaagcccagcatcgccaagagaagagccaaccagcaggagaccgagcagttctacttcaccaagatgaaggagtacctggagggcagaaacctgatcaccaagctgcaggccaagcacgacctgctgcagaagaccctgggcgagagccagagaaccgactgcagcctggccagaagaagcagcaccgtgagaaagcaggacagcagccaggccatccccctggtggtggagagctgcatcagattcatcagcagacacggcctgcagcacgagggcatcttcagagtgagcggcagccaggtggaggtgaacgacatcaagaacgccttcgagagaggcgaggaccccctggccggcgaccagaacgaccacgacatggacagcatcgccggcgtgctgaagctgtacttcagaggcctggagcaccccctgttccccaaggacatcttccacgacctgatggcctgcgtgaccatggacaacctgcaggagagagccctgcacatcagaaaggtgctgctggtgctgcccaagaccaccctgatcatcatgagatacctgttcgccttcctgaaccacctgagccagttcagcgaggagaacatgatggacccctacaacctggccatctgcttcggccccagcctgatgagcgtgcccgagggccacgaccaggtgagctgccaggcccacgtgaacgagctgatcaagaccatcatcatccagcacgagaacatcttccccagccccagagagctggagggccccgtgtacagcagaggcggcagcatggaggactactgcgacagcccccacggcgagaccaccagcgtggaggacagcacccaggacgtgaccgccgagcaccacaccagcgacgacgagtgcgagcccatcgaggccatcgccaagttcgactacgtgggcagaaccgccagagagctgagcttcaagaagggcgccagcctgctgctgtaccagagagccagcgacgactggtgggagggcagacacaacggcatcgacggcctgatcccccaccagtacatcgtggtgcaggacaccgaggacggcgtggtggagagaagcagccccaagagcgagatcgaggtgatcagcgagccccccgaggagaaggtgaccgccagagccggcgccagctgccccagcggcggccacgtggccgacatctacctggccaacatcaacaagcagagaaagagacccgagagcggcagcatcagaaagaccttcagaagcgacagccacggcctgagcagcagcctgaccgacagcagcagccccggcgtgggcgccagctgcagacccagcagccagcccatcatgagccagagcctgcccaaggagggccccgacaagtgcagcatcagcggccacggcagcctgaacagcatcagcagacacagcagcctgaagaacagactggacagcccccagatcagaaagaccgccaccgccggcagaagcaagagcttcaacaaccacagacccatggaccccgaggtgatcgcccaggacatcgaggccaccatgaacagcgccctgaacgagctgagagagctggagagacagagcagcgtgaagcacacccccgacgtggtgctggacaccctggagcccctgaagaccagccccgtggtggcccccaccagcgagcccagcagccccctgcacacccagctgctgaaggaccccgagcccgccttccagagaagcgccagcaccgccggcgacatcgcctgcgccttcagacccgtgaagagcgtgaagatggccgcccccgtgaagccccccgccaccagacccaagcccaccgtgttccccaagaccaacgccaccagccccggcgtgaacagcagcaccagcccccagagcaccgacaagagctgcaccgtgtag

SEQ ID NO: 99127 - DNA, 2112 bp, synthetic construct
  misc_feature 1..2112: note = Description of Artificial Sequence: Synthetic coding sequence
  source 1..2112: mol_type = other DNA
agaaaggaccagaacgtgctgagccccgtgaactgctggaacctgctgctgaaccaggtgaagagagagagcagagaccacaccaccctgagcgacatctacctgaacaacatcatccccagattcgtgcaggtgagcgaggacagcggcagactgttcaagaagagcaaggaggtgggccagcagctgcaggacgacctgatgaaggtgctgaacgagctgtacagcgtgatgaagacctaccacatgtacaacgccgacagcatcagcgcccagagcaagctgaaggaggccgagaagcaggaggagaagcagatcggcaagagcgtgaagcaggaggacagacagacccccagaagccccgacagcaccgccaacgtgagaatcgaggagaagcacgtgagaagaagcagcgtgaagaagatcgagaagatgaaggagaagagacaggccaagtacaccgagaacaagctgaaggccatcaaggccagaaacgagtacctgctggccctggaggccaccaacgccagcgtgttcaagtactacatccacgacctgagcgacctgatcgactgctgcgacctgggctaccacgccagcctgaacagagccctgagaaccttcctgagcgccgagctgaacctggagcagagcaagcacgagggcctggacgccatcgagaacgccgtggagaacctggacgccaccagcgacaagcagagactgatggagatgtacaacaacgtgttctgcccccccatgaagttcgagttccagccccacatgggcgacatggccagccagctgtgcgcccagcagcccgtgcagagcgagctggtgcagagatgccagcagctgcagagcagactgagcaccctgaagatcgagaacgaggaggtgaagaagaccatggaggccaccctgcagaccatccaggacatcgtgaccgtggaggacttcgacgtgagcgactgcttccagtacagcaacagcatggagagcgtgaagagcaccgtgagcgagaccttcatgagcaagcccagcatcgccaagagaagagccaaccagcaggagaccgagcagttctacttcaccaagatgaaggagtacctggagggcagaaacctgatcaccaagctgcaggccaagcacgacctgctgcagaagaccctgggcgagagccagagaaccgactgcagcctggccagaagaagcagcaccgtgagaaagcaggacagcagccaggccatccccctggtggtggagagctgcatcagattcatcagcagacacggcctgcagcacgagggcatcttcagagtgagcggcagccaggtggaggtgaacgacatcaagaacgccttcgagagaggcgaggaccccctggccggcgaccagaacgaccacgacatggacagcatcgccggcgtgctgaagctgtacttcagaggcctggagcaccccctgttccccaaggacatcttccacgacctgatggcctgcgtgaccatggacaacctgcaggagagagccctgcacatcagaaaggtgctgctggtgctgcccaagaccaccctgatcatcatgagatacctgttcgccttcctgaaccacctgagccagttcagcgaggagaacatgatggacccctacaacctggccatctgcttcggccccagcctgatgagcgtgcccgagggccacgaccaggtgagctgccaggcccacgtgaacgagctgatcaagaccatcatcatccagcacgagaacatcttccccagccccagagagctggagggccccgtgtacagcagaggcggcagcatggaggactactgcgacagcccccacggcgagaccaccagcgtggaggacagcacccaggacgtgaccgccgagcaccacaccagcgacgacgagtgcgagcccatcgaggccatcgccaagttcgactacgtgggcagaaccgccagagagctgagcttcaagaagggcgccagcctgctgctgtaccagagagccagcgacgactggtgggagggcagacacaacggcatcgacggcctgatcccccaccagtacatcgtggtgcaggacaccctgatcagctag

SEQ ID NO: 99128 - DNA, 759 bp, synthetic construct
  misc_feature 1..759: note = Description of Artificial Sequence: Synthetic coding sequence
  source 1..759: mol_type = other DNA
atggaggactactgcgacagcccccacggcgagaccaccagcgtggaggacagcacccaggacgtgaccgccgagcaccacaccagcgacgacgagtgcgagcccatcgaggccatcgccaagttcgactacgtgggcagaaccgccagagagctgagcttcaagaagggcgccagcctgctgctgtaccagagagccagcgacgactggtgggagggcagacacaacggcatcgacggcctgatcccccaccagtacatcgtggtgcaggacaccgaggacggcgtggtggagagaagcagccccaagagcgagatcgaggtgatcagcgagccccccgaggagaaggtgaccgccagagccggcgccagctgccccagcggcggccacgtggccgacatctacctggccaacatcaacaacaacctgcacctggacaacaccaagcccgtgaccaccaagcagagaaagagacccgagagcggcagcatcagaaagaccttcagaagcgacagccacggcctgagcagcagcctgaccgacagcagcagccccggcgtgggcgccagctgcagacccagcagccagcccatcatgagccagagcctgcccaaggagggccccgacaagtgcagcatcagcggccacggcagcctgaacagcatcagcagacacagcagcctgaagaacagactggacagcccccagatcagaaagaccgccaccgccggcagaagcaagagcttcaacaaccactag

SEQ ID NO: 99129 - DNA, 693 bp, synthetic construct
  misc_feature 1..693: note = Description of Artificial Sequence: Synthetic coding sequence
  source 1..693: mol_type = other DNA
tgagccgagcaccacaccagcgacgacgagtgcgagcccatcgaggccatcgccaagttcgactacgtgggcagaaccgccagagagctgagcttcaagaagggcgccagcctgctgctgtaccagagagccagcgacgactggtgggagggcagacacaacggcatcgacggcctgatcccccaccagtacatcgtggtgcaggacaccgaggacggcgtggtggagagaagcagccccaagagcgagatcgaggtgatcagcgagccccccgaggagaaggtgaccgccagagccggcgccagctgccccagcggcggccacgtggccgacatctacctggccaacatcaacaacaacctgcacctggacaacaccaagcccgtgaccaccaagcagagaaagagacccgagagcggcagcatcagaaagaccttcagaagcgacagccacggcctgagcagcagcctgaccgacagcagcagccccggcgtgggcgccagctgcagacccagcagccagcccatcatgagccagagcctgcccaaggagggccccgacaagtgcagcatcagcggccacggcagcctgaacagcatcagcagacacagcagcctgaagaacagactggacagcccccagatcagaaagaccgccaccgccggcagaagcaagagcttcaacaaccactag

SEQ ID NO: 99130 - DNA, 1353 bp, synthetic construct
  misc_feature 1..1353: note = Description of Artificial Sequence: Synthetic coding sequence
  source 1..1353: mol_type = other DNA
gtgaagaagaccatggaggccaccctgcagaccatccaggacatcgtgaccgtggaggacttcgacgtgagcgactgcttccagtacagcaacagcatggagagcgtgaagagcaccgtgagcgagaccttcatgagcaagcccagcatcgccaagagaagagccaaccagcaggagaccgagcagttctacttcaccaagatgaaggagtacctggagggcagaaacctgatcaccaagctgcaggccaagcacgacctgctgcagaagaccctgggcgagagccagagaaccgactgcagcctggccagaagaagcagcaccgtgagaaagcaggacagcagccaggccatccccctggtggtggagagctgcatcagattcatcagcagacacggcctgcagcacgagggcatcttcagagtgagcggcagccaggtggaggtgaacgacatcaagaacgccttcgagagaggcgaggaccccctggccggcgaccagaacgaccacgacatggacagcatcgccggcgtgctgaagctgtacttcagaggcctggagcaccccctgttccccaaggacatcttccacgacctgatggcctgcgtgaccatggacaacctgcaggagagagccctgcacatcagaaaggtgctgctggtgctgcccaagaccaccctgatcatcatgagatacctgttcgccttcctgaaccacctgagccagttcagcgaggagaacatgatggacccctacaacctggccatctgcttcggccccagcctgatgagcgtgcccgagggccacgaccaggtgagctgccaggcccacgtgaacgagctgatcaagaccatcatcatccagcacgagaacatcttccccagccccagagagctggagggccccgtgtacagcagaggcggcagcatggaggactactgcgacagcccccacggcgagaccaccagcgtggaggacagcacccaggacgtgaccgccgagcaccacaccagcgacgacgagtgcgagcccatcgaggccatcgccaagttcgactacgtgggcagaaccgccagagagctgagcttcaagaagggcgccagcctgctgctgtaccagagagccagcgacgactggtgggagggcagacacaacggcatcgacggcctgatcccccaccagtacatcgtggtgcaggacaccgaggacggcgtggtggagagaagcagccccaagagcgagatcgaggtgatcagcgagccccccgaggagaaggtgaccgccagagccggcgccagctgccccagcggcggccacgtggccgacatctacctggccaacatcaacaagtag

SEQ ID NO: 99131 - DNA, 3228 bp, synthetic construct
  misc_feature 1..3228: note = Description of Artificial Sequence: Synthetic coding sequence
  source 1..3228: mol_type = other DNA
atgagcagccagaccaagttcaagaaggacaaggagatcatcgccgagtacgaggcccagatcaaggagatcagaacccagctggtggagcagttcaagtgcctggagcagcagagcgagagcagactgcagctgctgcaggacctgcaggagttcttcagaagaaaggccgagatcgagctggagtacagcagaagcctggagaagctggccgagagattcagcagcaagatcagaagcagcagagagcaccagttcaagaaggaccagtacctgctgagccccgtgaactgctggtacctggtgctgcaccagaccagaagagagagcagagaccacgccaccctgaacgacatcttcatgaacaacgtgatcgtgagactgagccagatcagcgaggacgtgatcagactgttcaagaagagcaaggagatcggcctgcagatgcacgaggagctgctgaaggtgaccaacgagctgtacaccgtgatgaagacctaccacatgtaccacgccgagagcatcagcgccgagagcaagctgaaggaggccgagaagcaggaggagaagcagttcaacaagagcggcgacctgagcatgaacctgctgagacacgaggacagaccccagagaagaagcagcgtgaagaagatcgagaagatgaaggagaagagacaggccaagtacagcgagaacaagctgaagtgcaccaaggccagaaacgactacctgctgaacctggccgccaccaacgccgccatcagcaagtactacatccacgacgtgagcgacctgatcgactgctgcgacctgggcttccacgccagcctggccagaaccttcagaacctacctgagcgccgagtacaacctggagaccagcagacacgagggcctggacgtgatcgagaacgccgtggacaacctggacagcagaagcgacaagcacaccgtgatggacatgtgcaaccaggtgttctgcccccccctgaagttcgagttccagccccacatgggcgacgaggtgtgccaggtgagcgcccagcagcccgtgcagaccgagctgctgatgagataccaccagctgcagagcagactggccaccctgaagatcgagaacgaggaggtgagaaagaccctggacgccaccatgcagaccctgcaggacatgctgaccgtggaggacttcgacgtgagcgacgccttccagcacagcagaagcaccgagagcgtgaagagcgccgccagcgagacctacatgagcaagatcaacatcgccaagagaagagccaaccagcaggagaccgagatgttctacttcaccaagttcaaggagtacgtgaacggcagcaacctgatcaccaagctgcaggccaagcacgacctgctgaagcagaccctgggcgagggcgagagagccgagtgcggcaccaccagaggcagaagaaacgccagaaccagaaaccaggacagcggccaggccatccccctggtggtggagagctgcatcagatacatcaacctgtacggcctgcagcagcagggcatcttcagagtgcccggcagccaggtggaggtgaacgacatcaagaacagcttcgagagaggcgaggaccccctggtggacgaccagaacgagagagacatcaacagcgtggccggcgtgctgaagctgtacttcagaggcctggagaaccccctgttccccaaggagagattccaggacctgatcagcaccatcaagctggagaaccccgccgagagagtgcaccagatccagcagatcctggtgaccctgcccagagtggtgatcgtggtgatgagatacctgttcgccttcctgaaccacctgagccagtacagcgacgagaacatgatggacccctacaacctggccatctgcttcggccccaccctgatgcacatccccgacggccaggaccccgtgagctgccaggcccacatcaacgaggtgatcaagaccatcatcatccaccacgaggccatcttccccagccccagagagctggagggccccgtgtacgagaagtgcatggccggcggcgaggagtactgcgacagcccccacagcgagcccggcgccatcgacgaggtggaccacgacaacggcaccgagccccacaccagcgacgaggaggtggagcagatcgaggccatcgccaagttcgactacatgggcagaagccccagagagctgagcttcaagaagggcgccagcctgctgctgtaccacagagccagcgaggactggtgggagggcagacacaacggcgtggacggcctgatcccccaccagtacatcgtggtgcaggacatggacgacgccttcagcgacagcctgagccagaaggccgacagcgaggccagcagcggccccctgctggacgacaaggccagcagcaagaacgacctgcagagccccaccgagcacatcagcgactacggcttcggcggcgtgatgggcagagtgagactgagaagcgacggcgccgccatccccagaagaagaagcggcggcgacacccacagcccccccagaggcctgggccccagcatcgacaccccccccagagccgccgcctgccccagcagcccccacaagatccccctgaccagaggcagaatcgagagccccgagaagagaagaatggccaccttcggcagcgccggcagcatcaactaccccgacaagaaggccctgagcgagggccacagcatgagaagcacctgcggcagcaccagacacagcagcctgggcgaccacaagagcctggaggccgaggccctggccgaggacatcgagaagaccatgagcaccgccctgcacgagctgagagagctggagagacagaacaccgtgaagcaggcccccgacgtggtgctggacaccctggagcccctgaagaacccccccggccccgtgagcagcgagcccgccagccccctgcacaccatcgtgatcagagaccccgacgccgccatgagaagaagcagcagcagcagcaccgagatgatgaccaccttcaagcccgccctgagcgccagactggccggcgcccagctgagacccccccccatgagacccgtgagacccgtggtgcagcacagaagcagcagcagcagcagcagcggcgtgggcagccccgccgtgacccccaccgagaagatgttccccaacagcagcgccgacaagagcggcaccatgtag

SEQ ID NO: 99132 - DNA, 3300 bp, synthetic construct
  misc_feature 1..3300: note = Description of Artificial Sequence: Synthetic coding sequence
  source 1..3300: mol_type = other DNA
atgagcagccagaccaagttcaagaaggacaaggagatcatcgccgagtacgaggcccagatcaaggagatcagaacccagctggtggagcagttcaagtgcctggagcagcagagcgagagcagactgcagctgctgcaggacctgcaggagttcttcagaagaaaggccgagatcgagctggagtacagcagaagcctggagaagctggccgagagattcagcagcaagatcagaagcagcagagagcaccagttcaagaaggaccagtacctgctgagccccgtgaactgctggtacctggtgctgcaccagaccagaagagagagcagagaccacgccaccctgaacgacatcttcatgaacaacgtgatcgtgagactgagccagatcagcgaggacgtgatcagactgttcaagaagagcaaggagatcggcctgcagatgcacgaggagctgctgaaggtgaccaacgagctgtacaccgtgatgaagacctaccacatgtaccacgccgagagcatcagcgccgagagcaagctgaaggaggccgagaagcaggaggagaagcagttcaacaagagcggcgacctgagcatgaacctgctgagacacgaggacagaccccagagaagaagcagcgtgaagaagatcgagaagatgaaggagaagagacaggccaagtacagcgagaacaagctgaagtgcaccaaggccagaaacgactacctgctgaacctggccgccaccaacgccgccatcagcaagtactacatccacgacgtgagcgacctgatcgactgctgcgacctgggcttccacgccagcctggccagaaccttcagaacctacctgagcgccgagtacaacctggagaccagcagacacgagggcctggacgtgatcgagaacgccgtggacaacctggacagcagaagcgacaagcacaccgtgatggacatgtgcaaccaggtgttctgcccccccctgaagttcgagttccagccccacatgggcgacgaggtgtgccaggtgagcgcccagcagcccgtgcagaccgagctgctgatgagataccaccagctgcagagcagactggccaccctgaagatcgagaacgaggaggtgagaaagaccctggacgccaccatgcagaccctgcaggacatgctgaccgtggaggacttcgacgtgagcgacgccttccagcacagcagaagcaccgagagcgtgaagagcgccgccagcgagacctacatgagcaagatcaacatcgccaagagaagagccaaccagcaggagaccgagatgttctacttcaccaagttcaaggagtacgtgaacggcagcaacctgatcaccaagctgcaggccaagcacgacctgctgaagcagaccctgggcgagggcgagagagccgagtgcggcaccaccagacccccctgcctgccccccaagccccagaagatgagaagacccagacccctgagcgtgtacagccacaagctgttcaacggcagcatggaggccttcatcaaggacagcggccaggccatccccctggtggtggagagctgcatcagatacatcaacctgtacggcctgcagcagcagggcatcttcagagtgcccggcagccaggtggaggtgaacgacatcaagaacagcttcgagagaggcgaggaccccctggtggacgaccagaacgagagagacatcaacagcgtggccggcgtgctgaagctgtacttcagaggcctggagaaccccctgttccccaaggagagattccaggacctgatcagcaccatcaagctggagaaccccgccgagagagtgcaccagatccagcagatcctggtgaccctgcccagagtggtgatcgtggtgatgagatacctgttcgccttcctgaaccacctgagccagtacagcgacgagaacatgatggacccctacaacctggccatctgcttcggccccaccctgatgcacatccccgacggccaggaccccgtgagctgccaggcccacatcaacgaggtgatcaagaccatcatcatccaccacgaggccatcttccccagccccagagagctggagggccccgtgtacgagaagtgcatggccggcggcgaggagtactgcgacagcccccacagcgagcccggcgccatcgacgaggtggaccacgacaacggcaccgagccccacaccagcgacgaggaggtggagcagatcgaggccatcgccaagttcgactacatgggcagaagccccagagagctgagcttcaagaagggcgccagcctgctgctgtaccacagagccagcgaggactggtgggagggcagacacaacggcgtggacggcctgatcccccaccagtacatcgtggtgcaggacatggacgacgccttcagcgacagcctgagccagaaggccgacagcgaggccagcagcggccccctgctggacgacaaggccagcagcaagaacgacctgcagagccccaccgagcacatcagcgactacggcttcggcggcgtgatgggcagagtgagactgagaagcgacggcgccgccatccccagaagaagaagcggcggcgacacccacagcccccccagaggcctgggccccagcatcgacaccccccccagagccgccgcctgccccagcagcccccacaagatccccctgaccagaggcagaatcgagagccccgagaagagaagaatggccaccttcggcagcgccggcagcatcaactaccccgacaagaaggccctgagcgagggccacagcatgagaagcacctgcggcagcaccagacacagcagcctgggcgaccacaagagcctggaggccgaggccctggccgaggacatcgagaagaccatgagcaccgccctgcacgagctgagagagctggagagacagaacaccgtgaagcaggcccccgacgtggtgctggacaccctggagcccctgaagaacccccccggccccgtgagcagcgagcccgccagccccctgcacaccatcgtgatcagagaccccgacgccgccatgagaagaagcagcagcagcagcaccgagatgatgaccaccttcaagcccgccctgagcgccagactggccggcgcccagctgagacccccccccatgagacccgtgagacccgtggtgcagcacagaagcagcagcagcagcagcagcggcgtgggcagccccgccgtgacccccaccgagaagatgttccccaacagcagcgccgacaagagcggcaccatgtag

SEQ ID NO: 99133 - DNA, 1008 bp, synthetic construct
  misc_feature 1..1008: note = Description of Artificial Sequence: Synthetic coding sequence
  source 1..1008: mol_type = other DNA
atgaacaacgtgatcgtgagactgagccagatcagcgaggacgtgatcagactgttcaagaagagcaaggagatcggcctgcagatgcacgaggagctgctgaaggtgaccaacgagctgtacaccgtgatgaagacctaccacatgtaccacgccgagagcatcagcgccgagagcaagctgaaggaggccgagaagcaggaggagaagcagttcaacaagagcggcgacctgagcatgaacctgctgagacacgaggacagaccccagagaagaagcagcgtgaagaagatcgagaagatgaaggagaagagacaggccaagtacagcgagaacaagctgaagtgcaccaaggccagaaacgactacctgctgaacctggccgccaccaacgccgccatcagcaagtactacatccacgacgtgagcgacctgatcgactgctgcgacctgggcttccacgccagcctggccagaaccttcagaacctacctgagcgccgagtacaacctggagaccagcagacacgagggcctggacgtgatcgagaacgccgtggacaacctggacagcagaagcgacaagcacaccgtgatggacatgtgcaaccaggtgttctgcccccccctgaagttcgagttccagccccacatgggcgacgaggtgtgccaggtgagcgcccagcagcccgtgcagaccgagctgctgatgagataccaccagctgcagagcagactggccaccctgaagatcgagaacgaggaggtgagaaagaccctggacgccaccatgcagaccctgcaggacatgctgaccgtggaggacttcgacgtgagcgacgccttccagcacagcagaagcaccgagagcgtgaagagcgccgccagcgagacctacatgagcaagatcaacatcgccaagagaagagccaaccagcaggagaccgagatgttctacttcaccaagggccccgacgacgtgttccccatctgccaccccagactgtag

SEQ ID NO: 99134 - DNA, 360 bp, synthetic construct
  misc_feature 1..360: note = Description of Artificial Sequence: Synthetic coding sequence
  source 1..360: mol_type = other DNA
atgagctggtggagaaacaacttctggatcatcctggccgtggccatcatcgtggtgagcgtgggcctgggcctgatcctgtactgcgtgtgcaagtggcagctgagaagaggcaagaagtgggagatcgccaagcccctgaagcacaagcaggtggacgaggagaagatgtacgacttcctgctgctgagaaccgcctgcagcctgccccccctgcccctgcactacagaaccagcatgaccgagacctacggcgtgctgctgtgcagacccggctggagcgccctggccagaagcagactgaccgccgccagcgccagctgggtgcaggccatcctgctgccccagccccccaagtag

SEQ ID NO: 99135 - DNA, 438 bp, synthetic construct
  misc_feature 1..438: note = Description of Artificial Sequence: Synthetic coding sequence
  source 1..438: mol_type = other DNA
atggacaccttcaccgtgcaggacagcaccgccatgagctggtggagaaacaacttctggatcatcctggccgtggccatcatcgtggtgagcgtgggcctgggcctgatcctgtactgcgtgtgcaagtggcagctgagaagaggcaagaagtgggagatcgccaagcccctgaagcacaagcaggtggacgaggagaagatgtacgagaacgtgctgaacgagagccccgtgcagctgccccccctgccccccagaaactggcccagcctggaggacagcagcccccaggaggcccccagccagccccccgccacctacagcctggtgaacaaggtgaagaacaagaagaccgtgagcatccccagctacatcgagcccgaggacgactacgacgacgtggagatccccgccaacaccgagaaggccagcttctag

SEQ ID NO: 99136 - DNA, 438 bp, synthetic construct; identical to SEQ ID NO: 99135
  misc_feature 1..438: note = Description of Artificial Sequence: Synthetic coding sequence
  source 1..438: mol_type = other DNA

SEQ ID NO: 99137 - DNA, 1398 bp, synthetic construct
  misc_feature 1..1398: note = Description of Artificial Sequence: Synthetic coding sequence
  source 1..1398: mol_type = other DNA
atgaacgtgaccagcctgttcagcttcaccagccccgccgtgaagagactgctgggctggaagcagggcgacgaggaggagaagtgggccgagaaggccgtggacgccctggtgaagaagctgaagaagaagaagggcgccatggaggagctggagaaggccctgagctgccccggccagcccagcaactgcgtgaccatccccagaagcctggacggcagactgcaggtgagccacagaaagggcctgccccacgtgatctactgcagagtgtggagatggcccgacctgcagagccaccacgagctgaagcccctggagtgctgcgagttccccttcggcagcaagcagaaggaggtgtgcatcaacccctaccactacaagagagtggagagccccgtgctgccccccgtgctggtgcccagacacagcgagtacaacccccagcacagcctgctggcccagttcagaaacctgggccagaacgagccccacatgcccctgaacgccaccttccccgacagcttccagcagcccaacagccaccccttcccccacagccccaacagcagctaccccaacagccccggcagcagcagcagcacctacccccacagccccaccagcagcgaccccggcagccccttccagatgcccgccgacacccccccccccgcctacctgccccccgaggaccccatgacccaggacggcagccagcccatggacaccaacatgatggccccccccctgcccagcgagatcaacagaggcgacgtgcaggccgtggcctacgaggagcccaagcactggtgcagcatcgtgtactacgagctgaacaacagagtgggcgaggccttccacgccagcagcaccagcgtgctggtggacggcttcaccgaccccagcaacaacaagaacagattctgcctgggcctgctgagcaacgtgaacagaaacagcaccatcgagaacaccagaagacacatcggcaagggcgtgcacctgtactacgtgggcggcgaggtgtacgccgagtgcctgagcgacagcagcatcttcgtgcagagcagaaactgcaactaccaccacggcttccaccccaccaccgtgtgcaagatccccagcggctgcagcctgaagatcttcaacaaccaggagttcgcccagctgctggcccagagcgtgaaccacggcttcgagaccgtgtacgagctgaccaagatgtgcaccatcagaatgagcttcgtgaagggctggggcgccgagtaccacagacaggacgtgaccagcaccccctgctggatcgagatccacctgcacggccccctgcagtggctggacaaggtgctgacccagatgggcagcccccacaaccccatcagcagcgtgagctag

SEQ ID NO: 99138 - DNA, 1398 bp, synthetic construct; identical to SEQ ID NO: 99137
  misc_feature 1..1398: note = Description of Artificial Sequence: Synthetic coding sequence
  source 1..1398: mol_type = other DNA

SEQ ID NO: 99139 - DNA, 177 bp, synthetic construct
  misc_feature 1..177: note = Description of Artificial Sequence: Synthetic coding sequence
  source 1..177: mol_type = other DNA
atgaacgtgaccagcctgttcagcttcaccagccccgccgtgaagagactgctgggctggaagcagggcgacgaggaggagaagtgggccgagaaggccgtggacgccctggtgaagaagctgaagaagaagaagggcgccatggaggagctggagaaggccctgagctgcccctag

SEQ ID NO: 99140 - DNA, 33 bp, synthetic construct
  misc_feature 1..33: note = Description of Artificial Sequence: Synthetic coding sequence
  source 1..33: mol_type = other DNA
atgaacgtgaccagcctgttcagcttcacctag

SEQ ID NO: 99141 - DNA, 288 bp, synthetic construct
  misc_feature 1..288: note = Description of Artificial Sequence: Synthetic coding sequence
  source 1..288: mol_type = other DNA
atgaacgtgaccagcctgttcagcttcaccagccccgccgtgaagagactgctgggctggaagcagggcgacgaggaggagaagtgggccgagaaggccgtggacgccctggtgaagaagctgaagaagaagaagggcgccatggaggagctggagaaggccctgagctgccccggccagcccagcaactgcgtgaccatccccagaagcctggacggcagactgcaggtgagccacagaaagggcctgccccacgtgatctactgcagagtgtggagatggccctag

SEQ ID NO: 99142 - DNA, 402 bp, synthetic construct
  misc_feature 1..402: note = Description of Artificial Sequence: Synthetic coding sequence
  source 1..402: mol_type = other DNA
atgaacgtgaccagcctgttcagcttcaccagccccgccgtgaagagactgctgggctggaagcagggcgacgaggaggagaagtgggccgagaaggccgtggacgccctggtgaagaagctgaagaagaagaagggcgccatggaggagctggagaaggccctgagctgccccggccagcccagcaactgcgtgaccatccccagaagcctggacggcagactgcaggtgagccacagaaagggcctgccccacgtgatctactgcagagtgtggagatggcccgacctgcagagccaccacgagctgaagcccctggagtgctgcgagttccccttcggcagcaagcagaaggaggtgtgcatcaacccctaccactacaagagagtggagagcccctag

SEQ ID NO: 99143 - DNA, 321 bp, synthetic construct
  misc_feature 1..321: note = Description of Artificial Sequence: Synthetic coding sequence
  source 1..321: mol_type = other DNA
atgaacgtgaccagcctgttcagcttcaccagccccgccgtgaagagactgctgggctggaagcagggcgacgaggaggagaagtgggccgagaaggccgtggacgccctggtgaagaagctgaagaagaagaagggcgccatggaggagctggagaaggccctgagctgccccggccagcccagcaactgcgtgaccatccccagaagcctggacggcagactgcaggtgagccacagaaagggcctgccccacgtgatctactgcagagtgtggagatggcccgacctgcagagccaccacgagctgaagcccctgtag

SEQ ID NO: 99144 - DNA, 339 bp, synthetic construct
  misc_feature 1..339: note = Description of Artificial Sequence: Synthetic coding sequence
  source 1..339: mol_type = other DNA
atgaacgtgaccagcctgttcagcttcaccagccccgccgtgaagagactgctgggctggaagcagggcgacgaggaggagaagtgggccgagaaggccgtggacgccctggtgaagaagctgaagaagaagaagggcgccatggaggagctggagaaggccctgagctgccccggccagcccagcaactgcgtgaccatccccagaagcctggacggcagactgcaggtgagccacagaaagggcctgccccacgtgatctactgcagagtgtggagatggcccgacctgcagagccaccacgagctgaagcccctggagtgctgcgagttcccctag

SEQ ID NO: 99145 - DNA, 1398 bp, synthetic construct; identical to SEQ ID NO: 99137
  misc_feature 1..1398: note = Description of Artificial Sequence: Synthetic coding sequence
  source 1..1398: mol_type = other DNA

SEQ ID NO: 99146 - DNA, 1659 bp, synthetic construct
  misc_feature 1..1659: note = Description of Artificial Sequence: Synthetic coding sequence
  source 1..1659: mol_type = other DNA
atggacaacatgagcatcaccaacacccccaccagcaacgacgcctgcctgagcatcgtgcacagcctgatgtgccacagacagggcggcgagagcgagaccttcgccaagagagccatcgagagcctggtgaagaagctgaaggagaagaaggacgagctggacagcctgatcaccgccatcaccaccaacggcgcccaccccagcaagtgcgtgaccatccagagaaccctggacggcagactgcaggtggccggcagaaagggcttcccccacgtgatctacgccagactgtggagatggcccgacctgcacaagaacgagctgaagcacgtgaagtactgccagtacgccttcgacctgaagtgcgacagcgtgtgcgtgaacccctaccactacgagagagtggtgagccccggcatcgacctgagcggcctgaccctgcagagcaacgcccccagcagcatgatggtgaaggacgagtacgtgcacgacttcgagggccagcccagcctgagcaccgagggccacagcatccagaccatccagcacccccccagcaacagagccagcaccgagacctacagcacccccgccctgctggcccccagcgagagcaacgccaccagcaccgccaacttccccaacatccccgtggccagcaccagccagcccgccagcatcctgggcggcagccacagcgagggcctgctgcagatcgccagcggcccccagcccggccagcagcagaacggcttcaccggccagcccgccacctaccaccacaacagcaccaccacctggaccggcagcagaaccgccccctacacccccaacctgccccaccaccagaacggccacctgcagcaccacccccccatgcccccccaccccggccactactggcccgtgcacaacgagctggccttccagccccccatcagcaaccaccccgcccccgagtactggtgcagcatcgcctacttcgagatggacgtgcaggtgggcgagaccttcaaggtgcccagcagctgccccatcgtgaccgtggacggctacgtggaccccagcggcggcgacagattctgcctgggccagctgagcaacgtgcacagaaccgaggccatcgagagagccagactgcacatcggcaagggcgtgcagctggagtgcaagggcgagggcgacgtgtgggtgagatgcctgagcgaccacgccgtgttcgtgcagagctactacctggacagagaggccggcagagcccccggcgacgccgtgcacaagatctaccccagcgcctacatcaaggtgttcgacctgagacagtgccacagacagatgcagcagcaggccgccaccgcccaggccgccgccgccgcccaggccgccgccgtggccggcaacatccccggccccggcagcgtgggcggcatcgcccccgccatcagcctgagcgccgccgccggcatcggcgtggacgacctgagaagactgtgcatcctgagaatgagcttcgtgaagggctggggccccgactaccccagacagagcatcaaggagaccccctgctggatcgagatccacctgcacagagccctgcagctgctggacgaggtgctgcacaccatgcccatcgccgacccccagcccctggactag

SEQ ID NO: 99147 - DNA, 1659 bp, synthetic construct; identical to SEQ ID NO: 99146
  misc_feature 1..1659: note = Description of Artificial Sequence: Synthetic coding sequence
  source 1..1659: mol_type = other DNA

SEQ ID NO: 99148 - DNA, 534 bp, synthetic construct
  misc_feature 1..534: note = Description of Artificial Sequence: Synthetic coding sequence
  source 1..534: mol_type = other DNA
atggacaacatgagcatcaccaacacccccaccagcaacgacgcctgcctgagcatcgtgcacagcctgatgtgccacagacagggcggcgagagcgagaccttcgccaagagagccatcgagagcctggtgaagaagctgaaggagaagaaggacgagctggacagcctgatcaccgccatcaccaccaacggcgcccaccccagcaagtgcgtgaccatccagagaaccctggacggcagactgcaggtggccggcagaaagggcttcccccacgtgatctacgccagactgtggagatggcccgacctgcacaagaacgagctgaagcacgtgaagtactgccagtacgccttcgacctgaagtgcgacagcgtgtgcgtgaacccctaccactacgagagagtggtgagccccggcatcgacctgagcggcctgaccctgcagagcaacgagaacaactggtacttcagccagctgctgctggacctggacaagggcatgatccaggagcaggccatccacggcccctag

SEQ ID NO: 99149 - DNA, 1311 bp, synthetic construct
  misc_feature 1..1311: note = Description of Artificial Sequence: Synthetic coding sequence
  source 1..1311: mol_type = other DNA
atggacaacatgagcatcaccaacacccccaccagcaacgacgcctgcctgagcatcgtgcacagcctgatgtgccacagacagggcggcgagagcgagaccttcgccaagagagccatcgagagcctggtgaagaagctgaaggagaagaaggacgagctggacagcctgatcaccgccatcaccaccaacggcgcccaccccagcaagtgcgtgaccatccagagaaccctggacggcagactgcaggtggccggcagaaagggcttcccccacgtgatctacgccagactgtggagatggcccgacctgcacaagaacgagctgaagcacgtgaagtactgccagtacgccttcgacctgaagtgcgacagcgtgtgcgtgaacccctaccactacgagagagtggtgagccccggcatcgacctgagcggcctgaccctgcagagcaacgcccccagcagcatgatggtgaaggacgagtacgtgcacgacttcgagggccagcccagcctgagcaccgagggccacagcatccagaccatccagcacccccccagcaacagagccagcaccgagacctacagcacccccgccctgctggcccccagcgagagcaacgccaccagcaccgccaacttccccaacatccccgtggccagcaccagccagcccgccagcatcctgggcggcagccacagcgagggcctgctgcagatcgccagcggcccccagcccggccagcagcagaacggcttcaccggccagcccgccacctaccaccacaacagcaccaccacctggaccggcagcagaaccgccccctacacccccaacctgccccaccaccagaacggccacctgcagcaccacccccccatgcccccccaccccggccactactggcccgtgcacaacgagctggccttccagccccccatcagcaaccaccccgcccccgagtactggtgcagcatcgcctacttcgagatggacgtgcaggtgggcgagaccttcaaggtgcccagcagctgccccatcgtgaccgtggacggctacgtggaccccagcggcggcgacagattctgcctgggccagctgagcaacgtgcacagaaccgaggccatcgagagagccagactgcacatcggcaagggcgtgcagctggagtgcaagggcgagggcgacgtgtgggtgagatgcctgagcgaccacgccgtgttcgtgcagagctactacctggacagagaggccggcagagcccccggcgacgccgtgcacaagatctaccccagcgcctacatcaagtag

SEQ ID NO: 99150 - DNA, 243 bp, synthetic construct
  misc_feature 1..243: note = Description of Artificial Sequence: Synthetic coding sequence
  source 1..243: mol_type = other DNA
atgaccagcatggccagcctgttcagcttcaccagccccgccgtgaagagactgctgggctggaagcagggcgacgaggaggagaagtgggccgagaaggccgtggacgccctggtgaagaagctgaagaagaagaagggcgccatggaggagctggagaaggccctgagcagccccggccagcccagcaagtgcgtgaccatccccagaagcctggacggcagactgcaggtgagccactag

SEQ ID NO: 99151 - DNA, 387 bp, synthetic construct
  misc_feature 1..387: note = Description of Artificial Sequence: Synthetic coding sequence
  source 1..387: mol_type = other DNA
atgaccagcatggccagcctgttcagcttcaccagccccgccgtgaagagactgctgggctggaagcagggcgacgaggaggagaagtgggccgagaaggccgtggacgccctggtgaagaagctgaagaagaagaagggcgccatggaggagctggagaaggccctgagcagccccggccagcccagcaagtgcgtgaccatccccagaagcctggacggcagactgcaggtgagccacagaaagggcctgccccacgtgatctactgcagagtgtggagatggcccgacctgcagagccaccacgagctgaagcccctggacatctgcgagttccccttcggcagcaagcagaaggaggtgtgcatcaacccctaccactactag

SEQ ID NO: 99152 - skipped

SEQ ID NO: 99153 - DNA, 405 bp, synthetic construct
  misc_feature 1..405: note = Description of Artificial Sequence: Synthetic coding sequence
  source 1..405: mol_type = other DNA
atgaccagcatggccagcctgttcagcttcaccagccccgccgtgaagagactgctgggctggaagcagggcgacgaggaggagaagtgggccgagaaggccgtggacgccctggtgaagaagctgaagaagaagaagggcgccatggaggagctggagaaggccctgagcagccccggccagcccagcaagtgcgtgaccatccccagaagcctggacggcagactgcaggtgagccacagaaagggcctgccccacgtgatctactgcagagtgtggagatggcccgacctgcagagccaccacgagctgaagcccctggacatctgcgagttccccttcggcagcaagcagaaggaggtgtgcatcaacccctaccactacaagagagtggagagcccctag

SEQ ID NO: 99154 - skipped

SEQ ID NO: 99155 - DNA, 1395 bp, synthetic construct
  misc_feature 1..1395: note = Description of Artificial Sequence: Synthetic coding sequence
  source 1..1395: mol_type = other DNA
atgaccagcatggccagcctgttcagcttcaccagccccgccgtgaagagactgctgggctggaagcagggcgacgaggaggagaagtgggccgagaaggccgtggacgccctggtgaagaagctgaagaagaagaagggcgccatggaggagctggagaaggccctgagcagccccggccagcccagcaagtgcgtgaccatccccagaagcctggacggcagactgcaggtgagccacagaaagggcctgccccacgtgatctactgcagagtgtggagatggcccgacctgcagagccaccacgagctgaagcccctggacatctgcgagttccccttcggcagcaagcagaaggaggtgtgcatcaacccctaccactacaagagagtggagagccccgtgctgccccccgtgctggtgcccagacacaacgagttcaacccccagcacagcctgctggtgcagttcagaaacctgagccacaacgagccccacatgccccagaacgccaccttccccgacagcttccaccagcccaacaacacccccttccccctgagccccaacagcccctacccccccagccccgccagcagcacctaccccaacagccccgccagcagcggccccggcagccccttccagctgcccgccgacacccccccccccgcctacatgccccccgacgaccagatgggccaggacaacagccagcccatggacaccagcaacaacatgatcccccagatcatgcccagcatcagcagcagagacgtgcagcccgtggcctacgaggagcccaagcactggtgcagcatcgtgtactacgagctgaacaacagagtgggcgaggccttccacgccagcagcaccagcgtgctggtggacggcttcaccgaccccagcaacaacaagagcagattctgcctgggcctgctgagcaacgtgaacagaaacagcaccatcgagaacaccagaagacacatcggcaagggcgtgcacctgtactacgtgggcggcgaggtgtacgccgagtgcctgagcgacagcagcatcttcgtgcagagcagaaactgcaacttccaccacggcttccaccccaccaccgtgtgcaagatccccagcagctgcagcctgaagatcttcaacaaccaggagttcgcccagctgctggcccagagcgtgaaccacggcttcgaggccgtgtacgagctgaccaagatgtgcaccatcagaatgagcttcgtgaagggctggggcgccgagtaccacagacaggacgtgaccagcaccccctgctggatcgagatcctgcacggccccctgcagtggctggacaaggtgctgacccagatgggcagccccctgaaccccatcagcagcgtgagctag

SEQ ID NO: 99156 - DNA, 1395 bp, synthetic construct; identical to SEQ ID NO: 99155
  misc_feature 1..1395: note = Description of Artificial Sequence: Synthetic coding sequence
  source 1..1395: mol_type = other DNA

SEQ ID NO: 99157 - DNA, 1491 bp, synthetic construct
  misc_feature 1..1491: note = Description of Artificial Sequence: Synthetic coding sequence
  source 1..1491: mol_type = other DNA
atgttcagaagcaagagaagcggcctggtgagaagactgtggagaagcagagtggtgcccgacagagaggagggcggcagcggcggcggcggcggcggcgacgaggacggcagcctgggcagcagagccgagcccgcccccagagccagagagggcggcggctgcggcagaagcgaggtgagacccgtggcccccagaagacccagagacgccgtgggccagagaggcgcccagggcgccggcagaagaagaagagccggcggcccccccagacccatgagcgagcccggcgccggcgccggcagcagcctgctggacgtggccgagcccggcggccccggctggctgcccgagagcgactgcgagaccgtgacctgctgcctgttcagcgagagagacgccgccggcgcccccagagacgccagcgaccccctggccggcgccgccctggagcccgccggcggcggcagaagcagagaggccagaagcagactgctgctgctggagcaggagctgaagaccgtgacctacagcctgctgaagagactgaaggagagaagcctggacaccctgctggaggccgtggagagcagaggcggcgtgcccggcggctgcgtgctggtgcccagagccgacctgagactgggcggccagcccgcccccccccagctgctgctgggcagactgttcagatggcccgacctgcagcacgccgtggagctgaagcccctgtgcggctgccacagcttcgccgccgccgccgacggccccaccgtgtgctgcaacccctaccacttcagcagactgtgcggccccgagagccccccccccccctacagcagactgagccccagagacgagtacaagcccctggacctgagcgacagcaccctgagctacaccgagaccgaggccaccaacagcctgatcaccgcccccggcgagttcagcgacgccagcatgagccccgacgccaccaagcccagccactggtgcagcgtggcctactgggagcacagaaccagagtgggcagactgtacgccgtgtacgaccaggccgtgagcatcttctacgacctgccccagggcagcggcttctgcctgggccagctgaacctggagcagagaagcgagagcgtgagaagaaccagaagcaagatcggcttcggcatcctgctgagcaaggagcccgacggcgtgtgggcctacaacagaggcgagcaccccatcttcgtgaacagccccaccctggacgcccccggcggcagagccctggtggtgagaaaggtgccccccggctacagcatcaaggtgttcgacttcgagagaagcggcctgcagcacgcccccgagcccgacgccgccgacggcccctacgaccccaacagcgtgagaatcagcttcgccaagggctggggcccctgctacagcagacagttcatcaccagctgcccctgctggctggagatcctgctgaacaaccccagatag

SEQ ID NO: 99158 - DNA, 708 bp, synthetic construct
  misc_feature 1..708: note = Description of Artificial Sequence: Synthetic coding sequence
  source 1..708: mol_type = other DNA
atgagcagaatgggcaagcccatcgagacccagaagagccccccccccccctacagcagactgagccccagagacgagtacaagcccctggacctgagcgacagcaccctgagctacaccgagaccgaggccaccaacagcctgatcaccgcccccggcgagttcagcgacgccagcatgagccccgacgccaccaagcccagccactggtgcagcgtggcctactgggagcacagaaccagagtgggcagactgtacgccgtgtacgaccaggccgtgagcatcttctacgacctgccccagggcagcggcttctgcctgggccagctgaacctggagcagagaagcgagagcgtgagaagaaccagaagcaagatcggcttcggcatcctgctgagcaaggagcccgacggcgtgtgggcctacaacagaggcgagcaccccatcttcgtgaacagccccaccctggacgcccccggcggcagagccctggtggtgagaaaggtgccccccggctacagcatcaaggtgttcgacttcgagagaagcggcctgcagcacgcccccgagcccgacgccgccgacggcccctacgaccccaacagcgtgagaatcagcttcgccaagggctggggcccctgctacagcagacagttcatcaccagctgcccctgctggctggagatcctgctgaacaaccccagatag

SEQ ID NO: 99159 - DNA, 1017 bp, synthetic construct
  misc_feature 1..1017: note = Description of Artificial Sequence: Synthetic coding sequence
  source 1..1017: mol_type = other DNA
atgttcagaagcaagagaagcggcctggtgagaagactgtggagaagcagagtggtgcccgacagagaggagggcggcagcggcggcggcggcggcggcgacgaggacggcagcctgggcagcagagccgagcccgcccccagagccagagagggcggcggctgcggcagaagcgaggtgagacccgtggcccccagaagacccagagacgccgtgggccagagaggcgcccagggcgccggcagaagaagaagagccggcggcccccccagacccatgagcgagcccggcgccggcgccggcagcagcctgctggacgtggccgagcccggcggccccggctggctgcccgagagcgactgcgagaccgtgacctgctgcctgttcagcgagagagacgccgccggcgcccccagagacgccagcgaccccctggccggcgccgccctggagcccgccggcggcggcagaagcagagaggccagaagcagactgctgctgctggagcaggagctgaagaccgtgacctacagcctgctgaagagactgaaggagagaagcctggacaccctgctggaggccgtggagagcagaggcggcgtgcccggcggctgcgtgctggtgcccagagccgacctgagactgggcggccagcccgcccccccccagctgctgctgggcagactgttcagatggcccgacctgcagcacgccgtggagctgaagcccctgtgcggctgccacagcttcgccgccgccgccgacggccccaccgtgtgctgcaacccctaccacttcagcagactgtgcggccccgagagccccccccccccctacagcagactgagccccagagacgagtacaagcccctggacctgagcgacagcaccctgagctacaccgagaccgaggccaccaacagcctgatcaccgcccccggcgagttcagcgccgccgacgccggcatcggcagcagaggcaacagaggcctggagagcagcgtgccctgcagctag

SEQ ID NO: 99160 - DNA, 1293 bp, synthetic construct
  misc_feature 1..1293: note = Description of Artificial Sequence: Synthetic coding sequence
  source 1..1293: mol_type = other DNA
atgcacagcaccacccccatcagcagcctgttcagcttcaccagccccgccgtgaagagactgctgggctggaagcagggcgacgaggaggagaagtgggccgagaaggccgtggacagcctggtgaagaagctgaagaagaagaagggcgccatggacgagctggagagagccctgagctgccccggccagcccagcaagtgcgtgaccatccccagaagcctggacggcagactgcaggtgagccacagaaagggcctgccccacgtgatctactgcagagtgtggagatggcccgacctgcagagccaccacgagctgaagcccctggagtgctgcgagttccccttcggcagcaagcagaaggaggtgtgcatcaacccctaccactacagaagagtggagacccccgtgctgccccccgtgctggtgcccagacacagcgagtacaacccccagctgagcctgctggccaagttcagaagcgccagcctgcacagcgagcccctgatgccccacaacgccacctaccccgacagcttccagcagcccccctgcagcgccctgccccccagccccagccacgccttcagccagagcccctgcaccgccagctacccccacagccccggcagccccagcgagcccgagagcccctaccagcacagcgacttcagacccgtgtgctacgaggagccccagcactggtgcagcgtggcctactacgagctgaacaacagagtgggcgagaccttccaggccagcagcagaagcgtgctgatcgacggcttcaccgaccccagcaacaacagaaacagattctgcctgggcctgctgagcaacgtgaacagaaacagcaccatcgagaacaccagaagacacatcggcaagggcgtgcacctgtactacgtgggcggcgaggtgtacgccgagtgcgtgagcgacagcagcatcttcgtgcagagcagaaactgcaactaccagcacggcttccaccccgccaccgtgtgcaagatccccagcggctgcagcctgaaggtgttcaacaaccagctgttcgcccagctgctggcccagagcgtgcaccacggcttcgaggtggtgtacgagctgaccaagatgtgcaccatcagaatgagcttcgtgaagggctggggcgccgagtaccacagacaggacgtgaccagcaccccctgctggatcgagatccacctgcacggccccctgcagtggctggacaaggtgctgacccagatgggcagcccccacaaccccatcagcagcgtgagctag

SEQ ID NO: 99161 - DNA, 1404 bp, synthetic construct
  misc_feature 1..1404: note = Description of Artificial Sequence: Synthetic coding sequence
  source 1..1404: mol_type = other DNA
atgcacagcaccacccccatcagcagcctgttcagcttcaccagccccgccgtgaagagactgctgggctggaagcagggcgacgaggaggagaagtgggccgagaaggccgtggacagcctggtgaagaagctgaagaagaagaagggcgccatggacgagctggagagagccctgagctgccccggccagcccagcaagtgcgtgaccatccccagaagcctggacggcagactgcaggtgagccacagaaagggcctgccccacgtgatctactgcagagtgtggagatggcccgacctgcagagccaccacgagctgaagcccctggagtgctgcgagttccccttcggcagcaagcagaaggaggtgtgcatcaacccctaccactacagaagagtggagacccccgtgctgccccccgtgctggtgcccagacacagcgagtacaacccccagctgagcctgctggccaagttcagaagcgccagcctgcacagcgagcccctgatgccccacaacgccacctaccccgacagcttccagcagcccccctgcagcgccctgccccccagccccagccacgccttcagccagagcccctgcaccgccagctacccccacagccccggcagccccagcgagcccgagagcccctaccagcacagcgtggacaccccccccctgccctaccacgccaccgaggccagcgagacccagagcggccagcccgtggacgccaccgccgacagacacgtggtgctgagcatccccaacggcgacttcagacccgtgtgctacgaggagccccagcactggtgcagcgtggcctactacgagctgaacaacagagtgggcgagaccttccaggccagcagcagaagcgtgctgatcgacggcttcaccgaccccagcaacaacagaaacagattctgcctgggcctgctgagcaacgtgaacagaaacagcaccatcgagaacaccagaagacacatcggcaagggcgtgcacctgtactacgtgggcggcgaggtgtacgccgagtgcgtgagcgacagcagcatcttcgtgcagagcagaaactgcaactaccagcacggcttccaccccgccaccgtgtgcaagatccccagcggctgcagcctgaaggtgttcaacaaccagctgttcgcccagctgctggcccagagcgtgcaccacggcttcgaggtggtgtacgagctgaccaagatgtgcaccatcagaatgagcttcgtgaagggctggggcgccgagtaccacagacaggacgtgaccagcaccccctgctggatcgagatccacctgcacggccccctgcagtggctggacaaggtgctgacccagatgggcagcccccacaaccccatcagcagcgtgagctag

SEQ ID NO: 99162 - DNA, 1404 bp, synthetic construct; identical to SEQ ID NO: 99161
  misc_feature 1..1404: note = Description of Artificial Sequence: Synthetic coding sequence
  source 1..1404: mol_type = other DNA

SEQ ID NO: 99163 - DNA, 1191 bp, synthetic construct
  misc_feature 1..1191: note = Description of Artificial Sequence: Synthetic coding sequence
  source 1..1191: mol_type = other DNA
atgaaggccgtgaagagcgagagagagagaggcagcagaagaagacacagagacggcgacgtggtgctgcccgccggcgtggtggtgaagcaggagagactgagccccgaggtggccccccccgcccacagaagacccgaccacagcggcggcagccccagcccccccaccagcgagcccgccagaagcggccacagaggcaacagagccagaggcgtgagcagaagcccccccaagaagaagaacaaggccagcggcagaagaagcaagagccccagaagcaagagaaacagaagcccccaccacagcaccgtgaaggtgaagcaggagagagaggaccaccccagaagaggcagagaggacagacagcacagagagcccagcgagcaggagcacagaagagccagaaacagcgacagagacagacacagaggccacagccaccagagaagaaccagcaacgagagacccggcagcggccagggccagggcagagacagagacacccagaacctgcaggcccaggaggaggagagagagttctacaacgccagaagaagagagcacagacagagaaacgacgtgggcggcggcggcagcgagagccaggagctggtgcccagacccggcggcaacaacaaggagaaggaggtgcccgccaaggagaagcccagcttcgagctgagcggcgccctgctggaggacaccaacaccttcagaggcgtggtgatcaagtacagcgagccccccgaggccagaatccccaagaagagatggagactgtaccccttcaagaacgacgaggtgctgcccgtgatgtacatccacagacagagcgcctacctgctgggcagacacagaagaatcgccgacatccccatcgaccaccccagctgcagcaagcagcacgccgtgttccagtacagactggtggagtacaccagagccgacggcaccgtgggcagaagagtgaagccctacatcatcgacctgggcagcggcaacggcaccttcctgaacaacaagagaatcgagccccagagatactacgagctgaaggagaaggacgtgctgaagttcggcttcagcagcagagagtacgtgctgctgcacgagagcagcgacaccagcgagatcgacagaaaggacgacgaggacgaggaggaggaggaggaggtgagcgacagctag

SEQ ID NO: 99164 - DNA, 1143 bp, synthetic construct
  misc_feature 1..1143: note = Description of Artificial Sequence: Synthetic coding sequence
  source 1..1143: mol_type = other DNA
atgaaggccgtgaagagcgagagagagggcgtggtggtgaagcaggagagactgagccccgaggtggccccccccgcccacagaagacccgaccacagcggcggcagccccagcccccccaccagcgagcccgccagaagcggccacagaggcaacagagccagaggcgtgagcagaagcccccccaagaagaagaacaaggccagcggcagaagaagcaagagccccagaagcaagagaaacagaagcccccaccacagcaccgtgaaggtgaagcaggagagagaggaccaccccagaagaggcagagaggacagacagcacagagagcccagcgagcaggagcacagaagagccagaaacagcgacagagacagacacagaggccacagccaccagagaagaaccagcaacgagagacccggcagcggccagggccagggcagagacagagacacccagaacctgcaggcccaggaggaggagagagagttctacaacgccagaagaagagagcacagacagagaaacgacgtgggcggcggcggcagcgagagccaggagctggtgcccagacccggcggcaacaacaaggagaaggaggtgcccgccaaggagaagcccagcttcgagctgagcggcgccctgctggaggacaccaacaccttcagaggcgtggtgatcaagtacagcgagccccccgaggccagaatccccaagaagagatggagactgtaccccttcaagaacgacgaggtgctgcccgtgatgtacatccacagacagagcgcctacctgctgggcagacacagaagaatcgccgacatccccatcgaccaccccagctgcagcaagcagcacgccgtgttccagtacagactggtggagtacaccagagccgacggcaccgtgggcagaagagtgaagccctacatcatcgacctgggcagcggcaacggcaccttcctgaacaacaagagaatcgagccccagagatactacgagctgaaggagaaggacgtgctgaagttcggcttcagcagcagagagtacgtgctgctgcacgagagcagcgacaccagcgagatcgacagaaaggacgacgaggacgaggaggaggaggaggaggtgagcgacagctag

SEQ ID NO: 99165 - DNA, 2274 bp, synthetic construct
  misc_feature 1..2274: note = Description of Artificial Sequence: Synthetic coding sequence
  source 1..2274: mol_type = other DNA
atgagcaaccccggcaccagaagaaacggcagcagcatcaagatcagactgaccgtgctgtgcgccaagaacctggccaagaaggacttcttcagactgcccgaccccttcgccaagatcgtggtggacggcagcggccagtgccacagcaccgacaccgtgaagaacaccctggaccccaagtggaaccagcactacgacctgtacgtgggcaagaccgacagcatcaccatcagcgtgtggaaccacaagaagatccacaagaagcagggcgccggcttcctgggctgcgtgagactgctgagcaacgccatcagcagactgaaggacaccggctaccagagactggacctgtgcaagctgaaccccagcgacaccgacgccgtgagaggccagatcgtggtgagcctgcagaccagagacagaatcggcaccggcggcagcgtggtggactgcagaggcctgctggagaacgagggcaccgtgtacgaggacagcggccccggcagacccctgagctgcttcatggaggagcccgccccctacaccgacagcaccggcgccgccgccggcggcggcaactgcagattcgtggagagccccagccaggaccagagactgcaggcccagagactgagaaaccccgacgtgagaggcagcctgcagaccccccagaacagaccccacggccaccagagccccgagctgcccgagggctacgagcagagaaccaccgtgcagggccaggtgtacttcctgcacacccagaccggcgtgagcacctggcacgaccccagaatccccagccccagcggcaccatccccggcggcgacgccgccttcctgtacgagttcctgctgcagggccacaccagcgagcccagagacctgaacagcgtgaactgcgacgagctgggccccctgccccccggctgggaggtgagaagcaccgtgagcggcagaatctacttcgtggaccacaacaacagaaccacccagttcaccgaccccagactgcaccacatcatgaaccaccagtgccagctgaaggagcccagccagcccctgcccctgcccagcgagggcagcctggaggacgaggagctgcccgcccagagatacgagagagacctggtgcagaagctgaaggtgctgagacacgagctgagcctgcagcagccccaggccggccactgcagaatcgaggtgagcagagaggagatcttcgaggagagctacagacagatcatgaagatgagacccaaggacctgaagaagagactgatggtgaagttcagaggcgaggagggcctggactacggcggcgtggccagagagtggctgtacctgctgtgccacgagatgctgaacccctactacggcctgttccagtacagcaccgacaacatctacatgctgcagatcaaccccgacagcagcatcaaccccgaccacctgagctacttccacttcgtgggcagaatcatgggcctggccgtgttccacggccactacatcaacggcggcttcaccgtgcccttctacaagcagctgctgggcaagcccatccagctgagcgacctggagagcgtggaccccgagctgcacaagagcctggtgtggatcctggagaacgacatcacccccgtgctggaccacaccttctgcgtggagcacaacgccttcggcagaatcctgcagcacgagctgaagcccaacggcagaaacgtgcccgtgaccgaggagaacaagaaggagtacgtgagactgtacgtgaactggagattcatgagaggcatcgaggcccagttcctggccctgcagaagggcttcaacgagctgatcccccagcacctgctgaagcccttcgaccagaaggagctggagctgatcatcggcggcctggacaagatcgacctgaacgactggaagagcaacaccagactgaagcactgcgtggccgacagcaacatcgtgagatggttctggcaggccgtggagaccttcgacgaggagagaagagccagactgctgcagttcgtgaccggcagcaccagagtgcccctgcagggcttcaaggccctgcagggcagcaccggcgccgccggccccagactgttcaccatccacctgatcgacgccaacaccgacaacctgcccaaggcccacacctgcttcaacagaatcgacatccccccctacgagagctacgagaagctgtacgagaagctgctgaccgccgtggaggagacctgcggcttcgccgtggagtag

SEQ ID NO: 99166 - DNA, 2196 bp, synthetic construct
  misc_feature 1..2196: note = Description of Artificial Sequence: Synthetic coding sequence
  source 1..2196: mol_type = other DNA
atgagcaaccccggcaccagaagaaacggcagcagcatcaagatcagactgaccgtgctgtgcgccaagaacctggccaagaaggacttcttcagactgcccgaccccttcgccaagatcgtggtggacggcagcggccagtgccacagcaccgacaccgtgaagaacaccctggaccccaagtggaaccagcactacgacctgtacgtgggcaagaccgacagcatcaccatcagcgtgtggaaccacaagaagatccacaagaagcagggcgccggcttcctgggctgcgtgagactgctgagcaacgccatcagcagactgaaggacaccggctaccagagactggacctgtgcaagctgaaccccagcgacaccgacgccgtgagaggccagatcgtggtgagcctgcagaccagagacagaatcggcaccggcggcagcgtggtggactgcagaggcctgctggagaacgagggcaccgtgtacgaggacagcggccccggcagacccctgagctgcttcatggaggagcccgccccctacaccgacagcaccggcgccgccgccggcggcggcaactgcagattcgtggagagccccagccaggaccagagactgcaggcccagagactgagaaaccccgacgtgagaggcagcctgcagaccccccagaacagaccccacggccaccagagccccgagctgcccgagggctacgagcagagaaccaccgtgcagggccaggtgtacttcctgcacacccagaccggcgtgagcacctggcacgaccccagaatccccagagacctgaacagcgtgaactgcgacgagctgggccccctgccccccggctgggaggtgagaagcaccgtgagcggcagaatctacttcgtggaccacaacaacagaaccacccagttcaccgaccccagactgcaccacatcatgaaccaccagtgccagctgaaggagcccagccagcccctgcccctgcccagcgagggcagcctggaggacgaggagctgcccgcccagagatacgagagagacctggtgcagaagctgaaggtgctgagacacgagctgagcctgcagcagccccaggccggccactgcagaatcgaggtgagcagagaggagatcttcgaggagagctacagacagatcatgaagatgagacccaaggacctgaagaagagactgatggtgaagttcagaggcgaggagggcctggactacggcggcgtggccagagagtggctgtacctgctgtgccacgagatgctgaacccctactacggcctgttccagtacagcaccgacaacatctacatgctgcagatcaaccccgacagcagcatcaaccccgaccacctgagctacttccacttcgtgggcagaatcatgggcctggccgtgttccacggccactacatcaacggcggcttcaccgtgcccttctacaagcagctgctgggcaagcccatccagctgagcgacctggagagcgtggaccccgagctgcacaagagcctggtgtggatcctggagaacgacatcacccccgtgctggaccacaccttctgcgtggagcacaacgccttcggcagaatcctgcagcacgagctgaagcccaacggcagaaacgtgcccgtgaccgaggagaacaagaaggagtacgtgagactgtacgtgaactggagattcatgagaggcatcgaggcccagttcctggccctgcagaagggcttcaacgagctgatcccccagcacctgctgaagcccttcgaccagaaggagctggagctgatcatcggcggcctggacaagatcgacctgaacgactggaagagcaacaccagactgaagcactgcgtggccgacagcaacatcgtgagatggttctggcaggccgtggagaccttcgacgaggagagaagagccagactgctgcagttcgtgaccggcagcaccagagtgcccctgcagggcttcaaggccctgcagggcagcaccggcgccgccggccccagactgttcaccatccacctgatcgacgccaacaccgacaacctgcccaaggcccacacctgcttcaacagaatcgacatccccccctacgagagctacgagaagctgtacgagaagctgctgaccgccgtggaggagacctgcggcttcgccgtggagtag

SEQ ID NO: 99167 - DNA, 1323 bp, synthetic construct
  misc_feature 1..1323: note = Description of Artificial Sequence: Synthetic coding sequence
  source 1..1323: mol_type = other DNA
atggccaccagaagctgcagagagaaggcccagaagctgaacgagcagcaccagctgatcctgagcaagctgctgagagaggaggacaacaagtactgcgccgactgcgaggccaagggccccagatgggccagctggaacatcggcgtgttcatctgcatcagatgcgccggcatccacagaaacctgggcgtgcacatcagcagagtgaagagcgtgaacctggaccagtggaccgccgagcagatccagtgcatgcaggacatgggcaacaccaaggccagactgctgtacgaggccaacctgcccgagaacttcagaagaccccagaccgaccaggccgtggagttcttcatcagagacaagtacgagaagaagaagtactacgacaagaacgccatcgccatcaccaacaaggagaaggagaagaagaaggaggagaagaagagagagaaggagcccgagaagcccgccaagcccctgaccgccgagaagctgcagaagaaggaccagcagctggagcccaagaagagcaccagccccaagaaggccgccgagcccaccgtggacctgctgggcctggacggccccgccgtggcccccgtgaccaacggcaacaccaccgtgccccccctgaacgacgacctggacatcttcggccccatgatcagcaaccccctgcccgccaccgtgatgccccccgcccagggcacccccagcgcccccgccgccgccaccctgagcaccgtgaccagcggcgacctggacctgttcaccgagcagaccaccaagagcgaggaggtggccaagaagcagctgagcaaggacagcatcctgagcctgtacggcaccggcaccatccagcagcagagcacccccggcgtgttcatgggccccaccaacatccccttcaccagccaggcccccgccgccttccagggcttccccagcatgggcgtgcccgtgcccgccgcccccggcctgatcggcaacgtgatgggccagagccccagcatgatggtgggcatgcccatgcccaacggcttcatgggcaacgcccagaccggcgtgatgcccctgccccagaacgtggtgggcccccagggcggcatggtgggccagatgggcgccccccagagcaagttcggcctgccccaggcccagcagccccagtggagcctgagccagatgaaccagcagatggccggcatgagcatcagcagcgccacccccaccgccggcttcggccagcccagcagcaccaccgccggctggagcggcagcagcagcggccagaccctgagcacccagctgtggaagtag

SEQ ID NO: 99168 - DNA, 489 bp, synthetic construct
  misc_feature 1..489: note = Description of Artificial Sequence: Synthetic coding sequence
  source 1..489: mol_type = other DNA
atgggcaacaccaaggccagactgctgtacgaggccaacctgcccgagaacttcagaagaccccagaccgaccaggccgtggagttcttcatcagagacaagtacgagaagaagaagtactacgacaagaacgccatcgccatcaccaacatcagcagcagcgacgcccccctgcagcccctggtgagcagccccagcctgcaggccgccgtggacaagaacaagctggagaaggagaaggagaagaagaaggaggagaagaagagagagaaggagcccgagaagcccgccaagcccctgaccgccgagaagctgcagaagaaggaccagcagctggagcccaagaagagcaccagccccaagaaggccgccgagcccaccgtggacctgctgggcctggtgtggagaaagatcgagaaggagaagagcgagagacagctggtggaggtggaggagctgaccttcatgtactgcttccccaagaactag

SEQ ID NO: 99169 - DNA, 1311 bp, synthetic construct
  misc_feature 1..1311: note = Description of Artificial Sequence: Synthetic coding sequence
  source 1..1311: mol_type = other DNA
atggccaccagaagctgcagagagaaggcccagaagctgaacgagcagcaccagctgatcctgagcaagctgctgagagaggaggacaacaagtactgcgccgactgcgaggccaagggccccagatgggccagctggaacatcggcgtgttcatctgcatcagatgcgccggcatccacagaaacctgggcgtgcacatcagcagagtgaagagcgtgaacctggaccagtggaccgccgagcagatccagtgcatgcaggacatgggcaacaccaaggccagactgctgtacgaggccaacctgcccgagaacttcagaagaccccagaccgaccaggccgtggagttcttcatcagagacaagtacgagaagaagaagtactacgacaagaacgccatcgccatcaccaacaaggagaaggagaagaagaaggaggagaagaagagagagaaggagcccgagaagcccgccaagcccctgaccgccgagaagctgcagaagaaggaccagcagctggagcccaagaagagcaccagccccaagaaggccgccgagcccaccgtggacctgctgggcctggacggccccgccgtggcccccgtgaccaacggcaacaccaccgtgccccccctgaacgacgacctggacatcttcggccccatgatcagcaaccccctgcccgccaccgtgatgccccccgcccagggcacccccagcgcccccgccgccgccaccctgagcaccgtgaccagcggcgacctggacctgttcaccgagcagaccaccaagagcgaggaggtggccaagaagcagctgagcaaggacagcatcctgagcctgtacggcaccggcaccatccagcagcagagcacccccggcgtgttcatgggccccaccaacatccccttcaccagccaggcccccgccgccttccagggcttccccagcatgggcgtgcccgtgcccgccgcccccggcctgatcggcaacgtgatgggccagagccccagcatgatggtgggcatgcccatgcccaacggcttcatgggcaacgcccagaccggcgtgatgcccctgccccagaacgtggtgggcccccagggcggcatggtgggccagatgggcgccccccagagcaagttcggcctgccccaggcccagcagccccagtggagcctgagccagatcatgcagaagggcgacgccgtgctgcagcacagcatcagcgccatctactggcccatgaccagatggctgaagtgccccctggtggacgagagcgccgacggctggcacgagtaccagtag

SEQ ID NO: 99170 - DNA, 1404 bp, synthetic construct
  misc_feature 1..1404: note = Description of Artificial Sequence: Synthetic coding sequence
  source 1..1404: mol_type = other DNA
atggccaccagaagctgcagagagaaggcccagaagctgaacgagcagcaccagctgatcctgagcaagctgctgagagaggaggacaacaagtactgcgccgactgcgaggccaagggccccagatgggccagctggaacatcggcgtgttcatctgcatcagatgcgccggcatccacagaaacctgggcgtgcacatcagcagagtgaagagcgtgaacctggaccagtggaccgccgagcagatccagtgcatgcaggacatgggcaacaccaaggccagactgctgtacgaggccaacctgcccgagaacttcagaagaccccagaccgaccaggccgtggagttcttcatcagagacaagtacgagaagaagaagtactacgacaagaacgccatcgccatcaccaacatcagcagcagcgacgcccccctgcagcccctggtgagcagccccagcctgcaggccgccgtggacaagaacaagctggagaaggagaaggagaagaagaaggaggagaagaagagagagaaggagcccgagaagcccgccaagcccctgaccgccgagaagctgcagaagaaggaccagcagctggagcccaagaagagcaccagccccaagaaggccgccgagcccaccgtggacctgctgggcctggacggccccgccgtggcccccgtgaccaacggcaacaccaccgtgccccccctgaacgacgacctggacatcttcggccccatgatcagcaaccccctgcccgccaccgtgatgccccccgcccagggcacccccagcgcccccgccgccgccaccctgagcaccgtgaccagcggcgacctggacctgttcaccgagcagaccaccaagagcgaggaggtggccaagaagcagctgagcaaggacagcatcctgagcctgtacggcaccggcaccatccagcagcagagcacccccggcgtgttcatgggccccaccaacatccccttcaccagccaggcccccgccgccttccagggcttccccagcatgggcgtgcccgtgcccgccgcccccggcctgatcggcaacgtgatgggccagagccccagcatgatggtgggcatgcccatgcccaacggcttcatgggcaacgcccagaccggcgtgatgcccctgccccagaacgtggtgggcccccagggcggcatggtgggccagatgggcgccccccagagcaagttcggcctgccccaggcccagcagccccagtggagcctgagccagatgaaccagcagatggccggcatgagcatcagcagcgccacccccaccgccggcttcggccagcccagcagcaccaccgccggctggagcggcagcagcagcggccagaccctgagcacccagctgtggaagtag

SEQ ID NO: 99171 - DNA, 414 bp, synthetic construct
  misc_feature 1..414: note = Description of Artificial Sequence: Synthetic coding sequence
  source 1..414: mol_type = other DNA
atggccaccagaagctgcagagagaaggcccagaagctgaacgagcagcaccagctgatcctgagcaagctgctgagagaggaggacaacaagtactgcgccgactgcgaggccaagggccccagatgggccagctggaacatcggcgtgttcatctgcatcagatgcgccggcatccacagaaacctgggcgtgcacatcagcagagtgaagagcgtgaacctggaccagtggaccgccgagcagatccagtgcatgcaggacatgggcaacaccaaggccagactgctgtacgaggccaacctgcccgagaacttcagaagaccccagaccgaccacgaggacatcatcctggagaccaccgccgtgatcaccctgctgctgaacaagtgcctgccctacgccaagccctag

SEQ ID NO: 99172 - DNA, 378 bp, synthetic construct
  misc_feature 1..378: note = Description of Artificial Sequence: Synthetic coding sequence
  source 1..378: mol_type = other DNA
tgaaagtactacgacaagaacgccatcgccatcaccaacatcagcagcagcgacgcccccctgcagcccctggtgagcagccccagcctgcaggccgccgtggacaagaacaagctggagaaggagaaggagaagaagaaggaggagaagaagagagagaaggagcccgagaagcccgccaagcccctgaccgccgagaagctgcagaagaaggaccagcagctggagcccaagaagagcaccagccccaagaaggccgccgagcccaccgtggacctgctgggcctggtgtggagaaagatcgagaaggagaagagcgagagacagctggtggaggtggaggagctgaccttcatgtactgcttccccaagaactag

SEQ ID NO: 99173 - DNA, 189 bp, synthetic construct
  misc_feature 1..189: note = Description of Artificial Sequence: Synthetic coding sequence
  source 1..189: mol_type = other DNA
atgctgttcctgaagctgagcgtgttcagagccgtggagttcttcatcagagacaagtacgagaagaagaagtactacgacaagaacgccatcgccatcaccaacatcagcagcagcgacgcccccctgcagcccctggtgagcagccccagcctgcaggccgccgtggacaagaacaagctggagtag

SEQ ID NO: 99174 - DNA, 1200 bp, synthetic construct
  misc_feature 1..1200: note = Description of Artificial Sequence: Synthetic coding sequence
  source 1..1200: mol_type = other DNA
atgatcttcaagggccccagatgggccagctggaacatcggcgtgttcatctgcatcagatgcgccggcatccacagaaacctgggcgtgcacatcagcagagtgaagagcgtgaacctggaccagtggacccaggagcagatccagtgcatgcaggagatgggcaacggcaaggccaacagactgtacgaggcctacctgcccgagaccttcagaagaccccagatcgaccccgccgtggagggcttcatcagagacaagtacgagaagaagaagtacatggacagaagcctggacatcaacgccttcagaaaggagaaggacgacaagtggaagagaggcagcgagcccgtgcccgagaagaagctggagcccgtggtgttcgagaaggtgaagatgccccagaagaaggaggacccccagctgcccagaaagagcagccccaagagcaccgcccccgtgatggacctgctgggcctggacgcccccgtggcctgcagcatcgccaacagcaagaccagcaacaccctggagaaggacctggacctgctggccagcgtgcccagccccagcagcagcggcagcagaaaggtggtgggcagcatgcccaccgccggcagcgccggcagcgtgcccgagaacctgaacctgttccccgagcccggcagcaagagcgaggagatcggcaagaagcagctgagcaaggacagcatcctgagcctgtacggcagccagaccccccagatgcccacccaggccatgttcatggcccccgcccagatggcctaccccaccgcctaccccagcttccccggcgtgaccccccccaacagcatcatgggcagcatgatgcccccccccgtgggcatggtggcccagcccggcgccagcggcatggtggcccccatggccatgcccgccggctacatgggcggcatgcaggccagcatgatgggcgtgcccaacggcatgatgaccacccagcaggccggctacatggccggcatggccgccatgccccagaccgtgtacggcgtgcagcccgcccagcagctgcagtggaacctgacccagatgacccagcagatggccggcatgaacttctacggcgccaacggcatgatgaactacggccagagcatgagcggcggcaacggccaggccgccaaccagaccctgagcccccagatgtggaagtag

SEQ ID NO: 99175 - DNA, 1290 bp, synthetic construct
  misc_feature 1..1290: note = Description of Artificial Sequence: Synthetic coding sequence
  source 1..1290: mol_type = other DNA
atgaccggcaagagcgtgaaggacgtggacagataccaggccgtgctggccaacctgctgctggaggaggacaacaagttctgcgccgactgccagagcaagggccccagatgggccagctggaacatcggcgtgttcatctgcatcagatgcgccggcatccacagaaacctgggcgtgcacatcagcagagtgaagagcgtgaacctggaccagtggacccaggagcagatccagtgcatgcaggagatgggcaacggcaaggccaacagactgtacgaggcctacctgcccgagaccttcagaagaccccagatcgaccccgccgtggagggcttcatcagagacaagtacgagaagaagaagtacatggacagaagcctggacatcaacgccttcagaaaggagaaggacgacaagtggaagagaggcagcgagcccgtgcccgagaagaagctggagcccgtggtgttcgagaaggtgaagatgccccagaagaaggaggacccccagctgcccagaaagagcagccccaagagcaccgcccccgtgatggacctgctgggcctggacgcccccgtggcctgcagcatcgccaacagcaagaccagcaacaccctggagaaggacctggacctgctggccagcgtgcccagccccagcagcagcggcagcagaaaggtggtgggcagcatgcccaccgccggcagcgccggcagcgtgcccgagaacctgaacctgttccccgagcccggcagcaagagcgaggagatcggcaagaagcagctgagcaaggacagcatcctgagcctgtacggcagccagaccccccagatgcccacccaggccatgttcatggcccccgcccagatggcctaccccaccgcctaccccagcttccccggcgtgaccccccccaacagcatcatgggcagcatgatgcccccccccgtgggcatggtggcccagcccggcgccagcggcatggtggcccccatggccatgcccgccggctacatgggcggcatgcaggccagcatgatgggcgtgcccaacggcatgatgaccacccagcaggccggctacatggccggcatggccgccatgccccagaccgtgtacggcgtgcagcccgcccagcagctgcagtggaacctgacccagatgacccagcagatggccggcatgaacttctacggcgccaacggcatgatgaactacggccagagcatgagcggcggcaacggccaggccgccaaccagaccctgagcccccagatgtggaagtag

SEQ ID NO: 99176 - DNA, 684 bp, synthetic construct
  misc_feature 1..684: note = Description of Artificial Sequence: Synthetic coding sequence
  source 1..684: mol_type = other DNA
atgaccggcaagagcgtgaaggacgtggacagataccaggccgtgctggccaacctgctgctggaggaggacaacaagttctgcgccgactgccagagcaagggccccagatgggccagctggaacatcggcgtgttcatctgcatcagatgcgccggcatccacagaaacctgggcgtgcacatcagcagagtgaagagcgtgaacctggaccagtggacccaggagcagatccagtgcatgcaggagatgggcaacggcaaggccaacagactgtacgaggcctacctgcccgagaccttcagaagaccccagatcgaccccgccgtggagggcttcatcagagacaagtacgagaagaagaagtacatggacagaagcctggacatcaacgccttcagaaaggagaaggacgacaagtggaagagaggcagcgagcccgtgcccgagaagaagctggagcccgtggtgttcgagaaggtgaagatgccccagaagaaggaggacccccagctgcccagaaagagcagccccaagagcaccgcccccgtgatggacctgctgggcctggacgcccccgtggcctgcagcatcgccaacagcaagaccagcaacaccctggagaaggacctggacctgctggccagcgtgcccagccccagcagcagcggcagcagaaagtag

SEQ ID NO: 99177 - DNA, 1050 bp, synthetic construct
  misc_feature 1..1050: note = Description of Artificial Sequence: Synthetic coding sequence
  source 1..1050: mol_type = other DNA
atgcaggagatgggcaacggcaaggccaacagactgtacgaggcctacctgcccgagaccttcagaagaccccagatcgaccccgccgtggagggcttcatcagagacaagtacgagaagaagaagtacatggacagaagcctggacatcaacgccttcagaaaggagaaggacgacaagtggaagagaggcagcgagcccgtgcccgagaagaagctggagcccgtggtgttcgagaaggtgaagatgccccagaagaaggaggacccccagctgcccagaaagagcagccccaagagcaccgcccccgtgatggacctgctgggcctggacgcccccgtggcctgcagcatcgccaacagcaagaccagcaacaccctggagaaggacctggacctgctggccagcgtgcccagccccagcagcagcggcagcagaaaggtggtgggcagcatgcccaccgccggcagcgccggcagcgtgcccgagaacctgaacctgttccccgagcccggcagcaagagcgaggagatcggcaagaagcagctgagcaaggacagcatcctgagcctgtacggcagccagaccccccagatgcccacccaggccatgttcatggcccccgcccagatggcctaccccaccgcctaccccagcttccccggcgtgaccccccccaacagcatcatgggcagcatgatgcccccccccgtgggcatggtggcccagcccggcgccagcggcatggtggcccccatggccatgcccgccggctacatgggcggcatgcaggccagcatgatgggcgtgcccaacggcatgatgaccacccagcaggccggctacatggccggcatggccgccatgccccagaccgtgtacggcgtgcagcccgcccagcagctgcagtggaacctgacccagatgacccagcagatggccggcatgaacttctacggcgccaacggcatgatgaactacggccagagcatgagcggcggcaacggccaggccgccaaccagaccctgagcccccagatgtggaagtag

SEQ ID NO: 99178 - DNA, 189 bp, synthetic construct
  misc_feature 1..189: note = Description of Artificial Sequence: Synthetic coding sequence
  source 1..189: mol_type = other DNA
atggccagaggcaaccagagagagctggccagacagaagaacatgaagaagacccaggagatcagcaagggcaagagaaaggaggacagcctgaccgccagccagagaaagcagagagacagcgagatcatgcaggagaagcagaaggccgccaacgagaagaagagcatgcagaccagagagaagtag

SEQ ID NO: 99179 - DNA, 333 bp, synthetic construct
  misc_feature 1..333: note = Description of Artificial Sequence: Synthetic coding sequence
  source 1..333: mol_type = other DNA
atggccagaggcaaccagagagagctggccagacagaagaacatgaagaagacccaggagatcagcaagggcaagagaaaggaggacagcctgaccgccagccagagaaagcagagcagcggcggccagaagagcgagagcaagatgagcgccggcccccacctgcccctgaaggcccccagagagaacccctgcttccccctgcccgccgccggcggcagcagatactacctggcctacggcagcatcacccccatcagcgccttcgtgttcgtggtgttcttcagcgtgttcttccccagcttctacgaggacttctgctgctggatctag

SEQ ID NO: 99180 - DNA, 147 bp, synthetic construct
  misc_feature 1..147: note = Description of Artificial Sequence: Synthetic coding sequence
  source 1..147: mol_type = other DNA
atgaagaagacccaggagatcagcaagggcaagagaaaggaggacagcctgaccgccagccagagaaagcagagagacagcgagatcatgcaggagaagcagaaggccgccaacgagaagaagagcatgcagaccagagagaagtag

SEQ ID NO: 99181 - DNA, 63 bp, synthetic construct
  misc_feature 1..63: note = Description of Artificial Sequence: Synthetic coding sequence
  source 1..63: mol_type = other DNA
atgaagaagacccaggagatcagcaagggcaagagaaaggaggacagcctgaccgccagctag

SEQ ID NO: 99182 - DNA, 291 bp, synthetic construct
  misc_feature 1..291: note = Description of Artificial Sequence: Synthetic coding sequence
  source 1..291: mol_type = other DNA
atgaagaagacccaggagatcagcaagggcaagagaaaggaggacagcctgaccgccagccagagaaagcagagcagcggcggccagaagagcgagagcaagatgagcgccggcccccacctgcccctgaaggcccccagagagaacccctgcttccccctgcccgccgccggcggcagcagatactacctggcctacggcagcatcacccccatcagcgccttcgtgttcgtggtgttcttcagcgtgttcttccccagcttctacgaggacttctgctgctggatctag

SEQ ID NO: 99183 - DNA, 270 bp, synthetic construct
  misc_feature 1..270: note = Description of Artificial Sequence: Synthetic coding sequence
  source 1..270: mol_type = other DNA
atgaagaagacccaggagatcagcaagggcaagagaaaggaggacagcctgaccgccagccagagaaagcagagcagcggcggccagaagagcgagagcaagatgagcgccggcccccacctgcccctgaaggcccccagagagaacccctgcttccccctgcccgccgccggcggcagcagatactacctggcctacggcagcatcacccccatcagcgccttcgtgttcgtggtgttcttcagcgtgttcttccccagcttctactag

SEQ ID NO: 99184 - DNA, 3156 bp, synthetic construct
  misc_feature 1..3156: note = Description of Artificial Sequence: Synthetic coding sequence
  source 1..3156: mol_type = other DNA
atgggcagcgccgaggacgccgtgaaggagaagctgctgtggaacgtgaagaaggaggtgaagcagatcatggaggaggccgtgaccagaaagttcgtgcacgaggacagcagccacatcatcgccctgtgcggcgccgtggaggcctgcctgctgcaccagctgagaagaagagccgccggcttcctgagaagcgacaagatggccgccctgttcaccaaggtgggcaagacctgccccgtggccggcgagatctgccacaaggtgcaggagctgcagcagcaggccgagggcagaaagcccagcggcgtgagccaggaggccctgagaagacagggcagcgccagcggcaaggcccccgccctgagcccccaggccctgaagcacgtgtgggtgagaaccgccctgatcgagaaggtgctggacaaggtggtgcagtacctggccgagaactgcagcaagtactacgagaaggaggccctgctggccgaccccgtgttcggccccatcctggccagcctgctggtgggcccctgcgccctggagtacaccaagctgaagaccgccgaccactactggaccgaccccagcgccgacgagctggtgcagagacacagaatcagaggcccccccaccagacaggacagccccgccaagagacccgccctgggcatcagaaagagacacagcagcggcagcgccagcgaggacagactggccgcctgcgccagagagtgcgtggagagcctgcaccagaacagcagaaccagactgctgtacggcaagaaccacgtgctggtgcagcccaaggaggacatggaggccgtgcccggctacctgagcctgcaccagagcgccgagagcctgaccctgaagtggacccccaaccagctgatgaacggcaccctgggcgacagcgagctggagaagagcgtgtactgggactacgccctggtggtgcccttcagccaggtggtgtgcatccactgccaccagcagaagagcggcggcaccctggtgctggtgagccaggacggcatccagagaccccccctgcacttcccccagggcggccacctgctgagcttcctgagctgcctggagaacggcctgctgcccagaggccagctggagccccccctgtggacccagcagggcaagggcaaggtgttccccaagctgagaaagagaagcagcatcagaagcgtggacatggaggagatgggcaccggcagagccaccgactacgtgttcagaatcatctaccccggccacagacacgagcacatcaccatcaactaccaccacctggccgccagcagagccgccagcgtggacgacgacgaggaggaggaggacaagctgcacgccatgctgagcatgatctgcagcagaaacctgaccgcccccaaccccatgaaggacgccggcgacatgatcgagatgcagggcttcggccccagcctgcccgcctggcacctggagcccctgtgcagccagggcagcagctgcctgagctgcagcagcagcagcagcccccacgccacccccagccactgcagctgcatccccgacagactgcccctgagactgctgtgcgagagcatgaagagacagatcgtgagcagagccttctacggctggctggcccactgcagacacctgagcaccgtgagaacccacctgagcgccctggtgcaccacagcgtgatcccccccgacagaccccccggcgccagcgccggcctgaccaaggacgtgtggagcaagtaccagaaggacaagaagaactacaaggagctggagctgctgagacaggtgtactacggcggcatcgagcacgagatcagaaaggacgtgtggcccttcctgctgggccactacaagttcggcatgagcaagaaggagatggagcaggtggacgccgtggtggccgccagataccagcaggtgctggccgagtggaaggcctgcgaggtggtggtgagacagagagagagagaggcccaccccgccaccagaaccaagttcagcagcggcagcagcatcgacagccacgtgcagagactgatccacagagacagcaccatcagcaacgacgtgttcatcagcgtggacgacctggagccccccgagccccaggaccccgaggacagcagacccaagcccgagcaggaggccggccccggcacccccggcaccgccgtggtggagcagcagcacagcgtggagttcgacagccccgacagcggcctgcccagcagcagaaactacagcgtggccagcggcatccagagcagcctggacgagggccagagcgtgggcttcgaggaggaggacggcggcggcgaggagggcagcagcggccccggccccgccgcccacaccctgagagagccccaggaccccagccaggagaagccccaggccggcgagctggaggccggcgaggagctggccgccgtgtgcgccgccgcctacaccatcgagctgctggacaccgtggccctgaacctgcacagaatcgacaaggacgtgcagagatgcgacagaaactactggtacttcaccccccccaacctggagagactgagagacgtgatgtgcagctacgtgtgggagcacctggacgtgggctacgtgcagggcatgtgcgacctgctggcccccctgctggtgaccctggacaacgaccagctggcctacagctgcttcagccacctgatgaagagaatgagccagaacttccccaacggcggcgccatggacacccacttcgccaacatgagaagcctgatccagatcctggacagcgagctgttcgagctgatgcaccagaacggcgactacacccacttctacttctgctacagatggttcctgctggacttcaagagagagctgctgtacgaggacgtgttcgccgtgtgggaggtgatctgggccgccagacacatcagcagcgagcacttcgtgctgttcatcgccctggccctggtggaggcctacagagagatcatcagagacaacaacatggacttcaccgacatcatcaagttcttcaacgagagagccgagcaccacgacgcccaggagatcctgagaatcgccagagacctggtgcacaaggtgcagatgctgatcgagaacaagtag

SEQ ID NO: 99185 - DNA, 3021 bp, synthetic construct
  misc_feature 1..3021: note = Description of Artificial Sequence: Synthetic coding sequence
  source 1..3021: mol_type = other DNA
atgggcagcgccgaggacgccgtgaaggagaagctgctgtggaacgtgaagaaggaggtgaagcagatcatggaggaggccgtgaccagaaagttcgtgcacgaggacagcagccacatcatcgccctgtgcggcgccgtggaggcctgcctgctgcaccagctgagaagaagagccgccggcttcctgagaagcgacaagatggccgccctgttcaccaaggtgggcaagacctgccccgtggccggcgagatctgccacaaggtgcaggagctgcagcagcaggccgagggcagaaagcccagcggcgtgagccaggaggccctgagaagacagggcagcgccagcggcaaggcccccgccctgagcccccaggccctgaagcacgtgtgggtgagaaccgccctgatcgagaaggtgctggacaaggtggtgcagtacctggccgagaactgcagcaagtactacgagaaggaggccctgctggccgaccccgtgttcggccccatcctggccagcctgctggtgggcccctgcgccctggagtacaccaagctgaagaccgccgaccactactggaccgaccccagcgccgacgagctggtgcagagacacagaatcagaggcccccccaccagacaggacagccccgccaagagacccgccctgggcatcagaaagagacacagcagcggcagcgccagcgaggacagactggccgcctgcgccagagagtgcgtggagagcctgcaccagaacagcagaaccagactgctgtacggcaagaaccacgtgctggtgcagcccaaggaggacatggaggccgtgcccggctacctgagcctgcaccagagcgccgagagcctgaccctgaagtggacccccaaccagctgatgaacggcaccctgggcgacagcgagctggagaagagcgtgtactgggactacgccctggtggtgcccttcagccaggtggtgtgcatccactgccaccagcagaagagcggcggcaccctggtgctggtgagccaggacggcatccagagaccccccctgcacttcccccagggcggccacctgctgagcttcctgagctgcctggagaacggcctgctgcccagaggccagctggagccccccctgtggacccagcagggcaagggcaaggtgttccccaagctgagaaagagaagcagcatcagaagcgtggacatggaggagatgggcaccggcagagccaccgactacgtgttcagaatcatctaccccggccacagacacgagcacaacgccggcgacatgatcgagatgcagggcttcggccccagcctgcccgcctggcacctggagcccctgtgcagccagggcagcagctgcctgagctgcagcagcagcagcagcccccacgccacccccagccactgcagctgcatccccgacagactgcccctgagactgctgtgcgagagcatgaagagacagatcgtgagcagagccttctacggctggctggcccactgcagacacctgagcaccgtgagaacccacctgagcgccctggtgcaccacagcgtgatcccccccgacagaccccccggcgccagcgccggcctgaccaaggacgtgtggagcaagtaccagaaggacaagaagaactacaaggagctggagctgctgagacaggtgtactacggcggcatcgagcacgagatcagaaaggacgtgtggcccttcctgctgggccactacaagttcggcatgagcaagaaggagatggagcaggtggacgccgtggtggccgccagataccagcaggtgctggccgagtggaaggcctgcgaggtggtggtgagacagagagagagagaggcccaccccgccaccagaaccaagttcagcagcggcagcagcatcgacagccacgtgcagagactgatccacagagacagcaccatcagcaacgacgtgttcatcagcgtggacgacctggagccccccgagccccaggaccccgaggacagcagacccaagcccgagcaggaggccggccccggcacccccggcaccgccgtggtggagcagcagcacagcgtggagttcgacagccccgacagcggcctgcccagcagcagaaactacagcgtggccagcggcatccagagcagcctggacgagggccagagcgtgggcttcgaggaggaggacggcggcggcgaggagggcagcagcggccccggccccgccgcccacaccctgagagagccccaggaccccagccaggagaagccccaggccggcgagctggaggccggcgaggagctggccgccgtgtgcgccgccgcctacaccatcgagctgctggacaccgtggccctgaacctgcacagaatcgacaaggacgtgcagagatgcgacagaaactactggtacttcaccccccccaacctggagagactgagagacgtgatgtgcagctacgtgtgggagcacctggacgtgggctacgtgcagggcatgtgcgacctgctggcccccctgctggtgaccctggacaacgaccagctggcctacagctgcttcagccacctgatgaagagaatgagccagaacttccccaacggcggcgccatggacacccacttcgccaacatgagaagcctgatccagatcctggacagcgagctgttcgagctgatgcaccagaacggcgactacacccacttctacttctgctacagatggttcctgctggacttcaagagagagctgctgtacgaggacgtgttcgccgtgtgggaggtgatctgggccgccagacacatcagcagcgagcacttcgtgctgttcatcgccctggccctggtggaggcctacagagagatcatcagagacaacaacatggacttcaccgacatcatcaagttcttcaacgagagagccgagcaccacgacgcccaggagatcctgagaatcgccagagacctggtgcacaaggtgcagatgctgatcgagaacaagtag

SEQ ID NO: 99186 - DNA, 795 bp, synthetic construct
  misc_feature 1..795: note = Description of Artificial Sequence: Synthetic coding sequence
  source 1..795: mol_type = other DNA
atgtgccacaagaacggcttcccccaggagggcggcatcaccgccgccttcctgcagaagagaaagctgagactgagcaagaaccacagacccgccagagccaaggtgaccgagcacgtgagaggcaccagacccggcagagccaccgccggccccgccgccagcaccagagccgccggcagcctgttcttcgacagatggggcaacagaggccccgccggctgcagaggcagcagccacctgccccagcagctgaagttcaccaccagcgacagctgcgacagaatcaaggacgagttccagctgctgcaggcccagtaccacagcctgaagctggagtgcgacaagctggccagcgagaagagcgagatgcagagacactacgtgatgtactacgagatgagctacggcctgaacatcgagatgcacaagcaggccgagatcgtgaagagactgaacggcatctgcgcccaggtgctgccctacctgagccaggagcaccagcagcaggtgctgggcgccatcgagagagccaagcaggtgaccgcccccgagctgaacagcatcatcagacagcagctgcaggcccaccagctgagccagctgcaggccctggccctgcccctgacccccctgcccgtgggcctgcagccccccagcctgcccgccgtgagcgccggcaccggcctgctgagcctgagcgccctgggcagccaggcccacctgagcaaggaggacaagaacggccacgacggcgacacccaccaggaggacgacggcgagaagagcgactag

SEQ ID NO: 99187 - DNA, 267 bp, synthetic construct
  misc_feature 1..267: note = Description of Artificial Sequence: Synthetic coding sequence
  source 1..267: mol_type = other DNA
atgaacatgagcaagcagcccgtgagcaacgtgagagccatccaggccaacatcaacatccccatgggcgccttcagacccggcgccggccagccccccagaagaaaggagtgcacccccgaggtggaggagggcgtgccccccaccagcgacgaggagaagaagcccatccccggcgccaagaagctgcccggccccgccgtgaacctgagcgagatccagaacatcaagagcgagctgaagtacgtgcccaaggccgagcagtag

SEQ ID NO: 99188 - DNA, 6411 bp, synthetic construct
  misc_feature 1..6411: note = Description of Artificial Sequence: Synthetic coding sequence
  source 1..6411: mol_type = other DNA
atggccgacgtgaccgccagaagcctgcagtacgagtacaaggccaacagcaacctggtgctgcaggccgacagaagcctgatcgacagaaccagaagagacgagcccaccggcgaggtgctgagcctggtgggcaagctggagggcaccagaatgggcgacaaggcccagagaaccaagccccagatgcaggaggagagaagagccaagagaagaaagagagacgaggacagacacgacatcaacaagatgaagggctacaccctgctgagcgagggcatcgacgagatggtgggcatcatctacaagcccaagaccaaggagaccagagagacctacgaggtgctgctgagcttcatccaggccgccctgggcgaccagcccagagacatcctgtgcggcgccgccgacgaggtgctggccgtgctgaagaacgagaagctgagagacaaggagagaagaaaggagatcgacctgctgctgggccagaccgacgacaccagataccacgtgctggtgaacctgggcaagaagatcaccgactacggcggcgacaaggagatccagaacatggacgacaacatcgacgagacctacggcgtgaacgtgcagttcgagagcgacgaggaggagggcgacgaggacgtgtacggcgaggtgagagaggaggccagcgacgacgacatggagggcgacgaggccgtggtgagatgcaccctgagcgccaacctggtggccagcggcgagctgatgagcagcaagaagaaggacctgcaccccagagacatcgacgccttctggctgcagagacagctgagcagattctacgacgacgccatcgtgagccagaagaaggccgacgaggtgctggagatcctgaagaccgccagcgacgacagagagtgcgagaaccagctggtgctgctgctgggcttcaacaccttcgacttcatcaaggtgctgagacagcacagaatgatgatcctgtactgcaccctgctggccagcgcccagagcgaggccgagaaggagagaatcatgggcaagatggaggccgaccccgagctgagcaagttcctgtaccagctgcacgagaccgagaaggaggacctgatcagagaggagagaagcagaagagagagagtgagacagagcagaatggacaccgacctggagaccatggacctggaccagggcggcgaggccctggcccccagacaggtgctggacctggaggacctggtgttcacccagggcagccacttcatggccaacaagagatgccagctgcccgacggcagcttcagaagacagagaaagggctacgaggaggtgcacgtgcccgccctgaagcccaagcccttcggcagcgaggagcagctgctgcccgtggagaagctgcccaagtacgcccaggccggcttcgagggcttcaagaccctgaacagaatccagagcaagctgtacagagccgccctggagaccgacgagaacctgctgctgtgcgcccccaccggcgccggcaagaccaacgtggccctgatgtgcatgctgagagagatcggcaagcacatcaacatggacggcaccatcaacgtggacgacttcaagatcatctacatcgcccccatgagaagcctggtgcaggagatggtgggcagcttcggcaagagactggccacctacggcatcaccgtggccgagctgaccggcgaccaccagctgtgcaaggaggagatcagcgccacccagatcatcgtgtgcacccccgagaagtgggacatcatcaccagaaagggcggcgagagaacctacacccagctggtgagactgatcatcctggacgagatccacctgctgcacgacgacagaggccccgtgctggaggccctggtggccagagccatcagaaacatcgagatgacccaggaggacgtgagactgatcggcctgagcgccaccctgcccaactacgaggacgtggccaccttcctgagagtggaccccgccaagggcctgttctacttcgacaacagcttcagacccgtgcccctggagcagacctacgtgggcatcaccgagaagaaggccatcaagagattccagatcatgaacgagatcgtgtacgagaagatcatggagcacgccggcaagaaccaggtgctggtgttcgtgcacagcagaaaggagaccggcaagaccgccagagccatcagagacatgtgcctggagaaggacaccctgggcctgttcctgagagagggcagcgccagcaccgaggtgctgagaaccgaggccgagcagtgcaagaacctggagctgaaggacctgctgccctacggcttcgccatccaccacgccggcatgaccagagtggacagaaccctggtggaggacctgttcgccgacaagcacatccaggtgctggtgagcaccgccaccctggcctggggcgtgaacctgcccgcccacaccgtgatcatcaagggcacccaggtgtacagccccgagaagggcagatggaccgagctgggcgccctggacatcctgcagatgctgggcagagccggcagaccccagtacgacaccaagggcgagggcatcctgatcaccagccacggcgagctgcagtactacctgagcctgctgaaccagcagctgcccatcgagagccagatggtgagcaagctgcccgacatgctgaacgccgagatcgtgctgggcaacgtgcagaacgccaaggacgccgtgaactggctgggctacgcctacctgtacatcagaatgctgagaagccccaccctgtacggcatcagccacgacgacctgaagggcgaccccctgctggaccagagaagactggacctggtgcacaccgccgccctgatgctggacaagaacaacctggtgaagtacgacaagaagaccggcaacttccaggtgaccgagctgggcagaatcgccagccactactacatcaccaacgacaccgtgcagacctacaaccagctgctgaagcccaccctgagcgagatcgagctgttcagagtgttcagcctgagcagcgagttcaagaacatcaccgtgagagaggaggagaagctggagctgcagaagctgctggagagagtgcccatccccgtgaaggagagcatcgaggagcccagcgccaagatcaacgtgctgctgcaggccttcatcagccagctgaagctggagggcttcgccctgatggccgacatggtgtacgtgacccagagcgccggcagactgatgagagccatcttcgagatcgtgctgaacagaggctgggcccagctgaccgacaagaccctgaacctgtgcaagatgatcgacaagagaatgtggcagagcatgtgccccctgagacagttcagaaagctgcccgaggaggtggtgaagaagatcgagaagaagaacttccccttcgagagactgtacgacctgaaccacaacgagatcggcgagctgatcagaatgcccaagatgggcaagaccatccacaagtacgtgcacctgttccccaagctggagctgagcgtgcacctgcagcccatcaccagaagcaccctgaaggtggagctgaccatcacccccgacttccagtgggacgagaaggtgcacggcagcagcgaggccttctggatcctggtggaggacgtggacagcgaggtgatcctgcaccacgagtacttcctgctgaaggccaagtacgcccaggacgagcacctgatcaccttcttcgtgcccgtgttcgagcccctgcccccccagtacttcatcagagtggtgagcgacagatggctgagctgcgagacccagctgcccgtgagcttcagacacctgatcctgcccgagaagtaccccccccccaccgagctgctggacctgcagcccctgcccgtgagcgccctgagaaacagcgccttcgagagcctgtaccaggacaagttccccttcttcaaccccatccagacccaggtgttcaacaccgtgtacaacagcgacgacaacgtgttcgtgggcgcccccaccggcagcggcaagaccatctgcgccgagttcgccatcctgagaatgctgctgcagagcagcgagggcagatgcgtgtacatcacccccatggaggccctggccgagcaggtgtacatggactggtacgagaagttccaggacagactgaacaagaaggtggtgctgctgaccggcgagaccagcaccgacctgaagctgctgggcaagggcaacatcatcatcagcacccccgagaagtgggacatcctgagcagaagatggaagcagagaaagaacgtgcagaacatcaacctgttcgtggtggacgaggtgcacctgatcggcggcgagaacggccccgtgctggaggtgatctgcagcagaatgagatacatcagcagccagatcgagagacccatcagaatcgtggccctgagcagcagcctgagcaacgccaaggacgtggcccactggctgggctgcagcgccaccagcaccttcaacttccaccccaacgtgagacccgtgcccctggagctgcacatccagggcttcaacatcagccacacccagaccagactgctgagcatggccaagcccgtgtaccacgccatcaccaagcacagccccaagaagcccgtgatcgtgttcgtgcccagcagaaagcagaccagactgaccgccatcgacatcctgaccacctgcgccgccgacatccagagacagagattcctgcactgcaccgagaaggacctgatcccctacctggagaagctgagcgacagcaccctgaaggagaccctgctgaacggcgtgggctacctgcacgagggcctgagccccatggagagaagactggtggagcagctgttcagcagcggcgccatccaggtggtggtggccagcagaagcctgtgctggggcatgaacgtggccgcccacctggtgatcatcatggacacccagtactacaacggcaagatccacgcctacgtggactaccccatctacgacgtgctgcagatggtgggccacgccaacagacccctgcaggacgacgagggcagatgcgtgatcatgtgccagggcagcaagaaggacttcttcaagaagttcctgtacgagcccctgcccgtggagagccacctggaccactgcatgcacgaccacttcaacgccgagatcgtgaccaagaccatcgagaacaagcaggacgccgtggactacctgacctggaccttcctgtacagaagaatgacccagaaccccaactactacaacctgcagggcatcagccacagacacctgagcgaccacctgagcgagctggtggagcagaccctgagcgacctggagcagagcaagtgcatcagcatcgaggacgagatggacgtggcccccctgaacctgggcatgatcgccgcctactactacatcaactacaccaccatcgagctgttcagcatgagcctgaacgccaagaccaaggtgagaggcctgatcgagatcatcagcaacgccgccgagtacgagaacatccccatcagacaccacgaggacaacctgctgagacagctggcccagaaggtgccccacaagctgaacaaccccaagttcaacgacccccacgtgaagaccaacctgctgctgcaggcccacctgagcagaatgcagctgagcgccgagctgcagagcgacaccgaggagatcctgagcaaggccatcagactgatccaggcctgcgtggacgtgctgagcagcaacggctggctgagccccgccctggccgccatggagctggcccagatggtgacccaggccatgtggagcaaggacagctacctgaagcagctgccccacttcaccagcgagcacatcaagagatgcaccgacaagggcgtggagagcgtgttcgacatcatggagatggaggacgaggagagaaacgccctgctgcagctgaccgacagccagatcgccgacgtggccagattctgcaacagataccccaacatcgagctgagctacgaggtggtggacaaggacagcatcagaagcggcggccccgtggtggtgctggtgcagctggagagagaggaggaggtgaccggccccgtgatcgcccccctgttcccccagaagagagaggagggctggtgggtggtgatcggcgacgccaagagcaacagcctgatcagcatcaagagactgaccctgcagcagaaggccaaggtgaagctggacttcgtggcccccgccaccggcgcccacaactacaccctgtacttcatgagcgacgcctacatgggctgcgaccaggagtacaagttcagcgtggacgtgaaggaggccgagaccgacagcgacagcgactag

SEQ ID NO: 99189 - DNA, 1878 bp, synthetic construct
  misc_feature 1..1878: note = Description of Artificial Sequence: Synthetic coding sequence
  source 1..1878: mol_type = other DNA
atggccgacgtgaccgccagaagcctgcagtacgagtacaaggccaacagcaacctggtgctgcaggccgacagaagcctgatcgacagaaccagaagagacgagcccaccggcgaggtgctgagcctggtgggcaagctggagggcaccagaatgggcgacaaggcccagagaaccaagccccagatgcaggaggagagaagagccaagagaagaaagagagacgaggacagacacgacatcaacaagatgaagggctacaccctgctgagcgagggcatcgacgagatggtgggcatcatctacaagcccaagaccaaggagaccagagagacctacgaggtgctgctgagcttcatccaggccgccctgggcgaccagcccagagacatcctgtgcggcgccgccgacgaggtgctggccgtgctgaagaacgagaagctgagagacaaggagagaagaaaggagatcgacctgctgctgggccagaccgacgacaccagataccacgtgctggtgaacctgggcaagaagatcaccgactacggcggcgacaaggagatccagaacatggacgacaacatcgacgagacctacggcgtgaacgtgcagttcgagagcgacgaggaggagggcgacgaggacgtgtacggcgaggtgagagaggaggccagcgacgacgacatggagggcgacgaggccgtggtgagatgcaccctgagcgccaacctggtggccagcggcgagctgatgagcagcaagaagaaggacctgcaccccagagacatcgacgccttctggctgcagagacagctgagcagattctacgacgacgccatcgtgagccagaagaaggccgacgaggtgctggagatcctgaagaccgccagcgacgacagagagtgcgagaaccagctggtgctgctgctgggcttcaacaccttcgacttcatcaaggtgctgagacagcacagaatgatgatcctgtactgcaccctgctggccagcgcccagagcgaggccgagaaggagagaatcatgggcaagatggaggccgaccccgagctgagcaagttcctgtaccagctgcacgagaccgagaaggaggacctgatcagagaggagagaagcagaagagagagagtgagacagagcagaatggacaccgacctggagaccatggacctggaccagggcggcgaggccctggcccccagacaggtgctggacctggaggacctggtgttcacccagggcagccacttcatggccaacaagagatgccagctgcccgacggcagcttcagaagacagagaaagggctacgaggaggtgcacgtgcccgccctgaagcccaagcccttcggcagcgaggagcagctgctgcccgtggagaagctgcccaagtacgcccaggccggcttcgagggcttcaagaccctgaacagaatccagagcaagctgtacagagccgccctggagaccgacgagaacctgctgctgtgcgcccccaccggcgccggcaagaccaacgtggccctgatgtgcatgctgagagagatcggcaagcacatcaacatggacggcaccatcaacgtggacgacttcaagatcatctacatcgcccccatgagaagcctggtgcaggagatggtgggcagcttcggcaagagagacgccaagagcaacagcctgatcagcatcaagagactgaccctgcagcagaaggccaaggtgaagctggacttcgtggcccccgccaccggcgcccacaactacaccctgtacttcatgagcgacgcctacatgggctgcgaccaggagtacaagttcagcgtggacgtgaaggaggccgagaccgacagcgacagcgactag

SEQ ID NO: 99190 - DNA, 1788 bp, synthetic construct
  misc_feature 1..1788: note = Description of Artificial Sequence: Synthetic coding sequence
  source 1..1788: mol_type = other DNA
atgagatacatcagcagccagatcgagagacccatcagaatcgtggccctgagcagcagcctgagcaacgccaaggacgtggcccactggctgggctgcagcgccaccagcaccttcaacttccaccccaacgtgagacccgtgcccctggagctgcacatccagggcttcaacatcagccacacccagaccagactgctgagcatggccaagcccgtgtaccacgccatcaccaagcacagccccaagaagcccgtgatcgtgttcgtgcccagcagaaagcagaccagactgaccgccatcgacatcctgaccacctgcgccgccgacatccagagacagagattcctgcactgcaccgagaaggacctgatcccctacctggagaagctgagcgacagcaccctgaaggagaccctgctgaacggcgtgggctacctgcacgagggcctgagccccatggagagaagactggtggagcagctgttcagcagcggcgccatccaggtggtggtggccagcagaagcctgtgctggggcatgaacgtggccgcccacctggtgatcatcatggacacccagtactacaacggcaagatccacgcctacgtggactaccccatctacgacgtgctgcagatggtgggccacgccaacagacccctgcaggacgacgagggcagatgcgtgatcatgtgccagggcagcaagaaggacttcttcaagaagttcctgtacgagcccctgcccgtggagagccacctggaccactgcatgcacgaccacttcaacgccgagatcgtgaccaagaccatcgagaacaagcaggacgccgtggactacctgacctggaccttcctgtacagaagaatgacccagaaccccaactactacaacctgcagggcatcagccacagacacctgagcgaccacctgagcgagctggtggagcagaccctgagcgacctggagcagagcaagtgcatcagcatcgaggacgagatggacgtggcccccctgaacctgggcatgatcgccgcctactactacatcaactacaccaccatcgagctgttcagcatgagcctgaacgccaagaccaaggtgagaggcctgatcgagatcatcagcaacgccgccgagtacgagaacatccccatcagacaccacgaggacaacctgctgagacagctggcccagaaggtgccccacaagctgaacaaccccaagttcaacgacccccacgtgaagaccaacctgctgctgcaggcccacctgagcagaatgcagctgagcgccgagctgcagagcgacaccgaggagatcctgagcaaggccatcagactgatccaggcctgcgtggacgtgctgagcagcaacggctggctgagccccgccctggccgccatggagctggcccagatggtgacccaggccatgtggagcaaggacagctacctgaagcagctgccccacttcaccagcgagcacatcaagagatgcaccgacaagggcgtggagagcgtgttcgacatcatggagatggaggacgaggagagaaacgccctgctgcagctgaccgacagccagatcgccgacgtggccagattctgcaacagataccccaacatcgagctgagctacgaggtggtggacaaggacagcatcagaagcggcggccccgtggtggtgctggtgcagctggagagagaggaggaggtgaccggccccgtgatcgcccccctgttcccccagttcagagccggcagaagcggcagcagactgtag

SEQ ID NO: 99191 - DNA, 1788 bp, synthetic construct
  misc_feature 1..1788: note = Description of Artificial Sequence: Synthetic coding sequence
  source 1..1788: mol_type = other DNA
atggccaagcccgtgtaccacgccatcaccaagcacagccccaagaagcccgtgatcgtgttcgtgcccagcagaaagcagaccagactgaccgccatcgacatcctgaccacctgcgccgccgacatccagagacagagattcctgcactgcaccgagaaggacctgatcccctacctggagaagctgagcgacagcaccctgaaggagaccctgctgaacggcgtgggctacctgcacgagggcctgagccccatggagagaagactggtggagcagctgttcagcagcggcgccatccaggtggtggtggccagcagaagcctgtgctggggcatgaacgtggccgcccacctggtgatcatcatggacacccagtactacaacggcaagatccacgcctacgtggactaccccatctacgacgtgctgcagatggtgggccacgccaacagacccctgcaggacgacgagggcagatgcgtgatcatgtgccagggcagcaagaaggacttcttcaagaagttcctgtacgagcccctgcccgtggagagccacctggaccactgcatgcacgaccacttcaacgccgagatcgtgaccaagaccatcgagaacaagcaggacgccgtggactacctgacctggaccttcctgtacagaagaatgacccagaaccccaactactacaacctgcagggcatcagccacagacacctgagcgaccacctgagcgagctggtggagcagaccctgagcgacctggagcagagcaagtgcatcagcatcgaggacgagatggacgtggcccccctgaacctgggcatgatcgccgcctactactacatcaactacaccaccatcgagctgttcagcatgagcctgaacgccaagaccaaggtgagaggcctgatcgagatcatcagcaacgccgccgagtacgagaacatccccatcagacaccacgaggacaacctgctgagacagctggcccagaaggtgccccacaagctgaacaaccccaagttcaacgacccccacgtgaagaccaacctgctgctgcaggcccacctgagcagaatgcagctgagcgccgagctgcagagcgacaccgaggagatcctgagcaaggccatcagactgatccaggcctgcgtggacgtgctgagcagcaacggctggctgagccccgccctggccgccatggagctggcccagatggtgacccaggccatgtggagcaaggacagctacctgaagcagctgccccacttcaccagcgagcacatcaagagatgcaccgacaagggcgtggagagcgtgttcgacatcatggagatggaggacgaggagagaaacgccctgctgcagctgaccgacagccagatcgccgacgtggccagattctgcaacagataccccaacatcgagctgagctacgaggtggtggacaaggacagcatcagaagcggcggccccgtggtggtgctggtgcagctggagagagaggaggaggtgaccggccccgtgatcgcccccctgttcccccagaagagagaggagggctggtgggtggtgatcggcgacgccaagagcaacagcctgatcagcatcaagagactgaccctgcagcagaaggccaaggtgaagctggacttcgtggcccccgccaccggcgcccacaactacaccctgtacttcatgagcgacgcctacatgggctgcgaccaggagtacaagttcagcgtggacgtgaaggaggccgagaccgacagcgacagcgactag

SEQ ID NO: 99192 - DNA, 2325 bp, synthetic construct
  misc_feature 1..2325: note = Description of Artificial Sequence: Synthetic coding sequence
  source 1..2325: mol_type = other DNA
atgatgatcctgtactgcaccctgctggccagcgcccagagcgaggccgagaaggagagaatcatgggcaagatggaggccgaccccgagctgagcaagttcctgtaccagctgcacgagaccgagaaggaggacctgatcagagaggagagaagcagaagagagagagtgagacagagcagaatggacaccgacctggagaccatggacctggaccagggcggcgaggccctggcccccagacaggtgctggacctggaggacctggtgttcacccagggcagccacttcatggccaacaagagatgccagctgcccgacggcagcttcagaagacagagaaagggctacgaggaggtgcacgtgcccgccctgaagcccaagcccttcggcagcgaggagcagctgctgcccgtggagaagctgcccaagtacgcccaggccggcttcgagggcttcaagaccctgaacagaatccagagcaagctgtacagagccgccctggagaccgacgagaacctgctgctgtgcgcccccaccggcgccggcaagaccaacgtggccctgatgtgcatgctgagagagatcggcaagcacatcaacatggacggcaccatcaacgtggacgacttcaagatcatctacatcgcccccatgagaagcctggtgcaggagatggtgggcagcttcggcaagagactggccacctacggcatcaccgtggccgagctgaccggcgaccaccagctgtgcaaggaggagatcagcgccacccagatcatcgtgtgcacccccgagaagtgggacatcatcaccagaaagggcggcgagagaacctacacccagctggtgagactgatcatcctggacgagatccacctgctgcacgacgacagaggccccgtgctggaggccctggtggccagagccatcagaaacatcgagatgacccaggaggacgtgagactgatcggcctgagcgccaccctgcccaactacgaggacgtggccaccttcctgagagtggaccccgccaagggcctgttctacttcgacaacagcttcagacccgtgcccctggagcagacctacgtgggcatcaccgagaagaaggccatcaagagattccagatcatgaacgagatcgtgtacgagaagatcatggagcacgccggcaagaaccaggtgctggtgttcgtgcacagcagaaaggagaccggcaagaccgccagagccatcagagacatgtgcctggagaaggacaccctgggcctgttcctgagagagggcagcgccagcaccgaggtgctgagaaccgaggccgagcagtgcaagaacctggagctgaaggacctgctgccctacggcttcgccatccaccacgccggcatgaccagagtggacagaaccctggtggaggacctgttcgccgacaagcacatccaggtgctggtgagcaccgccaccctggcctggggcgtgaacctgcccgcccacaccgtgatcatcaagggcacccaggtgtacagccccgagaagggcagatggaccgagctgggcgccctggacatcctgcagatgctgggcagagccggcagaccccagtacgacaccaagggcgagggcatcctgatcaccagccacggcgagctgcagtactacctgagcctgctgaaccagcagctgcccatcgagagccagatggtgagcaagctgcccgacatgctgaacgccgagatcgtgctgggcaacgtgcagaacgccaaggacgccgtgaactggctgggctacgcctacctgtacatcagaatgctgagaagccccaccctgtacggcatcagccacgacgacctgaagggcgaccccctgctggaccagagaagactggacctggtgcacaccgccgccctgatgctggacaagaacaacctggtgaagtacgacaagaagaccggcaacttccaggtgaccgagctgggcagaatcgccagccactactacatcaccaacgacaccgtgcagacctacaaccagctgctgaagcccaccctgagcgagatcgagctgttcagagtgttcagcctgagcagcgagttcaagaacatcaccgtgagagaggaggagaagctggagctgcagaagctgctggagagagtgcccatccccgtgaaggagagcatcgaggagcccagcgccaagatcaacgtgctgctgcaggccttcatcagccagctgaagctggagggcttcgccctgatggccgacatggtgtacgtgacccagagcgccggcagactgatgagagccatcctgaagctgagctag

SEQ ID NO: 99193 - DNA, 2160 bp, synthetic construct
  misc_feature 1..2160: note = Description of Artificial Sequence: Synthetic coding sequence
  source 1..2160: mol_type = other DNA
atgctgctgcagagcagcgagggcagatgcgtgtacatcacccccatggaggccctggccgagcaggtgtacatggactggtacgagaagttccaggacagactgaacaagaaggtggtgctgctgaccggcgagaacggccccgtgctggaggtgatctgcagcagaatgagatacatcagcagccagatcgagagacccatcagaatcgtggccctgagcagcagcctgagcaacgccaaggacgtggcccactggctgggctgcagcgccaccagcaccttcaacttccaccccaacgtgagacccgtgcccctggagctgcacatccagggcttcaacatcagccacacccagaccagactgctgagcatggccaagcccgtgtaccacgccatcaccaagcacagccccaagaagcccgtgatcgtgttcgtgcccagcagaaagcagaccagactgaccgccatcgacatcctgaccacctgcgccgccgacatccagagacagagattcctgcactgcaccgagaaggacctgatcccctacctggagaagctgagcgacagcaccctgaaggagaccctgctgaacggcgtgggctacctgcacgagggcctgagccccatggagagaagactggtggagcagctgttcagcagcggcgccatccaggtggtggtggccagcagaagcctgtgctggggcatgaacgtggccgcccacctggtgatcatcatggacacccagtactacaacggcaagatccacgcctacgtggactaccccatctacgacgtgctgcagatggtgggccacgccaacagacccctgcaggacgacgagggcagatgcgtgatcatgtgccagggcagcaagaaggacttcttcaagaagttcctgtacgagcccctgcccgtggagagccacctggaccactgcatgcacgaccacttcaacgccgagatcgtgaccaagaccatcgagaacaagcaggacgccgtggactacctgacctggaccttcctgtacagaagaatgacccagaaccccaactactacaacctgcagggcatcagccacagacacctgagcgaccacctgagcgagctggtggagcagaccctgagcgacctggagcagagcaagtgcatcagcatcgaggacgagatggacgtggcccccctgaacctgggcatgatcgccgcctactactacatcaactacaccaccatcgagctgttcagcatgagcctgaacgccaagaccaaggtgagaggcctgatcgagatcatcagcaacgccgccgagtacgagaacatccccatcagacaccacgaggacaacctgctgagacagctggcccagaaggtgccccacaagctgaacaaccccaagttcaacgacccccacgtgaagaccaacctgctgctgcaggcccacctgagcagaatgcagctgagcgccgagctgcagagcgacaccgaggagatcctgagcaaggccatcagactgatccaggcctgcgtggacgtgctgagcagcaacggctggctgagccccgccctggccgccatggagctggcccagatggtgacccaggccatgtggagcaaggacagctacctgaagcagctgccccacttcaccagcgagcacatcaagagatgcaccgacaagggcgtggagagcgtgttcgacatcatggagatggaggacgaggagagaaacgccctgctgcagctgaccgacagccagatcgccgacgtggccagattctgcaacagataccccaacatcgagctgagctacgaggtggtggacaaggacagcatcagaagcggcggccccgtggtggtgctggtgcagctggagagagaggaggaggtgaccggccccgtgatcgcccccctgttcccccagaagagagaggagggctggtgggtggtgatcggcgacgccaagagcaacagcctgatcagcatcaagagactgaccctgcagcagaaggccaaggtgaagctggacttcgtggcccccgccaccggcgcccacaactacaccctgtacttcatgagcgacgcctacatgggctgcgaccaggagtacaagttcagcgtggacgtgaaggaggccgagaccgacagcgacagcgactag

SEQ ID NO: 99194 - DNA, 1074 bp, synthetic construct
  misc_feature 1..1074: note = Description of Artificial Sequence: Synthetic coding sequence
  source 1..1074: mol_type = other DNA
atgatcgagcagcagaagagaaagggccccgagctgcccctggtgcccgtgaagagacagagacacgagctgctgctgggcgccggcagcggccccggcgccggccagcagcaggccacccccggcgccctgctgcaggccggcccccccagatgcagcagcctgcaggcccccatcatgctgctgagcggccacgagggcgaggtgtactgctgcaagttccaccccaacggcagcaccctggccagcgccggcttcgacagactgatcctgctgtggaacgtgtacggcgactgcgacaactacgccaccctgaagggccacagcggcgccgtgatggagctgcactacaacaccgacggcagcatgctgttcagcgccagcaccgacaagaccgtggccgtgtgggacagcgagaccggcgagagagtgaagagactgaagggccacaccagcttcgtgaacagctgctaccccgccagaagaggcccccagctggtgtgcaccggcagcgacgacggcaccgtgaagctgtgggacatcagaaagaaggccgccatccagaccttccagaacacctaccaggtgctggccgtgaccttcaacgacaccagcgaccagatcatcagcggcggcatcgacaacgacatcaaggtgtgggacctgagacagaacaagctgacctacaccatgagaggccacgccgacagcgtgaccggcctgagcctgagcagcgagggcagctacctgctgagcaacgccatggacaacaccgtgagagtgtgggacgtgagacccttcgcccccaaggagagatgcgtgaagatcttccagggcaacgtgcacaacttcgagaagaacctgctgagatgcagctggagccccgacggcagcaagatcgccgccggcagcgccgacagattcgtgtacgtgtgggacaccaccagcagaagaatcctgtacaagctgcccggccacgccggcagcatcaacgaggtggccttccaccccgacgagcccatcatcatcagcgccagcagcgacaagagactgtacatgggcgagatccagtag

SEQ ID NO: 99195 - DNA, 384 bp, synthetic construct
  misc_feature 1..384: note = Description of Artificial Sequence: Synthetic coding sequence
  source 1..384: mol_type = other DNA
atgatcctgatcagcgccggctgccccggcggcctgtggcccatcgtggtgctggtgggcctgttcatctggatctgcttcgccgtgagagtgtgggacgtgagacccttcgcccccaaggagagatgcgtgaagatcttccagggcaacgtgcacaacttcgagaagaacctgctgagatgcagctggagccccgacggcagcaagatcgccgccggcagcgccgacagattcgtgtacgtgtgggacaccaccagcagaagaatcctgtacaagctgcccggccacgccggcagcatcaacgaggtggccttccaccccgacgagcccatcatcatcagcgccagcagcgacaagagactgtacatgggcgagatccagtag

SEQ ID NO: 99196 - DNA, 1230 bp, synthetic construct
  misc_feature 1..1230: note = Description of Artificial Sequence: Synthetic coding sequence
  source 1..1230: mol_type = other DNA
atgatcgagcagcagaagagaaagggccccgagctgcccctggtgcccgtgaagagacagagacacgagctgctgctgggcgccggcagcggccccggcgccggccagcagcaggccacccccggcgccctgctgcaggccggcccccccagatgcagcagcctgcaggcccccatcatgctgctgagcggccacgagggcgaggtgtactgctgcaagttccaccccaacggcagcaccctggccagcgccggcttcgacagactgatcctgctgtggaacgtgtacggcgactgcgacaactacgccaccctgaagggccacagcggcgccgtgatggagctgcactacaacaccgacggcagcatgctgttcagcgccagcaccgacaagaccgtggccgtgtgggacagcgagaccggcgagagagtgaagagactgaagggccacaccagcttcgtgaacagctgctaccccgccagaagaggcccccagctggtgtgcaccggcagcgacgacggcaccgtgaagctgtgggacatcagaaagaaggccgccatccagaccttccagaacacctaccaggtgctggccgtgaccttcaacgacaccagcgaccagatcatcagcggcggcatcgacaacgacatcaaggtgtgggacctgagacagaacaagctgacctacaccatgagaggccacgccgacagcgtgaccggcctgagcctgagcagcgagggcagctacctgctgagcaacgccatggacaacaccgtgagagtgtgggacgtgagacccttcgcccccaaggagagatgcgtgaagatcttccagggcaacgtgcacaacttcgagaagaacctgctgagatgcagctggagccccgacggcagcaagatcgccgccggcagcgccgacagattcgtgtacgtgtgggacaccaccagcagaagaatcctgtacaagctgcccggccacgccggcagcatcaacgaggtggccttccaccccgacgagcccatcatcgagaccggcttccacagaatcggccagggcggccacgagctgctgaccagcagcaacccccccgccagcgccagccagagcgccggcatcaccggcgtgagccactgcgcccagctgcagaccgtgttcatgtgggtgagcatgagcgtgagccccctgctgatcagcggcgagagcaagagcaacgcccccttcagcagctag

SEQ ID NO: 99197 - DNA, 849 bp, synthetic construct
  misc_feature 1..849: note = Description of Artificial Sequence: Synthetic coding sequence
  source 1..849: mol_type = other DNA
atggccgtgcccgagaccagacccaaccacaccatctacatcaacaacctgaacgagaagatcaagaaggacgagctgaagaagagcctgtacgccatcttcagccagttcggccagatcctggacatcctggtgagcagaagcctgaagatgagaggccaggccttcgtgatcttcaaggaggtgagcagcgccaccaacgccctgagaagcatgcagggcttccccttctacgacaagcccatgagaatccagtacgccaagaccgacagcgacatcatcgccaagatgaagggcaccttcgtggagagagacagaaagagagagaagagaaagcccaagagccaggagacccccgccaccaagaaggccgtgcagggcggcggcgccacccccgtggtgggcgccgtgcagggccccgtgcccggcatgccccccatgacccaggcccccagaatcatgcaccacatgcccggccagcccccctacatgcccccccccggcatgatccccccccccggcctggcccccggccagatcccccccggcgccatgcccccccagcagctgatgcccggccagatgccccccgcccagcccctgagcgagaacccccccaaccacatcctgttcctgaccaacctgcccgaggagaccaacgagctgatgctgagcatgctgttcaaccagttccccggcttcaaggaggtgagactggtgcccggcagacacgacatcgccttcgtggagttcgacaacgaggtgcaggccggcgccgccagagacgccctgcagggcttcaagatcacccagaacaacgccatgaagatcagcttcgccaagaagtag

SEQ ID NO: 99198 - DNA, 612 bp, synthetic construct
  misc_feature 1..612: note = Description of Artificial Sequence: Synthetic coding sequence
  source 1..612: mol_type = other DNA
atggccgtgcccgagaccagacccaaccacaccatctacatcatcgccaagatgaagggcaccttcgtggagagagacagaaagagagagaagagaaagcccaagagccaggagacccccgccaccaagaaggccgtgcagggcggcggcgccacccccgtggtgggcgccgtgcagggccccgtgcccggcatgccccccatgacccaggcccccagaatcatgcaccacatgcccggccagcccccctacatgcccccccccggcatgatccccccccccggcctggcccccggccagatcccccccggcgccatgcccccccagcagctgatgcccggccagatgccccccgcccagcccctgagcgagaacccccccaaccacatcctgttcctgaccaacctgcccgaggagaccaacgagctgatgctgagcatgctgttcaaccagttccccggcttcaaggaggtgagactggtgcccggcagacacgacatcgccttcgtggagttcgacaacgaggtgcaggccggcgccgccagagacgccctgcagggcttcaagatcacccagaacaacgccatgaagatcagcttcgccaagaagtag

SEQ ID NO: 99199 - DNA, 768 bp, synthetic construct
  misc_feature 1..768: note = Description of Artificial Sequence: Synthetic coding sequence
  source 1..768: mol_type = other DNA
atggtgaagctgaccgccgagctgatcgagcaggccgcccagtacaccaacgccgtgagagacagagagctggacctgagaggctacaagatccccgtgatcgagaacctgggcgccaccctggaccagttcgacgccatcgacttcagcgacaacgagatcagaaagctggacggcttccccctgctgagaagactgaagaccctgctggtgaacaacaacagaatctgcagaatcggcgagggcctggaccaggccctgccctgcctgaccgagctgatcctgaccaacaacagcctggtggagctgggcgacctggaccccctggccagcctgaagagcctgacctacctgagcatcctgagaaaccccgtgaccaacaagaagcactacagactgtacgtgatctacaaggtgccccaggtgagagtgctggacttccagaaggtgaagctgaaggagagacaggaggccgagaagatgttcaagggcaagagaggcgcccagctggccaaggacatcgccagaagaagcaagaccttcaaccccggcgccggcctgcccaccgacaagaagaagggcggccccagccccggcgacgtggaggccatcaagaacgccatcgccaacgccagcaccctggccgaggtggagagactgaagggcctgctgcagagcggccagatccccggcagagagagaagaagcggccccaccgacgacggcgaggaggagatggaggaggacaccgtgaccaacggcagctag

SEQ ID NO: 99200 - DNA, 480 bp, synthetic construct
  misc_feature 1..480: note = Description of Artificial Sequence: Synthetic coding sequence
  source 1..480: mol_type = other DNA
atgcccaagttctactgcgactactgcgacacctacctgacccacgacagccccagcgtgagaaagacccactgcagcggcagaaagcacaaggagaacgtgaaggactactaccagaagtggatggaggagcaggcccagagcctgatcgacaagaccaccgccgccttccagcagggcaagatcccccccacccccttcagcgcccccccccccgccggcgccatgatcccccccccccccagcctgcccggcccccccagacccggcatgatgcccgccccccacatgggcggcccccccatgatgcccatgatgggcccccccccccccggcatgatgcccgtgggccccgcccccggcatgagaccccccatgggcggccacatgcccatgatgcccggcccccccatgatgagaccccccgccagacccatgatggtgcccaccagacccggcatgaccagacccgacagatag

SEQ ID NO: 99201 - DNA, 543 bp, synthetic construct
  misc_feature 1..543: note = Description of Artificial Sequence: Synthetic coding sequence
  source 1..543: mol_type = other DNA
atgaacagcgccagcgtggacggccacctgagcggctgcagactgttcctgttcctgagccccctgttcagattctactgcgactactgcgacacctacctgacccacgacagccccagcgtgagaaagacccactgcagcggcagaaagcacaaggagaacgtgaaggactactaccagaagtggatggaggagcaggcccagagcctgatcgacaagaccaccgccgccttccagcagggcaagatcccccccacccccttcagcgcccccccccccgccggcgccatgatcccccccccccccagcctgcccggcccccccagacccggcatgatgcccgccccccacatgggcggcccccccatgatgcccatgatgggcccccccccccccggcatgatgcccgtgggccccgcccccggcatgagaccccccatgggcggccacatgcccatgatgcccggcccccccatgatgagaccccccgccagacccatgatggtgcccaccagacccggcatgaccagacccgacagatag

SEQ ID NO: 99202 - DNA, 357 bp, synthetic construct
  misc_feature 1..357: note = Description of Artificial Sequence: Synthetic coding sequence
  source 1..357: mol_type = other DNA
atggaggagcaggcccagagcctgatcgacaagaccaccgccgccttccagcagggcaagatcccccccacccccttcagcgcccccccccccgccggcgccatgatcccccccccccccagcctgcccggcccccccagacccggcatgatgcccgccccccacatgggcggcccccccatgatgcccatgatgggcccccccccccccggcatgatgcccgtgggccccgcccccggcatgagaccccccatgggcggccacatgcccatgatgcccggcccccccatgatgagaccccccgccagacccatgatggtgcccaccagacccggcatgaccagacccgacagatag

SEQ ID NO: 99203 - DNA, 159 bp, synthetic construct
  misc_feature 1..159: note = Description of Artificial Sequence: Synthetic coding sequence
  source 1..159: mol_type = other DNA
atgagaatcgagggctgcatcatcggcttcgacgagtacatgaacctggtgctggacgacgccgaggagatccacagcaagaccaagagcagaaagcagctgggcagaatcatgctgaagggcgacaacatcaccctgctgcagagcgtgagcaactag

SEQ ID NO: 99204 - DNA, 279 bp, synthetic construct
  misc_feature 1..279: note = Description of Artificial Sequence: Synthetic coding sequence
  source 1..279: mol_type = other DNA
atggcctacagaggccagggccagaaggtgcagaaggtgatggtgcagcccatcaacctgatcttcagatacctgcagaacagaagcagaatccaggtgtggctgtacgagcaggtgaacatgagaatcgagggctgcatcatcggcttcgacgagtacatgaacctggtgctggacgacgccgaggagatccacagcaagaccaagagcagaaagcagctgggcagaatcatgctgaagggcgacaacatcaccctgctgcagagcgtgagcaactag

SEQ ID NO: 99205 - DNA, 723 bp, synthetic construct
  misc_feature 1..723: note = Description of Artificial Sequence: Synthetic coding sequence
  source 1..723: mol_type = other DNA
atgaccgtgggcaagagcagcaagatgctgcagcacatcgactacagaatgagatgcatcctgcaggacggcagaatcttcatcggcaccttcaaggccttcgacaagcacatgaacctgatcctgtgcgactgcgacgagttcagaaagatcaagcccaagaacgccaagcagcccgagagagaggagaagagagtgctgggcctggtgctgctgagaggcgagaacctggtgagcatgaccgtggagggccccccccccaaggacaccggcatcgccagagtgcccctggccggcgccgccggcggccccggcgtgggcagagccgccggcagaggcgtgcccgccggcgtgcccatcccccaggcccccgccggcctggccggccccgtgagaggcgtgggcggccccagccagcaggtgatgaccccccagggcagaggcaccgtggccgccgccgccgtggccgccaccgccagcatcgccggcgcccccacccagtacccccccggcagaggcaccccccccccccccgtgggcagagccacccccccccccggcatcatggcccccccccccggcatgagaccccccatgggcccccccatcggcctgccccccgccagaggcacccccatcggcatgcccccccccggcatgagaccccccccccccggcatcagaggcccccccccccccggcatgagaccccccagaccctag

SEQ ID NO: 99206 - DNA, 723 bp, synthetic construct; identical to SEQ ID NO: 99205
  misc_feature 1..723: note = Description of Artificial Sequence: Synthetic coding sequence
  source 1..723: mol_type = other DNA

SEQ ID NO: 99207 - DNA, 723 bp, synthetic construct; identical to SEQ ID NO: 99205
  misc_feature 1..723: note = Description of Artificial Sequence: Synthetic coding sequence
  source 1..723: mol_type = other DNA

SEQ ID NO: 99208 - DNA, 723 bp, synthetic construct; identical to SEQ ID NO: 99205
  misc_feature 1..723: note = Description of Artificial Sequence: Synthetic coding sequence
  source 1..723: mol_type = other DNA

SEQ ID NO: 99209 - DNA, 735 bp, synthetic construct
  misc_feature 1..735: note = Description of Artificial Sequence: Synthetic coding sequence
  source 1..735: mol_type = other DNA
atgatggacagccagaccgtgggcaagagcagcaagatgctgcagcacatcgactacagaatgagatgcatcctgcaggacggcagaatcttcatcggcaccttcaaggccttcgacaagcacatgaacctgatcctgtgcgactgcgacgagttcagaaagatcaagcccaagaacgccaagcagcccgagagagaggagaagagagtgctgggcctggtgctgctgagaggcgagaacctggtgagcatgaccgtggagggccccccccccaaggacaccggcatcgccagagtgcccctggccggcgccgccggcggccccggcgtgggcagagccgccggcagaggcgtgcccgccggcgtgcccatcccccaggcccccgccggcctggccggccccgtgagaggcgtgggcggccccagccagcaggtgatgaccccccagggcagaggcaccgtggccgccgccgccgtggccgccaccgccagcatcgccggcgcccccacccagtacccccccggcagaggcaccccccccccccccgtgggcagagccacccccccccccggcatcatggcccccccccccggcatgagaccccccatgggcccccccatcggcctgccccccgccagaggcacccccatcggcatgcccccccccggcatgagaccccccccccccggcatcagaggcccccccccccccggcatgagaccccccagaccctag

SEQ ID NO: 99210 - DNA, 945 bp, synthetic construct; identical to SEQ ID NO: 77814
  misc_feature 1..945: note = Description of Artificial Sequence: Synthetic coding sequence
  source 1..945: mol_type = other DNA

SEQ ID NO: 99211 - DNA, 1248 bp, synthetic construct
  misc_feature 1..1248: note = Description of Artificial Sequence: Synthetic coding sequence
  source 1..1248: mol_type = other DNA
atggccaccgtgggcgagtggagctgcgtgagatgcaccttcctgaaccccgccggccagagacagtgcagcatctgcgaggcccccagacacaagcccgacctgaaccacatcctgagactgagcgtggaggagcagaagtggccctgcgccagatgcaccttcagaaacttcctgggcaaggaggcctgcgaggtgtgcggcttcacccccgagcccgcccccggcgccgccttcctgcccgtgctgaacggcgtgctgcccaagccccccgccatcctgggcgagcccaagggcagctgccaggaggaggccggccccgtgagaaccgccggcctggtggccaccgagcccgccagaggccagtgcgaggacaaggacgaggaggagaaggaggagcaggaggaggaggagggcgccgccgagcccagaggcggctgggcctgccccagatgcaccctgcacaacacccccgtggccagcagctgcagcgtgtgcggcggccccagaagactgagcctgcccagaatcccccccgaggccctggtggtgcccgaggtggtggcccccgccggcttccacgtggtgcccgccgcccccccccccggcctgcccggcgagggcgccgaggccaacccccccgccaccagccagggccccgccgccgagcccgagccccccagagtgccccccttcagccccttcagcagcaccctgcagaacaaccccgtgcccagaagcagaagagaggtgcccccccagctgcagccccccgtgcccgaggccgcccagcccagccccagcgccggctgcagaggcgccccccagggcagcggctgggccggcgccagcagactggccgagctgctgagcggcaagagactgagcgtgctggaggaggaggccaccgagggcggcaccagcagagtggaggccggcagcagcaccagcggcagcgacatcatcgacctggccggcgacaccgtgagatacacccccgccagccccagcagccccgacttcaccacctggagctgcgccaagtgcaccctgagaaaccccagcccccccagcctgcagcccctgggcagaggccccgagagcctgcccagagccgccggccccagagccggctgcgtgcagctggaggccggccacggcggcgccagaggcagccccgccgaccacgccggcagaagacaccaccccgcccacagagagcccagaagagccgccagaggcccctag

SEQ ID NO: 99212 - DNA, 270 bp, synthetic construct
  misc_feature 1..270: note = Description of Artificial Sequence: Synthetic coding sequence
  source 1..270: mol_type = other DNA
atgagcagccagcagcagaagcagccctgcaccccccccccccagctgcagcagcagcaggtgaagcagccctgccagccccccccccaggagccctgcatccccaagaccaaggagccctgccaccccaaggtgcccgagccctgccaccccaaggtgcccgagccctgccagcccaaggtgcccgagccctgccaccccaaggtgcccgagccctgccccagcatcgtgacccccgcccccgcccagcagaagaccaagcagaagtag

SEQ ID NO: 99213 - DNA, 222 bp, synthetic construct
  misc_feature 1..222: note = Description of Artificial Sequence: Synthetic coding sequence
  source 1..222: mol_type = other DNA
atgagcagccagcagcagaagcagccctgcaccccccccccccagctgcagcagcagcaggtgaagcagccctgccagccccccccccaggagccctgcatccccaagaccaaggagccctgccaccccaaggtgcccgagccctgccaccccaaggtgcccgagccctgccccagcatcgtgacccccgcccccgcccagcagaagaccaagcagaagtag

SEQ ID NO: 99214 - DNA, 219 bp, synthetic construct
  misc_feature 1..219: note = Description of Artificial Sequence: Synthetic coding sequence
  source 1..219: mol_type = other DNA
atgagctaccagcagcagcagtgcaagcagccctgccagcccccccccgtgtgccccacccccaagtgccccgagccctgccccccccccaagtgccccgagccctgccccccccccaagtgcccccagccctgccccccccagcagtgccagcagaagtacccccccgtgacccccagccccccctgccagagcaagtacccccccaagagcaagtag

SEQ ID NO: 99215 - DNA, 219 bp, synthetic construct
  misc_feature 1..219: note = Description of Artificial Sequence: Synthetic coding sequence
  source 1..219: mol_type = other DNA
atgagctaccagcagcagcagtgcaagcagccctgccagcccccccccgtgtgccccacccccaagtgccccgagccctgccccccccccaagtgccccgagccctgccccccccccaagtgcccccagccctgccccccccagcagtgccagcagaagtacccccccgtgacccccagccccccctgccagcccaagtacccccccaagagcaagtag

SEQ ID NO: 99216 - DNA, 219 bp, synthetic construct; identical to SEQ ID NO: 99215
  misc_feature 1..219: note = Description of Artificial Sequence: Synthetic coding sequence
  source 1..219: mol_type = other DNA

SEQ ID NO: 99217 - DNA, 219 bp, synthetic construct; identical to SEQ ID NO: 99215
  misc_feature 1..219: note = Description of Artificial Sequence: Synthetic coding sequence
  source 1..219: mol_type = other DNA

SEQ ID NO: 99218 - DNA, 510 bp, synthetic construct
  misc_feature 1..510: note = Description of Artificial Sequence: Synthetic coding sequence
  source 1..510: mol_type = other DNA
atgagcagctaccagcagaagcagaccttcaccccccccccccagctgcagcagcagcaggtgaagcagcccagccagccccccccccaggagatcttcgtgcccaccaccaaggagccctgccacagcaaggtgccccagcccggcaacaccaagatccccgagcccggctgcaccaaggtgcccgagcccggctgcaccaaggtgcccgagcccggctgcaccaaggtgcccgagcccggctgcaccaaggtgcccgagcccggctgcaccaaggtgcccgagcccggctgcaccaaggtgcccgagcccggctacaccaaggtgcccgagcccggcagcatcaaggtgcccgaccagggcttcatcaagttccccgagcccggcgccatcaaggtgcccgagcagggctacaccaaggtgcccgtgcccggctacaccaagctgcccgagccctgccccagcaccgtgacccccggccccgcccagcagaagaccaagcagaagtag

SEQ ID NO: 99219 - DNA, 510 bp, synthetic construct; identical to SEQ ID NO: 99218
  misc_feature 1..510: note = Description of Artificial Sequence: Synthetic coding sequence
  source 1..510: mol_type = other DNA

SEQ ID NO: 99220 - DNA, 480 bp, synthetic construct
  misc_feature 1..480: note = Description of Artificial Sequence: Synthetic coding sequence
  source 1..480: mol_type = other DNA
atgagcagctaccagcagaagcagaccttcaccccccccccccagctgcagcagcagcaggtgaagcagcccagccagccccccccccaggagatcttcgtgcccaccaccaaggagccctgccacagcaaggtgccccagcccggcaacaccaagatccccgagcccggctgcaccaaggtgcccgagcccggctgcaccaaggtgcccgagcccggctgcaccaaggtgcccgagcccggctgcaccaaggtgcccgagcccggctgcaccaaggtgcccgagcccggctgcaccaaggtgcccgagcccggctacaccaaggtgcccgagcccggcagcatcaaggtgcccgaccagggcttcatcaagttccccgagcccggcgccatcaaggtgcccgagcagggctacaccaaggtgcccgtgcccggctacaccaagctgcccgagccctgccccagcaccgtgaccccctag

SEQ ID NO: 99221 - DNA, 486 bp, synthetic construct
  misc_feature 1..486: note = Description of Artificial Sequence: Synthetic coding sequence
  source 1..486: mol_type = other DNA
atgagcagctaccagcagaagcagaccttcaccccccccccccagctgcagcagcagcaggtgaagcagcccagccagccccccccccaggagatcttcgtgcccaccaccaaggagccctgccacagcaaggtgccccagcccggcaacaccaagatccccgagcccggctgcaccaaggtgcccgagcccggctgcaccaaggtgcccgagcccggctgcaccaaggtgcccgagcccggctgcaccaaggtgcccgagcccggctgcaccaaggtgcccgagcccggctacaccaaggtgcccgagcccggcagcatcaaggtgcccgaccagggcttcatcaagttccccgagcccggcgccatcaaggtgcccgagcagggctacaccaaggtgcccgtgcccggctacaccaagctgcccgagccctgccccagcaccgtgacccccggccccgcccagcagaagaccaagcagaagtag

SEQ ID NO: 99222 - DNA, 10989 bp, synthetic construct
  misc_feature 1..10989: note = Description of Artificial Sequence: Synthetic coding sequence
  source 1..10989: mol_type = other DNA
atgagcagaagagcccccggcagcagactgagcagcggcggcggcggcggcggcaccaagtaccccagaagctggaacgactggcagcccagaaccgacagcgccagcgccgaccccgacaacctgaagtacagcagcagcagagacagaggcggcagcagcagctacggcctgcagcccagcaacagcgccgtggtgagcagacagagacacgacgacaccagagtgcacgccgacatccagaacgacgagaagggcggctacagcgtgaacggcggcagcggcgagaacacctacggcagaaagagcctgggccaggagctgagagtgaacaacgtgaccagccccgagttcaccagcgtgcagcacggcagcagagccctggccaccaaggacatgagaaagagccaggagagaagcatgagctacagcgacgagagcagactgagcaacctgctgagaagaatcaccagagaggacgacagagacagaagactggccaccgtgaagcagctgaaggagttcatccagcagcccgagaacaagctggtgctggtgaagcagctggacaacatcctggccgccgtgcacgacgtgctgaacgagagcagcaagctgctgcaggagctgagacaggagggcgcctgctgcctgggcctgctgtgcgccagcctgagctacgaggccgagaagatcttcaagtggatcttcagcaagttcagcagcagcgccaaggacgaggtgaagctgctgtacctgtgcgccacctacaaggccctggagaccgtgggcgagaagaaggccttcagcagcgtgatgcagctggtgatgaccagcctgcagagcatcctggagaacgtggacacccccgagctgctgtgcaagtgcgtgaagtgcatcctgctggtggccagatgctacccccacatcttcagcaccaacttcagagacaccgtggacatcctggtgggctggcacatcgaccacacccagaagcccagcctgacccagcaggtgagcggctggctgcagagcctggagcccttctgggtggccgacctggccttcagcaccaccctgctgggccagttcctggaggacatggaggcctacgccgaggacctgagccacgtggccagcggcgagagcgtggacgaggacgtgcccccccccagcgtgagcctgcccaagctggccgccctgctgagagtgttcagcaccgtggtgagaagcatcggcgagagattcagccccatcagaggcccccccatcaccgaggcctacgtgaccgacgtgctgtacagagtgatgagatgcgtgaccgccgccaaccaggtgttcttcagcgaggccgtgctgaccgccgccaacgagtgcgtgggcgtgctgctgggcagcctggaccccagcatgaccatccactgcgacatggtgatcacctacggcctggaccagctggagaactgccagacctgcggcaccgactacatcatcagcgtgctgaacctgctgaccctgatcgtggagcagatcaacaccaagctgcccagcagcttcgtggagaagctgttcatccccagcagcaagctgctgttcctgagataccacaaggagaaggaggtggtggccgtggcccacgccgtgtaccaggccgtgctgagcctgaagaacatccccgtgctggagaccgcctacaagctgatcctgggcgagatgacctgcgccctgaacaacctgctgcacagcctgcagctgcccgaggcctgcagcgagatcaagcacgaggccttcaagaaccacgtgttcaacgtggacaacgccaagttcgtggtgatcttcgacctgagcgccctgaccaccatcggcaacgccaagaacagcctgatcggcatgtgggccctgagccccaccgtgttcgccctgctgagcaagaacctgatgatcgtgcacagcgacctggccgtgcacttccccgccatccagtacgccgtgctgtacaccctgtacagccactgcaccagacacgaccacttcatcagcagcagcctgagcagcagcagccccagcctgttcgacggcgccgtgatcagcaccgtgaccaccgccaccaagaagcacttcagcatcatcctgaacctgctgggcatcctgctgaagaaggacaacctgaaccaggacaccagaaagctgctgatgacctgggccctggaggccgccgtgctgatgaagaagagcgagacctacgcccccctgttcagcctgcccagcttccacaagttctgcaagggcctgctggccaacaccctggtggaggacgtgaacatctgcctgcaggcctgcagcagcctgcacgccctgagcagcagcctgcccgacgacctgctgcagagatgcgtggacgtgtgcagagtgcagctggtgcacagcggcaccagaatcagacaggccttcggcaagctgctgaagagcatccccctggacgtggtgctgagcaacaacaaccacaccgagatccaggagatcagcctggccctgagaagccacatgagcaaggcccccagcaacaccttccacccccaggacttcagcgacgtgatcagcttcatcctgtacggcaacagccacagaaccggcaaggacaactggctggagagactgttctacagctgccagagactggacaagagagaccagagcaccatccccagaaacctgctgaagaccgacgccgtgctgtggcagtgggccatctgggaggccgcccagttcaccgtgctgagcaagctgagaacccccctgggcagagcccaggacaccttccagaccatcgagggcatcatcagaagcctggccgcccacaccctgaaccccgaccaggacgtgagccagtggaccaccgccgacaacgacgagggccacggcaacaaccagctgagactggtgctgctgctgcagtacctggagaacctggagaagctgatgtacaacgcctacgagggctgcgccaacgccctgaccagcccccccaaggtgatcagaaccttcttctacaccaacagacagacctgccaggactggctgaccagaatcagactgagcatcatgagagtgggcctgctggccggccagcccgccgtgaccgtgagacacggcttcgacctgctgaccgagatgaagaccaccagcctgagccagggcaacgagctggaggtgaccatcatgatggtggtggaggccctgtgcgagctgcactgccccgaggccatccagggcatcgccgtgtggagcagcagcatcgtgggcaagaacctgctgtggatcaacagcgtggcccagcaggccgagggcagattcgagaaggccagcgtggagtaccaggagcacctgtgcgccatgaccggcgtggactgctgcatcagcagcttcgacaagagcgtgctgaccctggccaacgccggcagaaacagcgccagccccaagcacagcctgaacggcgagagcagaaagaccgtgctgagcaagcccaccgacagcagccccgaggtgatcaactacctgggcaacaaggcctgcgagtgctacatcagcatcgccgactgggccgccgtgcaggagtggcagaacgccatccacgacctgaagaagagcaccagcagcaccagcctgaacctgaaggccgacttcaactacatcaagagcctgagcagcttcgagagcggcaagttcgtggagtgcaccgagcagctggagctgctgcccggcgagaacatcaacctgctggccggcggcagcaaggagaagatcgacatgaagaagctgctgcccaacatgctgagccccgaccccagagagctgcagaagagcatcgaggtgcagctgctgagaagcagcgtgtgcctggccaccgccctgaaccccatcgagcaggaccagaagtggcagagcatcaccgagaacgtggtgaagtacctgaagcagaccagcagaatcgccatcggccccctgagactgagcaccctgaccgtgagccagagcctgcccgtgctgagcaccctgcagctgtactgcagcagcgccctggagaacaccgtgagcaacagactgagcaccgaggactgcctgatccccctgttcagcgaggccctgagaagctgcaagcagcacgacgtgagaccctggatgcaggccctgagatacaccatgtaccagaaccagctgctggagaagatcaaggagcagaccgtgcccatcagaagccacctgatggagctgggcctgaccgccgccaagttcgccagaaagagaggcaacgtgagcctggccaccagactgctggcccagtgcagcgaggtgcagctgggcaagaccaccaccgcccaggacctggtgcagcacttcaagaagctgagcacccagggccaggtggacgagaagtggggccccgagctggacatcgagaagaccaagctgctgtacaccgccggccagagcacccacgccatggagatgctgagcagctgcgccatcagcttctgcaagagcgtgaaggccgagtacgccgtggccaagagcatcctgaccctggccaagtggatccaggccgagtggaaggagatcagcggccagctgaagcaggtgtacagagcccagcaccagcagaacttcaccggcctgagcaccctgagcaagaacatcctgaccctgatcgagctgcccagcgtgaacaccatggaggaggagtaccccagaatcgagagcgagagcaccgtgcacatcggcgtgggcgagcccgacttcatcctgggccagctgtaccacctgagcagcgtgcaggcccccgaggtggccaagagctgggccgccctggccagctgggcctacagatggggcagaaaggtggtggacaacgccagccagggcgagggcgtgagactgctgcccagagagaagagcgaggtgcagaacctgctgcccgacaccatcaccgaggaggagaaggagagaatctacggcatcctgggccaggccgtgtgcagacccgccggcatccaggacgaggacatcaccctgcagatcaccgagagcgaggacaacgaggaggacgacatggtggacgtgatctggagacagctgatcagcagctgcccctggctgagcgagctggacgagagcgccaccgagggcgtgatcaaggtgtggagaaaggtggtggacagaatcttcagcctgtacaagctgagctgcagcgcctacttcaccttcctgaagctgaacgccggccagatccccctggacgaggacgaccccagactgcacctgagccacagagtggagcagagcaccgacgacatgatcgtgatggccaccctgagactgctgagactgctggtgaagcacgccggcgagctgagacagtacctggagcacggcctggagaccacccccaccgccccctggagaggcatcatcccccagctgttcagcagactgaaccaccccgaggtgtacgtgagacagagcatctgcaacctgctgtgcagagtggcccaggacagcccccacctgatcctgtaccccgccatcgtgggcaccatcagcctgagcagcgagagccaggccagcggcaacaagttcagcaccgccatccccaccctgctgggcaacatccagggcgaggagctgctggtgagcgagtgcgagggcggcagcccccccgccagccaggacagcaacaaggacgagcccaagagcggcctgaacgaggaccaggccatgatgcaggactgctacagcaagatcgtggacaagctgagcagcgccaaccccaccatggtgctgcaggtgcagatgctggtggccgagctgagaagagtgaccgtgctgtgggacgagctgtggctgggcgtgctgctgcagcagcacatgtacgtgctgagaagaatccagcagctggaggacgaggtgaagagagtgcagaacaacaacaccctgagaaaggaggagaagatcgccatcatgagagagaagcacaccgccctgatgaagcccatcgtgttcgccctggagcacgtgagaagcatcaccgccgcccccgccgagaccccccacgagaagtggttccaggacaactacggcgacgccatcgagaacgccctggagaagctgaagacccccctgaaccccgccaagcccggcagcagctggatccccttcaaggagatcatgctgagcctgcagcagagagcccagaagagagccagctacatcctgagactggaggagatcagcccctggctggccgccatgaccaacaccgagatcgccctgcccggcgaggtgagcgccagagacaccgtgaccatccacagcgtgggcggcaccatcaccatcctgcccaccaagaccaagcccaagaagctgctgttcctgggcagcgacggcaagagctacccctacctgttcaagggcctggaggacctgcacctggacgagagaatcatgcagttcctgagcatcgtgaacaccatgttcgccaccatcaacagacaggagacccccagattccacgccagacactacagcgtgacccccctgggcaccagaagcggcctgatccagtgggtggacggcgccacccccctgttcggcctgtacaagagatggcagcagagagaggccgccctgcaggcccagaaggcccaggacagctaccagaccccccagaaccccggcatcgtgcccagacccagcgagctgtactacagcaagatcggccccgccctgaagaccgtgggcctgagcctggacgtgagcagaagagactggcccctgcacgtgatgaaggccgtgctggaggagctgatggaggccaccccccccaacctgctggccaaggagctgtggagcagctgcaccacccccgacgagtggtggagagtgacccagagctacgccagaagcaccgccgtgatgagcatggtgggctacatcatcggcctgggcgacagacacctggacaacgtgctgatcgacatgaccaccggcgaggtggtgcacatcgactacaacgtgtgcttcgagaagggcaagagcctgagagtgcccgagaaggtgcccttcagaatgacccagaacatcgagaccgccctgggcgtgaccggcgtggagggcgtgttcagactgagctgcgagcaggtgctgcacatcatgagaagaggcagagagaccctgctgaccctgctggaggccttcgtgtacgaccccctggtggactggaccgccggcggcgaggccggcttcgccggcgccgtgtacggcggcggcggccagcaggccgagagcaagcagagcaagagagagatggagagagagatcaccagaagcctgttcagcagcagagtggccgagatcaaggtgaactggttcaagaacagagacgagatgctggtggtgctgcccaagctggacggcagcctggacgagtacctgagcctgcaggagcagctgaccgacgtggagaagctgcagggcaagctgctggaggagatcgagttcctggagggcgccgagggcgtggaccaccccagccacaccctgcagcacagatacagcgagcacacccagctgcagacccagcagagagccgtgcaggaggccatccaggtgaagctgaacgagttcgagcagtggatcacccactaccaggccgccttcaacaacctggaggccacccagctggccagcctgctgcaggagatcagcacccagatggacctgggcccccccagctacgtgcccgccaccgccttcctgcagaacgccggccaggcccacctgatcagccagtgcgagcagctggagggcgaggtgggcgccctgctgcagcagagaagaagcgtgctgagaggctgcctggagcagctgcaccactacgccaccgtggccctgcagtaccccaaggccatcttccagaagcacagaatcgagcagtggaagacctggatggaggagctgatctgcaacaccaccgtggagagatgccaggagctgtacagaaagtacgagatgcagtacgccccccagcccccccccaccgtgtgccagttcatcaccgccaccgagatgaccctgcagagatacgccgccgacatcaacagcagactgatcagacaggtggagagactgaagcaggaggccgtgaccgtgcccgtgtgcgaggaccagctgaaggagatcgagagatgcatcaaggtgttcctgcacgagaacggcgaggagggcagcctgagcctggccagcgtgatcatcagcgccctgtgcaccctgaccagaagaaacctgatgatggagggcgccgccagcagcgccggcgagcagctggtggacctgaccagcagagacggcgcctggttcctggaggagctgtgcagcatgagcggcaacgtgacctgcctggtgcagctgctgaagcagtgccacctggtgccccaggacctggacatccccaaccccatggaggccagcgagaccgtgcacctggccaacggcgtgtacaccagcctgcaggagctgaacagcaacttcagacagatcatcttccccgaggccctgagatgcctgatgaagggcgagtacaccctggagagcatgctgcacgagctggacggcctgatcgagcagaccaccgacggcgtgcccctgcagaccctggtggagagcctgcaggcctacctgagaaacgccgccatgggcctggaggaggagacccacgcccactacatcgacgtggccagactgctgcacgcccagtacggcgagctgatccagcccagaaacggcagcgtggacgagacccccaagatgagcgccggccagatgctgctggtggccttcgacggcatgttcgcccaggtggagaccgccttcagcctgctggtggagaagctgaacaagatggagatccccatcgcctggagaaagatcgacatcatcagagaggccagaagcacccaggtgaacttcttcgacgacgacaaccacagacaggtgctggaggagatcttcttcctgaagagactgcagaccatcaaggagttcttcagactgtgcggcaccttcagcaagaccctgagcggcagcagcagcctggaggaccagaacaccgtgaacggccccgtgcagatcgtgaacgtgaagaccctgttcagaaacagctgcttcagcgaggaccagatggccaagcccatcaaggccttcaccgccgacttcgtgagacagctgctgatcggcctgcccaaccaggccctgggcctgaccctgtgcagcttcatcagcgccctgggcgtggacatcatcgcccaggtggaggccaaggacttcggcgccgagagcaaggtgagcgtggacgacctgtgcaagaaggccgtggagcacaacatccagatcggcaagttcagccagctggtgatgaacagagccaccgtgctggccagcagctacgacaccgcctggaagaagcacgacctggtgagaagactggagaccagcatcagcagctgcaagaccagcctgcagagagtgcagctgcacatcgccatgttccagcagtggcagcacgaggacctgctgatcaacagaccccaggccatgagcgtgacccccccccccagaagcgccatcctgaccagcatgaagaagaagctgcacaccctgagccagatcgagaccagcatcgccaccgtgcaggagaagctggccgccctggagagcagcatcgagcagagactgaagtgggccggcggcgccaaccccgccctggcccccgtgctgcaggacttcgaggccaccatcgccgagagaagaaacctggtgctgaaggagagccagagagccagccaggtgaccttcctgtgcagcaacatcatccacttcgagagcctgagaaccagaaccgccgaggccctgaacctggacgccgccctgttcgagctgatcaagagatgccagcagatgtgcagcttcgccagccagttcaacagcagcgtgagcgagctggagctgagactgctgcagagagtggacaccggcctggagcaccccatcggcagcagcgagtggctgctgagcgcccacaagcagctgacccaggacatgagcacccagagagccatccagaccgagaaggagcagcagatcgagaccgtgtgcgagaccatccagaacctggtggacaacatcaagaccgtgctgaccggccacaacagacagctgggcgacgtgaagcacctgctgaaggccatggccaaggacgaggaggccgccctggccgacggcgaggacgtgccctacgagaacagcgtgagacagttcctgggcgagtacaagagctggcaggacaacatccagaccgtgctgttcaccctggtgcaggccatgggccaggtgagaagccaggagcacgtggagatgctgcaggagatcacccccaccctgaaggagctgaagacccagagccagagcatctacaacaacctggtgagcttcgccagccccctggtgaccgacgccaccaacgagtgcagcagccccaccagcagcgccacctaccagcccagcttcgccgccgccgtgagaagcaacaccggccagaagacccagcccgacgtgatgagccagaacgccagaaagctgatccagaagaacctggccaccagcgccgacaccccccccagcaccgtgcccggcaccggcaagagcgtggcctgcagccccaagaaggccgtgagagaccccaagaccggcaaggccgtgcaggagagaaacagctacgccgtgagcgtgtggaagagagtgaaggccaagctggagggcagagacgtggaccccaacagaagaatgagcgtggccgagcaggtggactacgtgatcaaggaggccaccaacctggacaacctggcccagctgtacgagggctggaccgcctgggtgtag

SEQ ID NO: 99223 - DNA, 10986 bp, synthetic construct
  misc_feature 1..10986: note = Description of Artificial Sequence: Synthetic coding sequence
  source 1..10986: mol_type = other DNA
atgagcagaagagcccccggcagcagactgagcagcggcggcggcggcggcggcaccaagtaccccagaagctggaacgactggcagcccagaaccgacagcgccagcgccgaccccgacaacctgaagtacagcagcagcagagacagaggcggcagcagcagctacggcctgcagcccagcaacagcgccgtggtgagcagacagagacacgacgacaccagagtgcacgccgacatccagaacgacgagaagggcggctacagcgtgaacggcggcagcggcgagaacacctacggcagaaagagcctgggccaggagctgagagtgaacaacgtgaccagccccgagttcaccagcgtgcagcacggcagcagagccctggccaccaaggacatgagaaagagccaggagagaagcatgagctacagcgacgagagcagactgagcaacctgctgagaagaatcaccagagaggacgacagagacagaagactggccaccgtgaagcagctgaaggagttcatccagcagcccgagaacaagctggtgctggtgaagcagctggacaacatcctggccgccgtgcacgacgtgctgaacgagagcagcaagctgctgcaggagctgagacaggagggcgcctgctgcctgggcctgctgtgcgccagcctgagctacgaggccgagaagatcttcaagtggatcttcagcaagttcagcagcagcgccaaggacgaggtgaagctgctgtacctgtgcgccacctacaaggccctggagaccgtgggcgagaagaaggccttcagcagcgtgatgcagctggtgatgaccagcctgcagagcatcctggagaacgtggacacccccgagctgctgtgcaagtgcgtgaagtgcatcctgctggtggccagatgctacccccacatcttcagcaccaacttcagagacaccgtggacatcctggtgggctggcacatcgaccacacccagaagcccagcctgacccagcaggtgagcggctggctgcagagcctggagcccttctgggtggccgacctggccttcagcaccaccctgctgggccagttcctggaggacatggaggcctacgccgaggacctgagccacgtggccagcggcgagagcgtggacgaggacgtgcccccccccagcgtgagcctgcccaagctggccgccctgctgagagtgttcagcaccgtggtgagaagcatcggcgagagattcagccccatcagaggcccccccatcaccgaggcctacgtgaccgacgtgctgtacagagtgatgagatgcgtgaccgccgccaaccaggtgttcttcagcgaggccgtgctgaccgccgccaacgagtgcgtgggcgtgctgctgggcagcctggaccccagcatgaccatccactgcgacatggtgatcacctacggcctggaccagctggagaactgccagacctgcggcaccgactacatcatcagcgtgctgaacctgctgaccctgatcgtggagcagatcaacaccaagctgcccagcagcttcgtggagaagctgttcatccccagcagcaagctgctgttcctgagataccacaaggagaaggaggtggtggccgtggcccacgccgtgtaccaggccgtgctgagcctgaagaacatccccgtgctggagaccgcctacaagctgatcctgggcgagatgacctgcgccctgaacaacctgctgcacagcctgcagctgcccgaggcctgcagcgagatcaagcacgaggccttcaagaaccacgtgttcaacgtggacaacgccaagttcgtggtgatcttcgacctgagcgccctgaccaccatcggcaacgccaagaacagcctgatcggcatgtgggccctgagccccaccgtgttcgccctgctgagcaagaacctgatgatcgtgcacagcgacctggccgtgcacttccccgccatccagtacgccgtgctgtacaccctgtacagccactgcaccagacacgaccacttcatcagcagcagcctgagcagcagcagccccagcctgttcgacggcgccgtgatcagcaccgtgaccaccgccaccaagaagcacttcagcatcatcctgaacctgctgggcatcctgctgaagaaggacaacctgaaccaggacaccagaaagctgctgatgacctgggccctggaggccgccgtgctgatgaagaagagcgagacctacgcccccctgttcagcctgcccagcttccacaagttctgcaagggcctgctggccaacaccctggtggaggacgtgaacatctgcctgcaggcctgcagcagcctgcacgccctgagcagcagcctgcccgacgacctgctgcagagatgcgtggacgtgtgcagagtgcagctggtgcacagcggcaccagaatcagacaggccttcggcaagctgctgaagagcatccccctggacgtggtgctgagcaacaacaaccacaccgagatccaggagatcagcctggccctgagaagccacatgagcaaggcccccagcaacaccttccacccccaggacttcagcgacgtgatcagcttcatcctgtacggcaacagccacagaaccggcaaggacaactggctggagagactgttctacagctgccagagactggacaagagagaccagagcaccatccccagaaacctgctgaagaccgacgccgtgctgtggcagtgggccatctgggaggccgcccagttcaccgtgctgagcaagctgagaacccccctgggcagagcccaggacaccttccagaccatcgagggcatcatcagaagcctggccgcccacaccctgaaccccgaccaggacgtgagccagtggaccaccgccgacaacgacgagggccacggcaacaaccagctgagactggtgctgctgctgcagtacctggagaacctggagaagctgatgtacaacgcctacgagggctgcgccaacgccctgaccagcccccccaaggtgatcagaaccttcttctacaccaacagacagacctgccaggactggctgaccagaatcagactgagcatcatgagagtgggcctgctggccggccagcccgccgtgaccgtgagacacggcttcgacctgctgaccgagatgaagaccaccagcctgagccagggcaacgagctggaggtgaccatcatgatggtggtggaggccctgtgcgagctgcactgccccgaggccatccagggcatcgccgtgtggagcagcagcatcgtgggcaagaacctgctgtggatcaacagcgtggcccagcaggccgagggcagattcgagaaggccagcgtggagtaccaggagcacctgtgcgccatgaccggcgtggactgctgcatcagcagcttcgacaagagcgtgctgaccctggccaacgccggcagaaacagcgccagccccaagcacagcctgaacggcgagagcagaaagaccgtgctgagcaagcccaccgacagcagccccgaggtgatcaactacctgggcaacaaggcctgcgagtgctacatcagcatcgccgactgggccgccgtgcaggagtggcagaacgccatccacgacctgaagaagagcaccagcagcaccagcctgaacctgaaggccgacttcaactacatcaagagcctgagcagcttcgagagcggcaagttcgtggagtgcaccgagcagctggagctgctgcccggcgagaacatcaacctgctggccggcggcagcaaggagaagatcgacatgaagaagctgctgcccaacatgctgagccccgaccccagagagctgcagaagagcatcgaggtgcagctgctgagaagcagcgtgtgcctggccaccgccctgaaccccatcgagcaggaccagaagtggcagagcatcaccgagaacgtggtgaagtacctgaagcagaccagcagaatcgccatcggccccctgagactgagcaccctgaccgtgagccagagcctgcccgtgctgagcaccctgcagctgtactgcagcagcgccctggagaacaccgtgagcaacagactgagcaccgaggactgcctgatccccctgttcagcgaggccctgagaagctgcaagcagcacgacgtgagaccctggatgcaggccctgagatacaccatgtaccagaaccagctgctggagaagatcaaggagcagaccgtgcccatcagaagccacctgatggagctgggcctgaccgccgccaagttcgccagaaagagaggcaacgtgagcctggccaccagactgctggcccagtgcagcgaggtgcagctgggcaagaccaccaccgcccaggacctggtgcagcacttcaagaagctgagcacccagggccaggtggacgagaagtggggccccgagctggacatcgagaagaccaagctgctgtacaccgccggccagagcacccacgccatggagatgctgagcagctgcgccatcagcttctgcaagagcgtgaaggccgagtacgccgtggccaagagcatcctgaccctggccaagtggatccaggccgagtggaaggagatcagcggccagctgaagcaggtgtacagagcccagcaccagcagaacttcaccggcctgagcaccctgagcaagaacatcctgaccctgatcgagctgcccagcgtgaacaccatggaggaggagtaccccagaatcgagagcgagagcaccgtgcacatcggcgtgggcgagcccgacttcatcctgggccagctgtaccacctgagcagcgtgcaggcccccgaggtggccaagagctgggccgccctggccagctgggcctacagatggggcagaaaggtggtggacaacgccagccagggcgagggcgtgagactgctgcccagagagaagagcgaggtgcagaacctgctgcccgacaccatcaccgaggaggagaaggagagaatctacggcatcctgggccaggccgtgtgcagacccgccggcatccaggacgaggacatcaccctgcagatcaccgagagcgaggacaacgaggaggacgacatggtggacgtgatctggagacagctgatcagcagctgcccctggctgagcgagctggacgagagcgccaccgagggcgtgatcaaggtgtggagaaaggtggtggacagaatcttcagcctgtacaagctgagctgcagcgcctacttcaccttcctgaagctgaacgccggccagatccccctggacgaggacgaccccagactgcacctgagccacagagtggagcagagcaccgacgacatgatcgtgatggccaccctgagactgctgagactgctggtgaagcacgccggcgagctgagacagtacctggagcacggcctggagaccacccccaccgccccctggagaggcatcatcccccagctgttcagcagactgaaccaccccgaggtgtacgtgagacagagcatctgcaacctgctgtgcagagtggcccaggacagcccccacctgatcctgtaccccgccatcgtgggcaccatcagcctgagcagcgagagccaggccagcggcaacaagttcagcaccgccatccccaccctgctgggcaacatccagggcgaggagctgctggtgagcgagtgcgagggcggcagcccccccgccagccaggacagcaacaaggacgagcccaagagcggcctgaacgaggaccaggccatgatgcaggactgctacagcaagatcgtggacaagctgagcagcgccaaccccaccatggtgctgcaggtgcagatgctggtggccgagctgagaagagtgaccgtgctgtgggacgagctgtggctgggcgtgctgctgcagcagcacatgtacgtgctgagaagaatccagcagctggaggacgaggtgaagagagtgcagaacaacaacaccctgagaaaggaggagaagatcgccatcatgagagagaagcacaccgccctgatgaagcccatcgtgttcgccctggagcacgtgagaagcatcaccgccgcccccgccgagaccccccacgagaagtggttccaggacaactacggcgacgccatcgagaacgccctggagaagctgaagacccccctgaaccccgccaagcccggcagcagctggatccccttcaaggagatcatgctgagcctgcagcagagagcccagaagagagccagctacatcctgagactggaggagatcagcccctggctggccgccatgaccaacaccgagatcgccctgcccggcgaggtgagcgccagagacaccgtgaccatccacagcgtgggcggcaccatcaccatcctgcccaccaagaccaagcccaagaagctgctgttcctgggcagcgacggcaagagctacccctacctgttcaagggcctggaggacctgcacctggacgagagaatcatgcagttcctgagcatcgtgaacaccatgttcgccaccatcaacagacaggagacccccagattccacgccagacactacagcgtgacccccctgggcaccagaagcggcctgatccagtgggtggacggcgccacccccctgttcggcctgtacaagagatggcagcagagagaggccgccctgcaggcccagaaggcccaggacagctaccagaccccccagaaccccggcatcgtgcccagacccagcgagctgtactacagcaagatcggccccgccctgaagaccgtgggcctgagcctggacgtgagcagaagagactggcccctgcacgtgatgaaggccgtgctggaggagctgatggaggccaccccccccaacctgctggccaaggagctgtggagcagctgcaccacccccgacgagtggtggagagtgacccagagctacgccagaagcaccgccgtgatgagcatggtgggctacatcatcggcctgggcgacagacacctggacaacgtgctgatcgacatgaccaccggcgaggtggtgcacatcgactacaacgtgtgcttcgagaagggcaagagcctgagagtgcccgagaaggtgcccttcagaatgacccagaacatcgagaccgccctgggcgtgaccggcgtggagggcgtgttcagactgagctgcgagcaggtgctgcacatcatgagaagaggcagagagaccctgctgaccctgctggaggccttcgtgtacgaccccctggtggactggaccgccggcggcgaggccggcttcgccggcgccgtgtacggcggcggcggccagcaggccgagagcaagcagagcaagagagagatggagagagagatcaccagaagcctgttcagcagcagagtggccgagatcaaggtgaactggttcaagaacagagacgagatgctggtggtgctgcccaagctggacggcagcctggacgagtacctgagcctgcaggagcagctgaccgacgtggagaagctgcagggcaagctgctggaggagatcgagttcctggagggcgccgagggcgtggaccaccccagccacaccctgcagcacagatacagcgagcacacccagctgcagacccagcagagagccgtgcaggaggccatccaggtgaagctgaacgagttcgagcagtggatcacccactaccaggccgccttcaacaacctggaggccacccagctggccagcctgctgcaggagatcagcacccagatggacctgggcccccccagctacgtgcccgccaccgccttcctgcagaacgccggccaggcccacctgatcagccagtgcgagcagctggagggcgaggtgggcgccctgctgcagcagagaagaagcgtgctgagaggctgcctggagcagctgcaccactacgccaccgtggccctgcagtaccccaaggccatcttccagaagcacagaatcgagcagtggaagacctggatggaggagctgatctgcaacaccaccgtggagagatgccaggagctgtacagaaagtacgagatgcagtacgccccccagcccccccccaccgtgtgccagttcatcaccgccaccgagatgaccctgcagagatacgccgccgacatcaacagcagactgatcagacaggtggagagactgaagcaggaggccgtgaccgtgcccgtgtgcgaggaccagctgaaggagatcgagagatgcatcaaggtgttcctgcacgagaacggcgaggagggcagcctgagcctggccagcgtgatcatcagcgccctgtgcaccctgaccagaagaaacctgatgatggagggcgccgccagcagcgccggcgagcagctggtggacctgaccagcagagacggcgcctggttcctggaggagctgtgcagcatgagcggcaacgtgacctgcctggtgcagctgctgaagcagtgccacctggtgccccaggacctggacatccccaaccccatggaggccagcgagaccgtgcacctggccaacggcgtgtacaccagcctgcaggagctgaacagcaacttcagacagatcatcttccccgaggccctgagatgcctgatgaagggcgagtacaccctggagagcatgctgcacgagctggacggcctgatcgagcagaccaccgacggcgtgcccctgcagaccctggtggagagcctgcaggcctacctgagaaacgccgccatgggcctggaggaggagacccacgcccactacatcgacgtggccagactgctgcacgcccagtacggcgagctgatccagcccagaaacggcagcgtggacgagacccccaagatgagcgccggccagatgctgctggtggccttcgacggcatgttcgcccaggtggagaccgccttcagcctgctggtggagaagctgaacaagatggagatccccatcgcctggagaaagatcgacatcatcagagaggccagaagcacccaggtgaacttcttcgacgacgacaaccacagacaggtgctggaggagatcttcttcctgaagagactgcagaccatcaaggagttcttcagactgtgcggcaccttcagcaagaccctgagcggcagcagcagcctggaggaccagaacaccgtgaacggccccgtgcagatcgtgaacgtgaagaccctgttcagaaacagctgcttcagcgaggaccagatggccaagcccatcaaggccttcaccgccgacttcgtgagacagctgctgatcggcctgcccaaccaggccctgggcctgaccctgtgcagcttcatcagcgccctgggcgtggacatcatcgcccaggtggaggccaaggacttcggcgccgagagcaaggtgagcgtggacgacctgtgcaagaaggccgtggagcacaacatccagatcggcaagttcagccagctggtgatgaacagagccaccgtgctggccagcagctacgacaccgcctggaagaagcacgacctggtgagaagactggagaccagcatcagcagctgcaagaccagcctgcagagagtgcagctgcacatcgccatgttccagtggcagcacgaggacctgctgatcaacagaccccaggccatgagcgtgacccccccccccagaagcgccatcctgaccagcatgaagaagaagctgcacaccctgagccagatcgagaccagcatcgccaccgtgcaggagaagctggccgccctggagagcagcatcgagcagagactgaagtgggccggcggcgccaaccccgccctggcccccgtgctgcaggacttcgaggccaccatcgccgagagaagaaacctggtgctgaaggagagccagagagccagccaggtgaccttcctgtgcagcaacatcatccacttcgagagcctgagaaccagaaccgccgaggccctgaacctggacgccgccctgttcgagctgatcaagagatgccagcagatgtgcagcttcgccagccagttcaacagcagcgtgagcgagctggagctgagactgctgcagagagtggacaccggcctggagcaccccatcggcagcagcgagtggctgctgagcgcccacaagcagctgacccaggacatgagcacccagagagccatccagaccgagaaggagcagcagatcgagaccgtgtgcgagaccatccagaacctggtggacaacatcaagaccgtgctgaccggccacaacagacagctgggcgacgtgaagcacctgctgaaggccatggccaaggacgaggaggccgccctggccgacggcgaggacgtgccctacgagaacagcgtgagacagttcctgggcgagtacaagagctggcaggacaacatccagaccgtgctgttcaccctggtgcaggccatgggccaggtgagaagccaggagcacgtggagatgctgcaggagatcacccccaccctgaaggagctgaagacccagagccagagcatctacaacaacctggtgagcttcgccagccccctggtgaccgacgccaccaacgagtgcagcagccccaccagcagcgccacctaccagcccagcttcgccgccgccgtgagaagcaacaccggccagaagacccagcccgacgtgatgagccagaacgccagaaagctgatccagaagaacctggccaccagcgccgacaccccccccagcaccgtgcccggcaccggcaagagcgtggcctgcagccccaagaaggccgtgagagaccccaagaccggcaaggccgtgcaggagagaaacagctacgccgtgagcgtgtggaagagagtgaaggccaagctggagggcagagacgtggaccccaacagaagaatgagcgtggccgagcaggtggactacgtgatcaaggaggccaccaacctggacaacctggcccagctgtacgagggctggaccgcctgggtgtag

SEQ ID NO: 99224 - DNA, 3051 bp, synthetic construct
  misc_feature 1..3051: note = Description of Artificial Sequence: Synthetic coding sequence
  source 1..3051: mol_type = other DNA
atgagccagggcccccccaccggcgagagcagcgagcccgaggccaaggtgctgcacaccaagagactgtacagagccgtggtggaggccgtgcacagactggacctgatcctgtgcaacaagaccgcctaccaggaggtgttcaagcccgagaacatcagcctgagaaacaagctgagagagctgtgcgtgaagctgatgttcctgcaccccgtggactacggcagaaaggccgaggagctgctgtggagaaaggtgtactacgaggtgatccagctgatcaagaccaacaagaagcacatccacagcagaagcaccctggagtgcgcctacagaacccacctggtggccggcatcggcttctaccagcacctgctgctgtacatccagagccactaccagctggagctgcagtgctgcatcgactggacccacgtgaccgaccccctgatcggctgcaagaagcccgtgagcgccagcggcaaggagatggactgggcccagatggcctgccacagatgcctggtgtacctgggcgacctgagcagataccagaacgagctggccggcgtggacaccgagctgctggccgagagattctactaccaggccctgagcgtggccccccagatcggcatgcccttcaaccagctgggcaccctggccggcagcaagtactacaacgtggaggccatgtactgctacctgagatgcatccagagcgaggtgagcttcgagggcgcctacggcaacctgaagagactgtacgacaaggccgccaagatgtaccaccagctgaagaagtgcgagaccagaaagctgagccccggcaagaagagatgcaaggacatcaagagactgctggtgaacttcatgtacctgcagagcctgctgcagcccaagagcagcagcgtggacagcgagctgaccagcctgtgccagagcgtgctggaggacttcaacctgtgcctgttctacctgcccagcagccccaacctgagcctggccagcgaggacgaggaggagtacgagagcggctacgccttcctgcccgacctgctgatcttccagatggtgatcatctgcctgatgtgcgtgcacagcctggagagagccggcagcaagcagtacagcgccgccatcgccttcaccctggccctgttcagccacctggtgaaccacgtgaacatcagactgcaggccgagctggaggagggcgagaaccccgtgcccgccttccagagcgacggcaccgacgagcccgagagcaaggagcccgtggagaaggaggaggagcccgaccccgagcccccccccgtgaccccccaggtgggcgagggcagaaagagcagaaagttcagcagactgagctgcctgagaagaagaagacacccccccaaggtgggcgacgacagcgacctgagcgagggcttcgagagcgacagcagccacgacagcgccagagccagcgagggcagcgacagcggcagcgacaagagcctggagggcggcggcaccgccttcgacgccgagaccgacagcgagatgaacagccaggagagcagaagcgacctggaggacatggaggaggaggagggcaccagaagccccaccctggagccccccagaggcagaagcgaggcccccgacagcctgaacggccccctgggccccagcgaggccagcatcgccagcaacctgcaggccatgagcacccagatgttccagaccaagagatgcttcagactggcccccaccttcagcaacctgctgctgcagcccaccaccaacccccacaccagcgccagccacagaccctgcgtgaacggcgacgtggacaagcccagcgagcccgccagcgaggagggcagcgagagcgagggcagcgagagcagcggcagaagctgcagaaacgagagaagcatccaggagaagctgcaggtgctgatggccgagggcctgctgcccgccgtgaaggtgttcctggactggctgagaaccaaccccgacctgatcatcgtgtgcgcccagagcagccagagcctgtggaacagactgagcgtgctgctgaacctgctgcccgccgccggcgagctgcaggagagcggcctggccctgtgccccgaggtgcaggacctgctggagggctgcgagctgcccgacctgcccagcagcctgctgctgcccgaggacatggccctgagaaacctgccccccctgagagccgcccacagaagattcaacttcgacaccgacagacccctgctgagcaccctggaggagagcgtggtgagaatctgctgcatcagaagcttcggccacttcatcgccagactgcagggcagcatcctgcagttcaaccccgaggtgggcatcttcgtgagcatcgcccagagcgagcaggagagcctgctgcagcaggcccaggcccagttcagaatggcccaggaggaggccagaagaaacagactgatgagagacatggcccagctgagactgcagctggaggtgagccagctggagggcagcctgcagcagcccaaggcccagagcgccatgagcccctacctggtgcccgacacccaggccctgtgccaccacctgcccgtgatcagacagctggccaccagcggcagattcatcgtgatcatccccagaaccgtgatcgacggcctggacctgctgaagaaggagcaccccggcgccagagacggcatcagatacctggaggccgagttcaagaagggcaacagatacatcagatgccagaaggaggtgggcaagagcttcgagagacacaagctgaagagacaggacgccgacgcctggaccctgtacaagatcctggacagctgcaagcagctgaccctggcccagggcgccggcgaggaggaccccagcggcatggtgaccatcatcaccggcctgcccctggacaaccccagcgtgctgagcggccccatgcaggccgccctgcaggccgccgcccacgccagcgtggacatcaagaacgtgctggacttctacaagcagtggaaggagatcggctag

SEQ ID NO: 99225 - DNA, 1125 bp, synthetic construct
  misc_feature 1..1125: note = Description of Artificial Sequence: Synthetic coding sequence
  source 1..1125: mol_type = other DNA
atgagccagggcccccccaccggcgagagcagcgagcccgaggccaaggtgctgcacaccaagagactgtacagagccgtggtggaggccgtgcacagactggacctgatcctgtgcaacaagaccgcctaccaggaggtgttcaagcccgagaacatcagcctgagaaacaagctgagagagctgtgcgtgaagctgatgttcctgcaccccgtggactacggcagaaaggccgaggagctgctgtggagaaaggtgtactacgaggtgatccagctgatcaagaccaacaagaagcacatccacagcagaagcaccctggagtgcgcctacagaacccacctggtggccggcatcggcttctaccagcacctgctgctgtacatccagagccactaccagctggagctgcagtgctgcatcgactggacccacgtgaccgaccccctgatcggctgcaagaagcccgtgagcgccagcggcaaggagatggactgggcccagatggcctgccacagatgcctggtgtacctgggcgacctgagcagataccagaacgagctggccggcgtggacaccgagctgctggccgagagattctactaccaggccctgagcgtggccccccagatcggcatgcccttcaaccagctgggcaccctggccggcagcaagtactacaacgtggaggccatgtactgctacctgagatgcatccagagcgaggtgagcttcgagggcgcctacggcaacctgaagagactgtacgacaaggccgccaagatgtaccaccagctgaagaagtgcgagaccagaaagctgagccccggcaagaagagatgcaaggacatcaagagactgctggtgaacttcatgtacctgcagagcctgctgcagcccaagagcagaggctgcaccagccactgccccaccagcgccctgtgcctgcccctgagcagcttccagggcagagagcaggccccccccagagccgccggcagcctggcctgcgccagcaccgtgagctgcgcccaccagccccacagatgctgcgccctgtgcagctggctgctgtgctgggacagaatgggctgccaggaggagaagaagggcggcgccgtgtag

SEQ ID NO: 99226 - DNA, 417 bp, synthetic construct
  misc_feature 1..417: note = Description of Artificial Sequence: Synthetic coding sequence
  source 1..417: mol_type = other DNA
tgattcatcgtgatcatccccagaaccgtgatcgacggcctggacctgctgaagaaggagcaccccggcgccagagacggcatcagatacctggaggccgagttcaagaagggcaacagatacatcagatgccagaaggaggtgggcaagagcttcgagagacacaagctgaagagacaggacgccgacgcctggaccctgtacaagatcctggacagctgcaagcagctgaccctggcccagggcgccggcgaggaggaccccagcggcatggtgaccatcatcaccggcctgcccctggacaaccccagcgtgctgagcggccccatgcaggccgccctgcaggccgccgcccacgccagcgtggacatcaagaacgtgctggacttctacaagcagtggaaggagatcggctag

SEQ ID NO: 99227 - DNA, 3438 bp, synthetic construct
  misc_feature 1..3438: note = Description of Artificial Sequence: Synthetic coding sequence
  source 1..3438: mol_type = other DNA
atgctggtgaccgacctggagtacgccctggacaagaaggtggagcaggacctgtggaaccacgccttcaagaaccagatcaccaccctgcagggccaggccaagaacagagccaaccccaacagaagcgaggtgcaggccaacctgagcctgttcctggaggccgccagcggcttctacacccagctgctgcaggagctgtgcaccgtgttcaacgtggacctgccctgcagagtgaagagcagccagctgggcatcatcagcaacaagcagacccacaccagcgccatcgtgaagccccagagcagcagctgcagctacatctgccagcactgcctggtgcacctgggcgacatcgccagatacagaaaccagaccagccaggccgagagctactacagacacgccgcccagctggtgcccagcaacggccagccctacaaccagctggccatcctggccagcagcaagggcgaccacctgaccaccatcttctactactgcagaagcatcgccgtgaagttccccttccccgccgccagcaccaacctgcagaaggccctgagcaaggccctggagagcagagacgaggtgaagaccaagtggggcgtgagcgacttcatcaaggccttcatcaagttccacggccacgtgtacctgagcaagagcctggagaagctgagccccctgagagagaagctggaggagcagttcaagagactgctgttccagaaggccttcaacagccagcagctggtgcacgtgaccgtgatcaacctgttccagctgcaccacctgagagacttcagcaacgagaccgagcagcacacctacagccaggacgagcagctgtgctggacccagctgctggccctgttcatgagcttcctgggcatcctgtgcaagtgccccctgcagaacgagagccaggaggagagctacaacgcctaccccctgcccgccgtgaaggtgagcatggactggctgagactgagacccagagtgttccaggaggccgtggtggacgagagacagtacatctggccctggctgatcagcctgctgaacagcttccacccccacgaggaggacctgagcagcatcagcgccacccccctgcccgaggagttcgagctgcagggcttcctggccctgagacccagcttcagaaacctggacttcagcaagggccaccagggcatcaccggcgacaaggagggccagcagagaagaatcagacagcagagactgatcagcatcggcaagtggatcgccgacaaccagcccagactgatccagtgcgagaacgaggtgggcaagctgctgttcatcaccgagatccccgagctgatcctggaggaccccagcgaggccaaggagaacctgatcctgcaggagaccagcgtgatcgagagcctggccgccgacggcagccccggcctgaagagcgtgctgagcaccagcagaaacctgagcaacaactgcgacaccggcgagaagcccgtggtgaccttcaaggagaacatcaagaccagagaggtgaacagagaccagggcagaagcttcccccccaaggaggtgagaagagactacagcaagggcatcaccgtgaccaagaacgacggcaagaaggacaacaacaagagaaagaccgagaccaagaagtgcaccctggagaagctgcaggagaccggcaagcagaacgtggccgtgcaggtgaagagccagaccgagctgagaaagacccccgtgagcgaggccagaaagacccccgtgacccagacccccacccaggccagcaacagccagttcatccccatccaccaccccggcgccttcccccccctgcccagcagacccggcttccccccccccacctacgtgatccccccccccgtggccttcagcatgggcagcggctacaccttccccgccggcgtgagcgtgcccggcaccttcctgcagcccaccgcccacagccccgccggcaaccaggtgcaggccggcaagcagagccacatcccctacagccagcagagacccagcggccccggccccatgaaccagggcccccagcagagccagccccccagccagcagcccctgaccagcctgcccgcccagcccaccgcccagagcaccagccagctgcaggtgcaggccctgacccagcagcagcagagccccaccaaggccgtgcccgccctgggcaagagccccccccaccacagcggcttccagcagtaccagcaggccgacgccagcaagcagctgtggaaccccccccaggtgcagggccccctgggcaagatcatgcccgtgaagcagccctactacctgcagacccaggaccccatcaagctgttcgagcccagcctgcagccccccgtgatgcagcagcagcccctggagaagaagatgaagcccttccccatggagccctacaaccacaaccccagcgaggtgaaggtgcccgagttctactgggacagcagctacagcatggccgacaacagaagcgtgatggcccagcaggccaacatcgacagaagaggcaagagaagccccggcgtgttcagacccgagcaggaccccgtgcccagaatgcccttcgaggaccccaagagcagccccctgctgccccccgacctgctgaagagcctggccgccctggaggaggaggaggagctgatcttcagcaacccccccgacctgtaccccgccctgctgggccccctggccagcctgcccggcagaagcctgttcaagagcctgctggagaagcccagcgagctgatgagccacagcagcagcttcctgagcctgaccggcttcagcctgaaccaggagagataccccaacaacagcatgttcaacgaggtgtacggcaagaacctgaccagcagcagcaaggccgagctgagccccagcatggccccccaggagaccagcctgtacagcctgttcgagggcaccccctggagccccagcctgcccgccagcagcgaccacagcacccccgccagccagagcccccacagcagcaaccccagcagcctgcccagcagcccccccacccacaaccacaacagcgtgcccttcagcaacttcggccccatcggcacccccgacaacagagacagaagaaccgccgacagatggaagaccgacaagcccgccatgggcggcttcggcatcgactacctgagcgccaccagcagcagcgagagcagctggcaccaggccagcacccccagcggcacctggaccggccacggccccagcatggaggacagcagcgccgtgctgatggagagcctgaagagcatctggagcagcagcatgatgcaccccggccccagcgccctggagcagctgctgatgcagcagaagcagaagcagcagagaggccagggcaccatgaaccccccccactag

SEQ ID NO: 99228 - DNA, 3414 bp, synthetic construct
  misc_feature 1..3414: note = Description of Artificial Sequence: Synthetic coding sequence
  source 1..3414: mol_type = other DNA
atgagcctgcagagcgcccagtacctgagacaggccgaggtgctgaaggccgacatgaccgacagcaagctgggccccgccgaggtgtggaccagcagacaggccctgcaggacctgtaccagaagatgctggtgaccgacctggagtacgccctggacaagaaggtggagcaggacctgtggaaccacgccttcaagaaccagatcaccaccctgcagggccaggccaagaacagagccaaccccaacagaagcgaggtgcaggccaacctgagcctgttcctggaggccgccagcggcttctacacccagctgctgcaggagctgtgcaccgtgttcaacgtggacctgccctgcagagtgaagagcagccagctgggcatcatcagcaacaagcagacccacaccagcgccatcgtgaagccccagagcagcagctgcagctacatctgccagcactgcctggtgcacctgggcgacatcgccagatacagaaaccagaccagccaggccgagagctactacagacacgccgcccagctggtgcccagcaacggccagccctacaaccagctggccatcctggccagcagcaagggcgaccacctgaccaccatcttctactactgcagaagcatcgccgtgaagttccccttccccgccgccagcaccaacctgcagaaggccctgagcaaggccctggagagcagagacgaggtgaagaccaagtggggcgtgagcgacttcatcaaggccttcatcaagttccacggccacgtgtacctgagcaagagcctggagaagctgagccccctgagagagaagctggaggagcagttcaagagactgctgttccagaaggccttcaacagccagcagctggtgcacgtgaccgtgatcaacctgttccagctgcaccacctgagagacttcagcaacgagaccgagcagcacacctacagccaggacgagcagctgtgctggacccagctgctggccctgttcatgagcttcctgggcatcctgtgcaagtgccccctgcagaacgagagccaggaggagagctacaacgcctaccccctgcccgccgtgaaggtgagcatggactggctgagactgagacccagagtgttccaggaggccgtggtggacgagagacagtacatctggccctggctgatcagcctgctgaacagcttccacccccacgaggaggacctgagcagcatcagcgccacccccctgcccgaggagttcgagctgcagggcttcctggccctgagacccagcttcagaaacctggacttcagcaagggccaccagggcatcaccggcgacaaggagggccagcagagaagaatcagacagcagagactgatcagcatcggcaagtggatcgccgacaaccagcccagactgatccagtgcgagaacgaggtgggcaagctgctgttcatcaccgagatccccgagctgatcctggaggaccccagcgaggccaaggagaacctgatcctgcaggagaccagcgtgatcgagagcctggccgccgacggcagccccggcctgaagagcgtgctgagcaccagcagaaacctgagcaacaactgcgacaccggcgagaagcccgtggtgaccttcaaggagaacatcaagaccagagaggtgaacagagaccagggcagaagcttcccccccaaggaggtgagaagagactacagcaagggcatcaccgtgaccaagaacgacggcaagaaggacaacaacaagagaaagaccgagaccaagaagtgcaccctggagaagctgcaggagaccggcaagcagaacgtggccgtgcaggtgaagagccagaccgagctgagaaagacccccgtgagcgaggccagaaagacccccgtgacccagacccccacccaggccagcaacagccagttcatccccatccaccaccccggcgccttcccccccctgcccagcagacccggcttccccccccccacctacgtgatccccccccccgtggccttcagcatgggcagcggctacaccttccccgccggcgtgagcgtgcccggcaccttcctgcagcccaccgcccacagccccgccggcaaccaggtgcaggccggcaagcagagccacatcccctacagccagcagagacccagcggccccggccccatgaaccagggcccccagcagagccagccccccagccagcagcccctgaccagcctgcccgcccagcccaccgcccagagcaccagccagctgcaggtgcaggccctgacccagcagcagcagagccccaccaaggccgtgcccgccctgggcaagagccccccccaccacagcggcttccagcagtaccagcaggccgacgccagcaagcagctgtggaaccccccccaggtgcagggccccctgggcaagatcatgcccgtgaagcagccctactacctgcagacccaggaccccatcaagctgttcgagcccagcctgcagccccccgtgatgcagcagcagcccctggagaagaagatgaagcccttccccatggagccctacaaccacaaccccagcgaggtgaaggtgcccgagttctactgggacagcagctacagcatggccgacaacagaagcgtgatggcccagcaggccaacatcgacagaagaggcaagagaagccccggcgtgttcagacccgagcaggaccccgtgcccagaatgcccttcgagaagagcctgctggagaagcccagcgagctgatgagccacagcagcagcttcctgagcctgaccggcttcagcctgaaccaggagagataccccaacaacagcatgttcaacgaggtgtacggcaagaacctgaccagcagcagcaaggccgagctgagccccagcatggccccccaggagaccagcctgtacagcctgttcgagggcaccccctggagccccagcctgcccgccagcagcgaccacagcacccccgccagccagagcccccacagcagcaaccccagcagcctgcccagcagcccccccacccacaaccacaacagcgtgcccttcagcaacttcggccccatcggcacccccgacaacagagacagaagaaccgccgacagatggaagaccgacaagcccgccatgggcggcttcggcatcgactacctgagcgccaccagcagcagcgagagcagctggcaccaggccagcacccccagcggcacctggaccggccacggccccagcatggaggacagcagcgccgtgctgatggagagcctgaagagcatctggagcagcagcatgatgcaccccggccccagcgccctggagcagctgctgatgcagcagaagcagaagcagcagagaggccagggcaccatgaaccccccccactag

SEQ ID NO: 99229 - DNA, 3513 bp, synthetic construct
  misc_feature 1..3513: note = Description of Artificial Sequence: Synthetic coding sequence
  source 1..3513: mol_type = other DNA
atgagaaactggatgttcctgcagatcgtgatcgtgggcgagaacgtgagcttcaagagccagatgagaaccgagaacctgaagagcgaggagcacctgaagagcagcaacatcagacaggccgaggtgctgaaggccgacatgaccgacagcaagctgggccccgccgaggtgtggaccagcagacaggccctgcaggacctgtaccagaagatgctggtgaccgacctggagtacgccctggacaagaaggtggagcaggacctgtggaaccacgccttcaagaaccagatcaccaccctgcagggccaggccaagaacagagccaaccccaacagaagcgaggtgcaggccaacctgagcctgttcctggaggccgccagcggcttctacacccagctgctgcaggagctgtgcaccgtgttcaacgtggacctgccctgcagagtgaagagcagccagctgggcatcatcagcaacaagcagacccacaccagcgccatcgtgaagccccagagcagcagctgcagctacatctgccagcactgcctggtgcacctgggcgacatcgccagatacagaaaccagaccagccaggccgagagctactacagacacgccgcccagctggtgcccagcaacggccagccctacaaccagctggccatcctggccagcagcaagggcgaccacctgaccaccatcttctactactgcagaagcatcgccgtgaagttccccttccccgccgccagcaccaacctgcagaaggccctgagcaaggccctggagagcagagacgaggtgaagaccaagtggggcgtgagcgacttcatcaaggccttcatcaagttccacggccacgtgtacctgagcaagagcctggagaagctgagccccctgagagagaagctggaggagcagttcaagagactgctgttccagaaggccttcaacagccagcagctggtgcacgtgaccgtgatcaacctgttccagctgcaccacctgagagacttcagcaacgagaccgagcagcacacctacagccaggacgagcagctgtgctggacccagctgctggccctgttcatgagcttcctgggcatcctgtgcaagtgccccctgcagaacgagagccaggaggagagctacaacgcctaccccctgcccgccgtgaaggtgagcatggactggctgagactgagacccagagtgttccaggaggccgtggtggacgagagacagtacatctggccctggctgatcagcctgctgaacagcttccacccccacgaggaggacctgagcagcatcagcgccacccccctgcccgaggagttcgagctgcagggcttcctggccctgagacccagcttcagaaacctggacttcagcaagggccaccagggcatcaccggcgacaaggagggccagcagagaagaatcagacagcagagactgatcagcatcggcaagtggatcgccgacaaccagcccagactgatccagtgcgagaacgaggtgggcaagctgctgttcatcaccgagatccccgagctgatcctggaggaccccagcgaggccaaggagaacctgatcctgcaggagaccagcgtgatcgagagcctggccgccgacggcagccccggcctgaagagcgtgctgagcaccagcagaaacctgagcaacaactgcgacaccggcgagaagcccgtggtgaccttcaaggagaacatcaagaccagagaggtgaacagagaccagggcagaagcttcccccccaaggaggtgaagagccagaccgagctgagaaagacccccgtgagcgaggccagaaagacccccgtgacccagacccccacccaggccagcaacagccagttcatccccatccaccaccccggcgccttcccccccctgcccagcagacccggcttccccccccccacctacgtgatccccccccccgtggccttcagcatgggcagcggctacaccttccccgccggcgtgagcgtgcccggcaccttcctgcagcccaccgcccacagccccgccggcaaccaggtgcaggccggcaagcagagccacatcccctacagccagcagagacccagcggccccggccccatgaaccagggcccccagcagagccagccccccagccagcagcccctgaccagcctgcccgcccagcccaccgcccagagcaccagccagctgcaggtgcaggccctgacccagcagcagcagagccccaccaaggccgtgcccgccctgggcaagagccccccccaccacagcggcttccagcagtaccagcaggccgacgccagcaagcagctgtggaaccccccccaggtgcagggccccctgggcaagatcatgcccgtgaagcagccctactacctgcagacccaggaccccatcaagctgttcgagcccagcctgcagccccccgtgatgcagcagcagcccctggagaagaagatgaagcccttccccatggagccctacaaccacaaccccagcgaggtgaaggtgcccgagttctactgggacagcagctacagcatggccgacaacagaagcgtgatggcccagcaggccaacatcgacagaagaggcaagagaagccccggcgtgttcagacccgagcaggaccccgtgcccagaatgcccttcgaggaccccaagagcagccccctgctgccccccgacctgctgaagagcctggccgccctggaggaggaggaggagctgatcttcagcaacccccccgacctgtaccccgccctgctgggccccctggccagcctgcccggcagaagcctgttcaagagcctgctggagaagcccagcgagctgatgagccacagcagcagcttcctgagcctgaccggcttcagcctgaaccaggagagataccccaacaacagcatgttcaacgaggtgtacggcaagaacctgaccagcagcagcaaggccgagctgagccccagcatggccccccaggagaccagcctgtacagcctgttcgagggcaccccctggagccccagcctgcccgccagcagcgaccacagcacccccgccagccagagcccccacagcagcaaccccagcagcctgcccagcagcccccccacccacaaccacaacagcgtgcccttcagcaacttcggccccatcggcacccccgacaacagagacagaagaaccgccgacagatggaagaccgacaagcccgccatgggcggcttcggcatcgactacctgagcgccaccagcagcagcgagagcagctggcaccaggccagcacccccagcggcacctggaccggccacggccccagcatggaggacagcagcgccgtgctgatggagagcctgaagagcatctggagcagcagcatgatgcaccccggccccagcgccctggagcagctgctgatgcagcagaagcagaagcagcagagaggccagggcaccatgaaccccccccactag

SEQ ID NO: 99230 - DNA, 2274 bp, synthetic construct
  misc_feature 1..2274: note = Description of Artificial Sequence: Synthetic coding sequence
  source 1..2274: mol_type = other DNA
atgctggtgaccgacctggagtacgccctggacaagaaggtggagcaggacctgtggaaccacgccttcaagaaccagatcaccaccctgcagggccaggccaagaacagagccaaccccaacagaagcgaggtgcaggccaacctgagcctgttcctggaggccgccagcggcttctacacccagctgctgcaggagctgtgcaccgtgttcaacgtggacctgccctgcagagtgaagagcagccagctgggcatcatcagcaacaagcagacccacaccagcgccatcgtgaagccccagagcagcagctgcagctacatctgccagcactgcctggtgcacctgggcgacatcgccagatacagaaaccagaccagccaggccgagagctactacagacacgccgcccagctggtgcccagcaacggccagccctacaaccagctggccatcctggccagcagcaagggcgaccacctgaccaccatcttctactactgcagaagcatcgccgtgaagttccccttccccgccgccagcaccaacctgcagaaggccctgagcaaggccctggagagcagagacgaggtgaagaccaagtggggcgtgagcgacttcatcaaggccttcatcaagttccacggccacgtgtacctgagcaagagcctggagaagctgagccccctgagagagaagctggaggagcagttcaagagactgctgttccagaaggccttcaacagccagcagctggtgcacgtgaccgtgatcaacctgttccagctgcaccacctgagagacttcagcaacgagaccgagcagcacacctacagccaggacgagcagctgtgctggacccagctgctggccctgttcatgagcttcctgggcatcctgtgcaagtgccccctgcagaacgagagccaggaggagagctacaacgcctaccccctgcccgccgtgaaggtgagcatggactggctgagactgagacccagagtgttccaggaggccgtggtggacgagagacagtacatctggccctggctgatcagcctgctgaacagcttccacccccacgaggaggacctgagcagcatcagcgccacccccctgcccgaggagttcgagctgcagggcttcctggccctgagacccagcttcagaaacctggacttcagcaagggccaccagggcatcaccggcgacaaggagggccagcagagaagaatcagacagcagagactgatcagcatcggcaagtggatcgccgacaaccagcccagactgatccagtgcgagaacgaggtgggcaagctgctgttcatcaccgagatccccgagctgatcctggaggaccccagcgaggccaaggagaacctgatcctgcaggagaccagcgtgatcgagagcctggccgccgacggcagccccggcctgaagagcgtgctgagcaccagcagaaacctgagcaacaactgcgacaccggcgagaagcccgtggtgaccttcaaggagaacatcaagaccagagaggtgaacagagaccagggcagaagcttcccccccaaggaggtgaagagccagaccgagctgagaaagacccccgtgagcgaggccagaaagacccccgtgacccagacccccacccaggccagcaacagccagttcatccccatccaccaccccggcgccttcccccccctgcccagcagacccggcttccccccccccacctacgtgatccccccccccgtggccttcagcatgggcagcggctacaccttccccgccggcgtgagcgtgcccggcaccttcctgcagcccaccgcccacagccccgccggcaaccaggtgcaggccggcaagcagagccacatcccctacagccagcagagacccagcggccccggccccatgaaccagggcccccagcagagccagccccccagccagcagcccctgaccagcctgcccgcccagcccaccgcccagagcaccagccagctgcaggtgcaggccctgacccagcagcagcagagccccaccaaggccgtgcccgccctgggcaagagccccccccaccacagcggcttccagcagtaccagcaggccgacgccagcaagcagctgtggaaccccccccaggtgcagggccccctgggcaagatcatgcccgtgaagcagccctactacctgcagacccaggaccccatcaagctgttcgagcccagcctgcagccccccgtgatgcagcagcagcccctgtag

SEQ ID NO: 99231 - DNA, 3150 bp, synthetic construct
  misc_feature 1..3150: note = Description of Artificial Sequence: Synthetic coding sequence
  source 1..3150: mol_type = other DNA
atgctggtgaccgacctggagtacgccctggacaagaaggtggagcaggacctgtggaaccacgccttcaagaaccagatcaccaccctgcagggccaggccaagaacagagccaaccccaacagaagcgaggtgcaggccaacctgagcctgttcctggaggccgccagcggcttctacacccagctgctgcaggagctgtgcaccgtgttcaacgtggacctgccctgcagagtgaagagcagccagctgggcatcatcagcaacaagcagacccacaccagcgccatcgtgaagccccagagcagcagctgcagctacatctgccagcactgcctggtgcacctgggcgacatcgccagatacagaaaccagaccagccaggccgagagctactacagacacgccgcccagctggtgcccagcaacggccagccctacaaccagctggccatcctggccagcagcaagggcgaccacctgaccaccatcttctactactgcagaagcatcgccgtgaagttccccttccccgccgccagcaccaacctgcagaaggccctgagcaaggccctggagagcagagacgaggtgaagaccaagtggggcgtgagcgacttcatcaaggccttcatcaagttccacggccacgtgtacctgagcaagagcctggagaagctgagccccctgagagagaagctggaggagcagttcaagagactgctgttccagaaggccttcaacagccagcagctggtgcacgtgaccgtgatcaacctgttccagctgcaccacctgagagacttcagcaacgagaccgagcagcacacctacagccaggacgagcagctgtgctggacccagctgctggccctgttcatgagcttcctgggcatcctgtgcaagtgccccctgcagaacgagagccaggaggagagctacaacgcctaccccctgcccgccgtgaaggtgagcatggactggctgagactgagacccagagtgttccaggaggccgtggtggacgagagacagtacatctggccctggctgatcagcctgctgaacagcttccacccccacgaggaggacctgagcagcatcagcgccacccccctgcccgaggagttcgagctgcagggcttcctggccctgagacccagcttcagaaacctggacttcagcaagggccaccagggcatcaccggcgacaaggagggccagcagagaagaatcagacagcagagactgatcagcatcggcaagtggatcgccgacaaccagcccagactgatccagtgcgagaacgaggtgggcaagctgctgttcatcaccgagatccccgagctgatcctggaggaccccagcgaggccaaggagaacctgatcctgcaggagaccagcgtgatcgagagcctggccgccgacggcagccccggcctgaagagcgtgctgagcaccagcagaaacctgagcaacaactgcgacaccggcgagaagcccgtggtgaccttcaaggagaacatcaagaccagagaggtgaacagagaccagggcagaagcttcccccccaaggaggtgaagagccagaccgagctgagaaagacccccgtgagcgaggccagaaagacccccgtgacccagacccccacccaggccagcaacagccagttcatccccatccaccaccccggcgccttcccccccctgcccagcagacccggcttccccccccccacctacgtgatccccccccccgtggccttcagcatgggcagcggctacaccttccccgccggcgtgagcgtgcccggcaccttcctgcagcccaccgcccacagccccgccggcaaccaggtgcaggccggcaagcagagccacatcccctacagccagcagagacccagcggccccggccccatgaaccagggcccccagcagagccagccccccagccagcagcccctgaccagcctgcccgcccagcccaccgcccagagcaccagccagctgcaggtgcaggccctgacccagcagcagcagagccccaccaaggccgtgcccgccctgggcaagagccccccccaccacagcggcttccagcagtaccagcaggccgacgccagcaagcagctgtggaaccccccccaggtgcagggccccctgggcaagatcatgcccgtgaagcagccctactacctgcagacccaggaccccatcaagctgttcgagcccagcctgcagccccccgtgatgcagcagcagcccctggagaagaagatgaagcccttccccatggagccctacaaccacaaccccagcgaggtgaaggtgcccgagttctactgggacagcagctacagcatggccgacaacagaagcgtgatggcccagcaggccaacatcgacagaagaggcaagagaagccccggcgtgttcagacccgagcaggaccccgtgcccagaatgcccttcgagaagagcctgctggagaagcccagcgagctgatgagccacagcagcagcttcctgagcctgaccggcttcagcctgaaccaggagagataccccaacaacagcatgttcaacgaggtgtacggcaagaacctgaccagcagcagcaaggccgagctgagccccagcatggccccccaggagaccagcctgtacagcctgttcgagggcaccccctggagccccagcctgcccgccagcagcgaccacagcacccccgccagccagagcccccacagcagcaaccccagcagcctgcccagcagcccccccacccacaaccacaacagcgtgcccttcagcaacttcggccccatcggcacccccgacaacagagacagaagaaccgccgacagatggaagaccgacaagcccgccatgggcggcttcggcatcgactacctgagcgccaccagcagcagcgagagcagctggcaccaggccagcacccccagcggcacctggaccggccacggccccagcatggaggacagcagcgccgtgctgatggagagcctgaagagcatctggagcagcagcatgatgcaccccggccccagcgccctggagcagctgctgatgcagcagaagcagaagcagcagagaggccagggcaccatgaaccccccccactag

SEQ ID NO: 99232 - DNA, 3537 bp, synthetic construct
  misc_feature 1..3537: note = Description of Artificial Sequence: Synthetic coding sequence
  source 1..3537: mol_type = other DNA
atgagcctgcagagcgcccagtacctgagacaggccgaggtgctgaaggccgacatgaccgacagcaagctgggccccgccgaggtgtggaccagcagacaggccctgcaggacctgtaccagaagatgctggtgaccgacctggagtacgccctggacaagaaggtggagcaggacctgtggaaccacgccttcaagaaccagatcaccaccctgcagggccaggccaagaacagagccaaccccaacagaagcgaggtgcaggccaacctgagcctgttcctggaggccgccagcggcttctacacccagctgctgcaggagctgtgcaccgtgttcaacgtggacctgccctgcagagtgaagagcagccagctgggcatcatcagcaacaagcagacccacaccagcgccatcgtgaagccccagagcagcagctgcagctacatctgccagcactgcctggtgcacctgggcgacatcgccagatacagaaaccagaccagccaggccgagagctactacagacacgccgcccagctggtgcccagcaacggccagccctacaaccagctggccatcctggccagcagcaagggcgaccacctgaccaccatcttctactactgcagaagcatcgccgtgaagttccccttccccgccgccagcaccaacctgcagaaggccctgagcaaggccctggagagcagagacgaggtgaagaccaagtggggcgtgagcgacttcatcaaggccttcatcaagttccacggccacgtgtacctgagcaagagcctggagaagctgagccccctgagagagaagctggaggagcagttcaagagactgctgttccagaaggccttcaacagccagcagctggtgcacgtgaccgtgatcaacctgttccagctgcaccacctgagagacttcagcaacgagaccgagcagcacacctacagccaggacgagcagctgtgctggacccagctgctggccctgttcatgagcttcctgggcatcctgtgcaagtgccccctgcagaacgagagccaggaggagagctacaacgcctaccccctgcccgccgtgaaggtgagcatggactggctgagactgagacccagagtgttccaggaggccgtggtggacgagagacagtacatctggccctggctgatcagcctgctgaacagcttccacccccacgaggaggacctgagcagcatcagcgccacccccctgcccgaggagttcgagctgcagggcttcctggccctgagacccagcttcagaaacctggacttcagcaagggccaccagggcatcaccggcgacaaggagggccagcagagaagaatcagacagcagagactgatcagcatcggcaagtggatcgccgacaaccagcccagactgatccagtgcgagaacgaggtgggcaagctgctgttcatcaccgagatccccgagctgatcctggaggaccccagcgaggccaaggagaacctgatcctgcaggagaccagcgtgatcgagagcctggccgccgacggcagccccggcctgaagagcgtgctgagcaccagcagaaacctgagcaacaactgcgacaccggcgagaagcccgtggtgaccttcaaggagaacatcaagaccagagaggtgaacagagaccagggcagaagcttcccccccaaggaggtgaagagccagaccgagctgagaaagacccccgtgagcgaggccagaaagacccccgtgacccagacccccacccaggccagcaacagccagttcatccccatccaccaccccggcgccttcccccccctgcccagcagacccggcttccccccccccacctacgtgatccccccccccgtggccttcagcatgggcagcggctacaccttccccgccggcgtgagcgtgcccggcaccttcctgcagcccaccgcccacagccccgccggcaaccaggtgcaggccggcaagcagagccacatcccctacagccagcagagacccagcggccccggccccatgaaccagggcccccagcagagccagccccccagccagcagcccctgaccagcctgcccgcccagcccaccgcccagagcaccagccagctgcaggtgcaggccctgacccagcagcagcagagccccaccaaggccgtgcccgccctgggcaagagccccccccaccacagcggcttccagcagtaccagcaggccgacgccagcaagcagctgtggaaccccccccaggtgcagggccccctgggcaagatcatgcccgtgaagcagccctactacctgcagacccaggaccccatcaagctgttcgagcccagcctgcagccccccgtgatgcagcagcagcccctggagaagaagatgaagcccttccccatggagccctacaaccacaaccccagcgaggtgaaggtgcccgagttctactgggacagcagctacagcatggccgacaacagaagcgtgatggcccagcaggccaacatcgacagaagaggcaagagaagccccggcgtgttcagacccgagcaggaccccgtgcccagaatgcccttcgaggaccccaagagcagccccctgctgccccccgacctgctgaagagcctggccgccctggaggaggaggaggagctgatcttcagcaacccccccgacctgtaccccgccctgctgggccccctggccagcctgcccggcagaagcctgttcaagagcctgctggagaagcccagcgagctgatgagccacagcagcagcttcctgagcctgaccggcttcagcctgaaccaggagagataccccaacaacagcatgttcaacgaggtgtacggcaagaacctgaccagcagcagcaaggccgagctgagccccagcatggccccccaggagaccagcctgtacagcctgttcgagggcaccccctggagccccagcctgcccgccagcagcgaccacagcacccccgccagccagagcccccacagcagcaaccccagcagcctgcccagcagcccccccacccacaaccacaacagcgtgcccttcagcaacttcggccccatcggcacccccgacaacagagacagaagaaccgccgacagatggaagaccgacaagcccgccatgggcggcttcggcatcgactacctgagcgccaccagcagcagcgagagcagctggcaccaggccagcacccccagcggcacctggaccggccacggccccagcatggaggacagcagcgccgtgctgatggagagcctgaagaagcagcagcacggcgtgcagcagctgggccccaagagacagagcgaggaggagggcagcagcagcatctgcgtggcccacagaggccccagacccctgcccagctgcagcctgcccgccagcaccttcagagtgaagttcaaggccgccagaacctgcgcccaccaggcccagaagaagaccagaagaagacccttctggaagagaagaaagaagggcaagtag

SEQ ID NO: 99233 - DNA, 3276 bp, synthetic construct
  misc_feature 1..3276: note = Description of Artificial Sequence: Synthetic coding sequence
  source 1..3276: mol_type = other DNA
atgagcctgcagagcgcccagtacctgagacaggccgaggtgctgaaggccgacatgaccgacagcaagctgggccccgccgaggtgtggaccagcagacaggccctgcaggacctgtaccagaagatgctggtgaccgacctggagtacgccctggacaagaaggtggagcaggacctgtggaaccacgccttcaagaaccagatcaccaccctgcagggccaggccaagaacagagccaaccccaacagaagcgaggtgcaggccaacctgagcctgttcctggaggccgccagcggcttctacacccagctgctgcaggagctgtgcaccgtgttcaacgtggacctgccctgcagagtgaagagcagccagctgggcatcatcagcaacaagcagacccacaccagcgccatcgtgaagccccagagcagcagctgcagctacatctgccagcactgcctggtgcacctgggcgacatcgccagatacagaaaccagaccagccaggccgagagctactacagacacgccgcccagctggtgcccagcaacggccagccctacaaccagctggccatcctggccagcagcaagggcgaccacctgaccaccatcttctactactgcagaagcatcgccgtgaagttccccttccccgccgccagcaccaacctgcagaaggccctgagcaaggccctggagagcagagacgaggtgaagaccaagtggggcgtgagcgacttcatcaaggccttcatcaagttccacggccacgtgtacctgagcaagagcctggagaagctgagccccctgagagagaagctggaggagcagttcaagagactgctgttccagaaggccttcaacagccagcagctggtgcacgtgaccgtgatcaacctgttccagctgcaccacctgagagacttcagcaacgagaccgagcagcacacctacagccaggacgagcagctgtgctggacccagctgctggccctgttcatgagcttcctgggcatcctgtgcaagtgccccctgcagaacgagagccaggaggagagctacaacgcctaccccctgcccgccgtgaaggtgagcatggactggctgagactgagacccagagtgttccaggaggccgtggtggacgagagacagtacatctggccctggctgatcagcctgctgaacagcttccacccccacgaggaggacctgagcagcatcagcgccacccccctgcccgaggagttcgagctgcagggcttcctggccctgagacccagcttcagaaacctggacttcagcaagggccaccagggcatcaccggcgacaaggagggccagcagagaagaatcagacagcagagactgatcagcatcggcaagtggatcgccgacaaccagcccagactgatccagtgcgagaacgaggtgggcaagctgctgttcatcaccgagatccccgagctgatcctggaggaccccagcgaggccaaggagaacctgatcctgcaggagaccagcgtgatcgagagcctggccgccgacggcagccccggcctgaagagcgtgctgagcaccagcagaaacctgagcaacaactgcgacaccggcgagaagcccgtggtgaccttcaaggagaacatcaagaccagagaggtgaacagagaccagggcagaagcttcccccccaaggaggtgaagagccagaccgagctgagaaagacccccgtgagcgaggccagaaagacccccgtgacccagacccccacccaggccagcaacagccagttcatccccatccaccaccccggcgccttcccccccctgcccagcagacccggcttccccccccccacctacgtgatccccccccccgtggccttcagcatgggcagcggctacaccttccccgccggcgtgagcgtgcccggcaccttcctgcagcccaccgcccacagccccgccggcaaccaggtgcaggccggcaagcagagccacatcccctacagccagcagagacccagcggccccggccccatgaaccagggcccccagcagagccagccccccagccagcagcccctgaccagcctgcccgcccagcccaccgcccagagcaccagccagctgcaggtgcaggccctgacccagcagcagcagagccccaccaaggccgtgcccgccctgggcaagagccccccccaccacagcggcttccagcagtaccagcaggccgacgccagcaagcagctgtggaaccccccccaggtgcagggccccctgggcaagatcatgcccgtgaagcagccctactacctgcagacccaggaccccatcaagctgttcgagcccagcctgcagccccccgtgatgcagcagcagcccctggagaagaagatgaagcccttccccatggagccctacaaccacaaccccagcgaggtgaaggtgcccgagttctactgggacagcagctacagcatggccgacaacagaagcgtgatggcccagcaggccaacatcgacagaagaggcaagagaagccccggcgtgttcagacccgagcaggaccccgtgcccagaatgcccttcgagaagagcctgctggagaagcccagcgagctgatgagccacagcagcagcttcctgagcctgaccggcttcagcctgaaccaggagagataccccaacaacagcatgttcaacgaggtgtacggcaagaacctgaccagcagcagcaaggccgagctgagccccagcatggccccccaggagaccagcctgtacagcctgttcgagggcaccccctggagccccagcctgcccgccagcagcgaccacagcacccccgccagccagagcccccacagcagcaaccccagcagcctgcccagcagcccccccacccacaaccacaacagcgtgcccttcagcaacttcggccccatcggcacccccgacaacagagacagaagaaccgccgacagatggaagaccgacaagcccgccatgggcggcttcggcatcgactacctgagcgccaccagcagcagcgagagcagctggcaccaggccagcacccccagcggcacctggaccggccacggccccagcatggaggacagcagcgccgtgctgatggagagcctgaagagcatctggagcagcagcatgatgcaccccggccccagcgccctggagcagctgctgatgcagcagaagcagaagcagcagagaggccagggcaccatgaaccccccccactag

SEQ ID NO: 99234 - DNA, 2976 bp, synthetic construct
  misc_feature 1..2976: note = Description of Artificial Sequence: Synthetic coding sequence
  source 1..2976: mol_type = other DNA
atggccggccccgtgagcctgagagacctgctgatgggcgccagcgcctggatgggcagcgagagccccggcggcagccccaccgagggcggcggcagcgccgccggcggccccgagcccccctggagagaggacgagatctgcgtggtgggcatcttcggcaagaccgccctgagactgaacagcgagaagttcagcctggtgaacaccgtgtgcgacagacaggtgttccccctgttcagacaccaggaccccggcgaccccggccccggcatcagaaccgaggccggcgccgtgggcgaggccggcggcgccgaggaccccggcgccgccgccggcggcagcgtgagaggcagcggcgccgtggccgagggcaacagaaccgaggccggcagccaggactacagcctgctgcaggcctactacagccaggagagcaaggtgctgtacctgctgctgaccagcatctgcgacaacagccagctgctgagagcctgcagagccctgcagagcggcgaggccggcggcggcctgagcctgccccacgccgaggcccacgagttctggaagcaccaggagaagctgcagtgcctgagcctgctgtacctgttcagcgtgtgccacatcctgctgctggtgcaccccacctgcagcttcgacatcacctacgacagagtgttcagagccctggacggcctgagacagaaggtgctgcccctgctgaagaccgccatcaaggactgccccgtgggcaaggactggaagctgaactgcagaccctgcccccccagactgctgttcctgttccagctgaacggcgccctgaaggtggagccccccagaaaccaggaccccgcccaccccgacaagcccaagaagcacagccccaagagaagactgcagcacgccctggaggaccagatctacagaatcttcagaaagagcagagtgctgaccaaccagagcatcaactgcctgttcaccgtgcccgccaaccaggccttcgtgtacatcgtgcccggcagccaggaggaggaccccgtgggcatgctgctggaccagctgagaagccactgcaccgtgaaggaccccgagagcctgctggtgcccgcccccctgagcggccccagaagataccaggtgatgagacagcacagcagacagcagctgagcttccacatcgacagcagcagcagcagcagcagcggccagctggtggacttcaccctgagagagttcctgtggcagcacgtggagctggtgctgagcaagaagggcttcgacgacagcgtgggcagaaacccccagcccagccacttcgagctgcccacctaccagaagtggatcagcgccgccagcaagctgtacgaggtggccatcgacggcaaggaggaggacctgggcagccccaccggcgagctgaccagcaagatcctgagcagcatcaaggtgctggagggcttcctggacatcgacaccaagttcagcgagaacagatgccagaaggccctgcccatggcccacagcgcctaccagagcaacctgccccacaactacaccatgaccgtgcacaagaaccagctggcccaggccctgagagtgtacagccagcacgccagaggccccgccttccacaagtacgccatgcagctgcacgaggactgctacaagttctggagcaacggccaccagctgtgcgaggagagaagcctgaccgaccagcactgcgtgcacaagttccacagcctgcccaagagcggcgagaagcccgaggccgacagaaacccccccgtgctgtaccacaacagcagagccagaagcaccggcgcctgcaactgcggcagaaagcaggcccccagagacgaccccttcgacatcaaggccgccaactacgacttctaccagctgctggaggagaagtgctgcggcaagctggaccacatcaacttccccgtgttcgagcccagcacccccgaccccgcccccgccaagaacgagagcagccccgccccccccgacagcgacgccgacaagctgaaggagaaggagccccagacccagggcgagagcaccagcctgagcctggccctgagcctgggccagagcaccgacagcctgggcacctaccccgccgacccccaggccggcggcgacaaccccgaggtgcacggccaggtggaggtgaagaccgagaagagacccaacttcgtggacagacaggccagcaccgtggagtacctgcccggcatgctgcacagcaactgccccaagggcctgctgcccaagttcagcagctggagcctggtgaagctgggccccgccaagagctacaacttccacaccggcctggaccagcagggcttcatccccggcaccaactacctgatgccctgggacatcgtgatcagaaccagagccgaggacgagggcgacctggacaccaacagctggcccgcccccaacaaggccatccccggcaagagaagcgccgtggtgatgggcagaggcagaagaagagacgacatcgccagagccttcgtgggcttcgagtacgaggacagcagaggcagaagattcatgtgcagcggccccgacaaggtgatgaaggtgatgggcagcggccccaaggagagcgccctgaaggccctgaacagcgacatgcccctgtacatcctgagcagcagccagggcagaggcctgaagccccactacgcccagctgatgagactgttcgtggtggtgcccgacgcccccctgcagatcatcctgatgccccaggtgcagcccggcccccccccctgccccgtgttctaccccgagaagcaggagatcaccctgccccccgacggcctgtgggtgctgagattcccctacgcctacgtgaccgagagaggcccctgcttcccccccaaggagaacgtgcagctgatgagctacaaggtgctgagaggcgtgctgaaggccgtgacccagtag

SEQ ID NO: 99235 - DNA, 2925 bp, synthetic construct
  misc_feature 1..2925: note = Description of Artificial Sequence: Synthetic coding sequence
  source 1..2925: mol_type = other DNA
atggccggccccgtgagcctgagagacctgctgatgggcgccagcgcctggatgggcagcgagagccccggcggcagccccaccgagggcggcggcagcgccgccggcggccccgagcccccctggagagaggacgagatctgcgtggtgggcatcttcggcaagaccgccctgagactgaacagcgagaagttcagcctggtgaacaccgtgtgcgacagacaggtgttccccctgttcagacaccaggaccccggcgaccccggccccggcatcagaaccgaggccggcgccgtgggcgaggccggcggcgccgaggaccccggcgccgccgccggcggcagcgtgagaggcagcggcgccgtggccgagggcaacagaaccgaggccggcagccaggactacagcctgctgcaggcctactacagccaggagagcaaggtgctgtacctgctgctgaccagcatctgcgacaacagccagctgctgagagcctgcagagccctgcagagcggcgaggccggcggcggcctgagcctgccccacgccgaggcccacgagttctggaagcaccaggagaagctgcagtgcctgagcctgctgtacctgttcagcgtgtgccacatcctgctgctggtgcaccccacctgcagcttcgacatcacctacgacagagtgttcagagccctggacggcctgagacagaaggtgctgcccctgctgaagaccgccatcaaggactgccccgtgggcaaggactggaagctgaactgcagaccctgcccccccagactgctgttcctgttccagctgaacggcgccctgaaggtggagccccccagaaaccaggaccccgcccaccccgacaagcccaagaagcacagccccaagagaagactgcagcacgccctggaggaccagatctacagaatcttcagaaagagcagagtgctgaccaaccagagcatcaactgcctgttcaccgtgcccgccaaccaggccttcgtgtacatcgtgcccggcagccaggaggaggaccccgtgggcatgctgctggaccagctgagaagccactgcaccgtgaaggaccccgagagcctgctggtgcccgcccccctgagcggccccagaagataccaggtgatgagacagcacagcagacagcagctgagcttccacatcgacagcagcagcagcagcagcagcggccagctggtggacttcaccctgagagagttcctgtggcagcacgtggagctggtgctgagcaagaagggcttcgacgacagcgtgggcagaaacccccagcccagccacttcgagctgcccacctaccagaagtggatcagcgccgccagcaagctgtacgaggtggccatcgacggcaaggaggaggacctgggcagccccaccggcgagctgaccagcaagatcctgagcagcatcaaggtgctggagggcttcctggacatcgacaccaagttcagcgagaacagatgccagaaggccctgcccatggcccacagcgcctaccagagcaacctgccccacaactacaccatgaccgtgcacaagaaccagctggcccaggccctgagagtgtacagccagcacgccagaggccccgccttccacaagtacgccatgcagctgcacgaggactgctacaagttctggagcaacggccaccagctgtgcgaggagagaagcctgaccgaccagcactgcgtgcacaagttccacagcctgcccaagagcggcgagaagcccgaggccgacagaaacccccccgtgctgtaccacaacagcagagccagaagcaccggcgcctgcaactgcggcagaaagcaggcccccagagacgaccccttcgacatcaaggccgccaactacgacttctaccagctgctggaggagaagtgctgcggcaagctggaccacatcaacttccccgtgttcgagcccagcacccccgaccccgcccccgccaagaacgagagcagccccgccccccccgacagcgacgccgacaagctgaaggagaaggagccccagacccagggcgagagcaccagcctgagcctggccctgagcctgggccagagcaccgacagcctgggcacctaccccgccgacccccaggccggcggcgacaaccccgaggtgcacggccaggtggaggtgaagaccgagaagagacccaacttcgtggacagacaggccagcaccgtggagtacctgcccggcatgctgcacagcaactgccccaagggcctgctgcccaagttcagcagctggagcctggtgaagctgggccccgccaagagctacaacttccacaccggcctggaccagcagggcttcatccccggcaccaactacctgatgccctgggacatcgtgatcagaaccagagccgaggacgagggcgacctggacaccaacagctggcccgcccccaacaaggccatccccggcaagagaagcgccgtggtgatgggcagaggcagaagaagagacgacatcgccagagccttcgtgggcttcgagtacgaggacagcagaggcagaagattcatgtgcagcggccccgacaaggtgatgaaggtgatgggcagcggccccaaggagagcgccctgaaggccctgaacagcgacatgcccctgtacatcctgagcagcagccagggcagaggcctgaagccccactacgcccagctgatgagactgttcgtggtggtgcccgacgcccccctgcagatcatcctgatgccccaggtgcagcccggcccccccccctgccccgtgttctaccccgagaagcaggagatcaccctgccccccgacggcctgtgggtgctgagattcccctacgcctacctgagagaggacctggtgagccccctgagaaagatgtgcagctag

SEQ ID NO: 99236 - DNA, 1563 bp, synthetic construct
  misc_feature 1..1563: note = Description of Artificial Sequence: Synthetic coding sequence
  source 1..1563: mol_type = other DNA
atgagcgagagcggccacagccagcccggcctgtacggcatcgagagaagaagaagatggaaggagcccggcagcggcggcccccagaacctgagcggccccggcggcagagagagagactacatcgccccctgggagagagagagaagagacgccagcgaggagaccagcaccagcgtgatgcagaagacccccatcatcctgagcaagccccccgccgagagaagcaagcagccccccccccccaccgcccccgccgccccccccgcccccgcccccctggagaagcccatcgtgctgatgaagcccagagaggagggcaagggccccgtggccgtgaccggcgccagcacccccgagggcaccgccccccccccccccgccgcccccgccccccccaagggcgagaaggagggccagagacccacccagcccgtgtaccagatccagaacagaggcatgggcaccgccgcccccgccgccatggaccccgtggtgggccaggccaagctgctgccccccgagagaatgaagcacagcatcaagctggtggacgaccagatgaactggtgcgacagcgccatcgagtacctgctggaccagaccgacgtgctggtggtgggcgtgctgggcctgcagggcaccggcaagagcatggtgatgagcctgctgagcgccaacacccccgaggaggaccagagaacctacgtgttcagagcccagagcgccgagatgaaggagagaggcggcaaccagaccagcggcatcgacttcttcatcacccaggagagaatcgtgttcctggacacccagcccatcctgagccccagcatcctggaccacctgatcaacaacgacagaaagctgccccccgagtacaacctgccccacacctacgtggagatgcagagcctgcagatcgccgccttcctgttcaccgtgtgccacgtggtgatcgtggtgcaggactggttcaccgacctgagcctgtacagattcctgcagaccgccgagatggtgaagcccagcacccccagccccagccacgagagcagcagcagcagcggcagcgacgagggcaccgagtactacccccacctggtgttcctgcagaacaaggccagaagagaggacttctgccccagaaagctgagacagatgcacctgatgatcgaccagctgatggcccacagccacctgagatacaagggcaccctgagcatgctgcagtgcaacgtgttccccggcctgccccccgacttcctggacagcgaggtgaacctgttcctggtgcccttcatggacagcgaggccgagagcgagaacccccccagagccggccccggcagcagccccctgttcagcctgctgcccggctacagaggccaccccagcttccagagcctggtgagcaagctgagaagccaggtgatgagcatggccagaccccagctgagccacaccatcctgaccgagaagaactggttccactacgccgccagaatctgggacggcgtgagaaagagcagcgccctggccgagtacagcagactgctggcctag

SEQ ID NO: 99237 - DNA, 2742 bp, synthetic construct
  misc_feature 1..2742: note = Description of Artificial Sequence: Synthetic coding sequence
  source 1..2742: mol_type = other DNA
atggccgacgaggccctggccggcctggacgagggcgccctgagaaagctgctggaggtgaccgccgacctggccgagagaagaagaatcagaagcgccatcagagagctgcagagacaggagctggagagagaggaggaggccctggccagcaagagattcagagccgagagacaggacaacaaggagaactggctgcacagccagcagagagaggccgagcagagagccgccctggccagactggccggccagctggagagcatgaacgacgtggaggagctgaccgccctgctgagaagcgccggcgagtacgaggagagaaagctgatcagagccgccatcagaagagtgagagcccaggagatcgaggccgccaccctggccggcagactgtacagcggcagacccaacagcggcagcagagaggacagcaagggcctggccgcccacagactggagcagtgcgaggtgcccgagagagaggagcaggagcagcaggccgaggtgagcaagcccacccccacccccgagggcaccagccaggacgtgaccaccgtgaccctgctgctgagagccccccccggcagcaccagcagcagccccgccagccccagcagcagccccacccccgccagccccgagccccccctggagcccgccgaggcccagtgcctgaccgccgaggtgcccggcagccccgagcccccccccagcccccccaagaccaccagccccgagccccaggagagccccaccctgcccagcaccgagggccaggtggtgaacaagctgctgagcggccccaaggagacccccgccgcccagagccccaccagaggccccagcgacaccaagagagccgacgtggccggccccagaccctgccagagaagcctgagcgtgctgagccccagacagcccgcccagaacagagagagcacccccctggccagcggccccagcagcttccagagagccggcagcgtgagagacagagtgcacaagttcaccagcgacagccccatggccgccagactgcaggacggcaccccccaggccgccctgagccccctgcccagaaaggcccccggccccctgccccaccagcaccacccctgcctgctgctgcagagactgctgctgagcggccccgacaccagcagcagattcagcaaggagcagagaggcgtggcccagcccctggcccagctgagaagctgcccccaggaggagggccccagaggcagaggcctggccgccagacccctggagaacagagccggcggccccgtggccagaagcgaggagcccggcgcccccctgcccgtggccgtgggcaccgccgagcccggcggcagcatgaagaccaccttcaccatcgagatcaaggacggcagaggccaggccagcaccggcagagtgctgctgcccaccggcaaccagagagccgagctgaccctgggcctgagagccccccccaccctgctgagcaccagcagcggcggcaagagcaccatcaccagagtgaacagccccggcaccctggccagactgggcagcgtgacccacgtgaccagcttcagccacgccccccccagcagcagaggcggctgcagcatcaagatggaggccgagcccgccgagcccctggccgccgccgtggaggccgccaacggcgccgagcagaccagagtgaacaaggcccccgagggcagaagccccctgagcgccgaggagctgatgaccatcgaggacgagggcgtgctggacaagatgctggaccagagcaccgacttcgaggagagaaagctgatcagagccgccctgagagagctgagacagagaaagagagaccagagagacaaggagagagagagaagactgcaggaggccagaggcagacccggcgagggcagaggcaacaccgccaccgagaccaccaccagacacagccagagagccgccgacggcagcgccgtgagcaccgtgaccaagaccgagagactggtgcacagcaacgacggcaccagaaccgccagaaccaccaccgtggagagcagcttcgtgagaagaagcgagaacggcagcggcagcaccatgatgcagaccaagaccttcagcagcagcagcagcagcaagaagatgggcagcatcttcgacagagaggaccaggccagccccagagccggcagcctggccgccctggagaagagacaggccgagaagaagaaggagctgatgaaggcccagagcctgcccaagaccagcgccagccaggccagaaaggccatgatcgagaagctggagaaggagggcgccgccggcagccccggcggccccagagccgccgtgcagagaagcaccagcttcggcgtgcccaacgccaacagcatcaagcagatgctgctggactggtgcagagccaagaccagaggctacgagcacgtggacatccagaacttcagcagcagctggagcgacggcatggccttctgcgccctggtgcacaacttcttccccgaggccttcgactacggccagctgagcccccagaacagaagacagaacttcgaggtggccttcagcagcgccgagacccacgccgactgcccccagctgctggacaccgaggacatggtgagactgagagagcccgactggaagtgcgtgtacacctacatccaggagttctacagatgcctggtgcagaagggcctggtgaagaccaagaagagctag

SEQ ID NO: 99238 - DNA, 2748 bp, synthetic construct
  misc_feature 1..2748: note = Description of Artificial Sequence: Synthetic coding sequence
  source 1..2748: mol_type = other DNA
atggccgacgaggccctggccggcctggacgagggcgccctgagaaagctgctggaggtgaccgccgacctggccgagagaagaagaatcagaagcgccatcagagagctgcagagacaggagctggagagagaggaggaggccctggccagcaagagattcagagccgagagacaggacaacaaggagaactggctgcacagccagcagagagaggccgagcagagagccgccctggccagactggccggccagctggagagcatgaacgacgtggaggagctgaccgccctgctgagaagcgccggcgagtacgaggagagaaagctgatcagagccgccatcagaagagtgagagcccaggagatcgaggccgccaccctggccggcagactgtacagcggcagacccaacagcggcagcagagaggacagcaagggcctggccgcccacagactggagcagtgcgaggtgcccgagagagaggagcaggagcagcaggccgaggtgagcaagcccacccccacccccgagggcaccagccaggacgtgaccaccgtgaccctgctgctgagagccccccccggcagcaccagcagcagccccgccagccccagcagcagccccacccccgccagccccgagccccccctggagcccgccgaggcccagtgcctgaccgccgaggtgcccggcagccccgagcccccccccagcccccccaagaccaccagccccgagccccaggagagccccaccctgcccagcaccgagggccaggtggtgaacaagctgctgagcggccccaaggagacccccgccgcccagagccccaccagaggccccagcgacaccaagagagccgacgtggccggccccagaccctgccagagaagcctgagcgtgctgagccccagacagcccgcccagaacagagagagcacccccctggccagcggccccagcagcttccagagagccggcagcgtgagagacagagtgcacaagttcaccagcgacagccccatggccgccagactgcaggacggcaccccccaggccgccctgagccccctgacccccgccagactgctgggccccagcctgaccagcaccacccccgccagcagcagcagcggcagcagcagcagaggccccagcgacaccagcagcagattcagcaaggagcagagaggcgtggcccagcccctggcccagctgagaagctgcccccaggaggagggccccagaggcagaggcctggccgccagacccctggagaacagagccggcggccccgtggccagaagcgaggagcccggcgcccccctgcccgtggccgtgggcaccgccgagcccggcggcagcatgaagaccaccttcaccatcgagatcaaggacggcagaggccaggccagcaccggcagagtgctgctgcccaccggcaaccagagagccgagctgaccctgggcctgagagccccccccaccctgctgagcaccagcagcggcggcaagagcaccatcaccagagtgaacagccccggcaccctggccagactgggcagcgtgacccacgtgaccagcttcagccacgccccccccagcagcagaggcggctgcagcatcaagatggaggccgagcccgccgagcccctggccgccgccgtggaggccgccaacggcgccgagcagaccagagtgaacaaggcccccgagggcagaagccccctgagcgccgaggagctgatgaccatcgaggacgagggcgtgctggacaagatgctggaccagagcaccgacttcgaggagagaaagctgatcagagccgccctgagagagctgagacagagaaagagagaccagagagacaaggagagagagagaagactgcaggaggccagaggcagacccggcgagggcagaggcaacaccgccaccgagaccaccaccagacacagccagagagccgccgacggcagcgccgtgagcaccgtgaccaagaccgagagactggtgcacagcaacgacggcaccagaaccgccagaaccaccaccgtggagagcagcttcgtgagaagaagcgagaacggcagcggcagcaccatgatgcagaccaagaccttcagcagcagcagcagcagcaagaagatgggcagcatcttcgacagagaggaccaggccagccccagagccggcagcctggccgccctggagaagagacaggccgagaagaagaaggagctgatgaaggcccagagcctgcccaagaccagcgccagccaggccagaaaggccatgatcgagaagctggagaaggagggcgccgccggcagccccggcggccccagagccgccgtgcagagaagcaccagcttcggcgtgcccaacgccaacagcatcaagcagatgctgctggactggtgcagagccaagaccagaggctacgagcacgtggacatccagaacttcagcagcagctggagcgacggcatggccttctgcgccctggtgcacaacttcttccccgaggccttcgactacggccagctgagcccccagaacagaagacagaacttcgaggtggccttcagcagcgccgagacccacgccgactgcccccagctgctggacaccgaggacatggtgagactgagagagcccgactggaagtgcgtgtacacctacatccaggagttctacagatgcctggtgcagaagggcctggtgaagaccaagaagagctag

SEQ ID NO: 99239 - DNA, 2754 bp, synthetic construct
  misc_feature 1..2754: note = Description of Artificial Sequence: Synthetic coding sequence
  source 1..2754: mol_type = other DNA
atggccgacgaggccctggccggcctggacgagggcgccctgagaaagctgctggaggtgaccgccgacctggccgagagaagaagaatcagaagcgccatcagagagctgcagagacaggagctggagagagaggaggaggccctggccagcaagagattcagagccgagagacaggacaacaaggagaactggctgcacagccagcagagagaggccgagcagagagccgccctggccagactggccggccagctggagagcatgaacgacgtggaggagctgaccgccctgctgagaagcgccggcgagtacgaggagagaaagctgatcagagccgccatcagaagagtgagagcccaggagatcgaggccgccaccctggccggcagactgtacagcggcagacccaacagcggcagcagagaggacagcaagggcctggccgcccacagactggagcagtgcgaggtgcccgagagagaggagcaggagcagcaggccgaggtgagcaagcccacccccacccccgagggcaccagccaggacgtgaccaccgtgaccctgctgctgagagccccccccggcagcaccagcagcagccccgccagccccagcagcagccccacccccgccagccccgagccccccctggagcccgccgaggcccagtgcctgaccgccgaggtgcccggcagccccgagcccccccccagcccccccaagaccaccagccccgagccccaggagagccccaccctgcccagcaccgagggccaggtggtgaacaagctgctgagcggccccaaggagacccccgccgcccagagccccaccagaggccccagcgacaccaagagagccgacgtggccggccccagaccctgccagagaagcctgagcgtgctgagccccagacagcccgcccagaacagagagagcacccccctggccagcggccccagcagcttccagagagccggcagcgtgagagacagagtgcacaagttcaccagcgacagccccatggccgccagactgcaggacggcaccccccaggccgccctgagccccctgacccccgccagactgctgggccccagcctgaccagcaccacccccgccagcagcagcagcggcagcagcagcagaggccccagcgacaccagcagcagattcagcaaggagcagagaggcgtggcccagcccctggcccagctgagaagctgcccccaggaggagggccccagaggcagaggcctggccgccagacccctggagaacagagccggcggccccgtggccagaagcgaggagcccggcgcccccctgcccgtggccgtgggcaccgccgagcccggcggcagcatgaagaccaccttcaccatcgagatcaaggacggcagaggccaggccagcaccggcagagtgctgctgcccaccggcaaccagagagccgagctgaccctgggcctgagagccccccccaccctgctgagcaccagcagcggcggcaagagcaccatcaccagagtgaacagccccggcaccctggccagactgggcagcgtgacccacgtgaccagcttcagccacgccccccccagcagcagaggcggctgcagcatcaagatggaggccgagcccgccgagcccctggccgccgccgtggaggccgccaacggcgccgagcagaccagagtgaacaaggcccccgagggcagaagccccctgagcgccgaggagctgatgaccatcgaggacgagggcgtgctggacaagatgctggaccagagcaccgacttcgaggagagaaagctgatcagagccgccctgagagagctgagacagagaaagagagaccagagagacaaggagagagagagaagactgcaggaggccagaggcagacccggcgagggcagaggcaacaccgccaccgagaccaccaccagacacagccagagagccgccgacggcagcgccgtgagcaccgtgaccaagaccgagagactggtgcacagcaacgacggcaccagaaccgccagaaccaccaccgtggagagcagcttcgtgagaagaagcgagaacggcagcggcagcaccatgatgcagaccaagaccttcagcagcagcagcagcagcaagaagatgggcagcatcttcgacagagaggaccaggccagccccagagccggcagcctggccgccctggagaagagacaggccgagaagaagaaggagctgatgaaggcccagagcctgcccaagaccagcgccagccaggccagaaaggccatgatcgagaagctggagaaggagggcgccgccggcagccccggcggccccagagccgccgtgcagagaagcaccagcttcggcgtgcccaacgccaacagcatcaagcagatgctgctggactggtgcagagccaagaccagaggctacgagcacgtggacatccagaacttcagcagcagctggagcgacggcatggccttctgcgccctggtgcacaacttcttccccgaggccttcgactacggccagctgagcccccagaacagaagacagaacttcgaggtggccttcagcagcgccgagatgctggtggactgcgtgcccctggtggaggtggacgacatgatgatcatgggcaagaagcccgaccccaagtgcgtgttcacctacgtgcagagcctgtacaaccacctgagaagacacgagctgagactgagaggcaagaacgtgtag

SEQ ID NO: 99240 - DNA, 888 bp, synthetic construct
  misc_feature 1..888: note = Description of Artificial Sequence: Synthetic coding sequence
  source 1..888: mol_type = other DNA
atggaggccgagcccgccgagcccctggccgccgccgtggaggccgccaacggcgccgagcagaccagagtgaacaaggcccccgagggcagaagccccctgagcgccgaggagctgatgaccatcgaggacgagggcgtgctggacaagatgctggaccagagcaccgacttcgaggagagaaagctgatcagagccgccctgagagagctgagacagagaaagagagacggcagcggcagcaccatgatgcagaccaagaccttcagcagcagcagcagcagcaagaagatgggcagcatcttcgacagagaggaccaggccagccccagagccggcagcctggccgccctggagaagagacaggccgagaagaagaaggagctgatgaaggcccagagcctgcccaagaccagcgccagccaggccagaaaggccatgatcgagaagctggagaaggagggcgccgccggcagccccggcggccccagagccgccgtgcagagaagcaccagcttcggcgtgcccaacgccaacagcatcaagcagatgctgctggactggtgcagagccaagaccagaggctacgagcacgtggacatccagaacttcagcagcagctggagcgacggcatggccttctgcgccctggtgcacaacttcttccccgaggccttcgactacggccagctgagcccccagaacagaagacagaacttcgaggtggccttcagcagcgccgagacccacgccgactgcccccagctgctggacaccgaggacatggtgagactgagagagcccgactggaagtgcgtgtacacctacatccaggagttctacagatgcctggtgcagaagggcctggtgaagaccaagaagagctag

SEQ ID NO: 99241 - DNA, 2817 bp, synthetic construct
  misc_feature 1..2817: note = Description of Artificial Sequence: Synthetic coding sequence
  source 1..2817: mol_type = other DNA
atgacctgcctgagccaccccctgcagctggaggtgaccgccgacctggccgagagaagaagaatcagaagcgccatcagagagctgcagagacaggagctggagagagaggaggaggccctggccagcaagagattcagagccgagagacaggacaacaaggagaactggctgcacagccagcagagagaggccgagcagagagccgccctggccagactggccggccagctggagagcatgaacgacgtggaggagctgaccgccctgctgagaagcgccggcgagtacgaggagagaaagctgatcagagccgccatcagaagagtgagagcccaggagatcgaggccgccaccctggccggcagactgtacagcggcagacccaacagcggcagcagagaggacagcaagggcctggccgcccacagactggagcagtgcgaggtgcccgagagagaggagcaggagcagcaggccgaggtgagcaagcccacccccacccccgagggcaccagccaggacgtgaccaccgtgaccctgctgctgagagccccccccggcagcaccagcagcagccccgccagccccagcagcagccccacccccgccagccccgagccccccctggagcccgccgaggcccagtgcctgaccgccgaggtgcccggcagccccgagcccccccccagcccccccaagaccaccagccccgagccccaggagagccccaccctgcccagcaccgagggccaggtggtgaacaagctgctgagcggccccaaggagacccccgccgcccagagccccaccagaggccccagcgacaccaagagagccgacgtggccggccccagaccctgccagagaagcctgagcgtgctgagccccagacagcccgcccagaacagagagagcacccccctggccagcggccccagcagcttccagagagccggcagcgtgagagacagagtgcacaagttcaccagcgacagccccatggccgccagactgcaggacggcaccccccaggccgccctgagccccctgacccccgccagactgctgggccccagcctgaccagcaccacccccgccagcagcagcagcggcagcagcagcagaggccccagcgacaccagcagcagattcagcaaggagcagagaggcgtggcccagcccctggcccagctgagaagctgcccccaggaggagggccccagaggcagaggcctggccgccagacccctggagaacagagccggcggccccgtggccagaagcgaggagcccggcgcccccctgcccgtggccgtgggcaccgccgagcccggcggcagcatgaagaccaccttcaccatcgagatcaaggacggcagaggccaggccagcaccggcagagtgctgctgcccaccggcaaccagagagccgagctgaccctgggcctgagagccccccccaccctgctgagcaccagcagcggcggcaagagcaccatcaccagagtgaacagccccggcaccctggccagactgggcagcgtgacccacgtgaccagcttcagccacgccccccccagcagcagaggcggctgcagcatcaaggccgccgaggacgccggcacccccgtggcccacccccccgccttcagcaccagaagaagaagcagcaccggcaccaccagaagcaccagcctgatggaggccgagcccgccgagcccctggccgccgccgtggaggccgccaacggcgccgagcagaccagagtgaacaaggcccccgagggcagaagccccctgagcgccgaggagctgatgaccatcgaggacgagggcgtgctggacaagatgctggaccagagcaccgacttcgaggagagaaagctgatcagagccgccctgagagagctgagacagagaaagagagaccagagagacaaggagagagagagaagactgcaggaggccagaggcagacccggcgagggcagaggcaacaccgccaccgagaccaccaccagacacagccagagagccgccgacggcagcgccgtgagcaccgtgaccaagaccgagagactggtgcacagcaacgacggcaccagaaccgccagaaccaccaccgtggagagcagcttcgtgagaagaagcgagaacggcagcggcagcaccatgatgcagaccaagaccttcagcagcagcagcagcagcaagaagatgggcagcatcttcgacagagaggaccaggccagccccagagccggcagcctggccgccctggagaagagacaggccgagaagaagaaggagctgatgaaggcccagagcctgcccaagaccagcgccagccaggccagaaaggccatgatcgagaagctggagaaggagggcgccgccggcagccccggcggccccagagccgccgtgcagagaagcaccagcttcggcgtgcccaacgccaacagcatcaagcagatgctgctggactggtgcagagccaagaccagaggctacgagcacgtggacatccagaacttcagcagcagctggagcgacggcatggccttctgcgccctggtgcacaacttcttccccgaggccttcgactacggccagctgagcccccagaacagaagacagaacttcgaggtggccttcagcagcgccgagacccacgccgactgcccccagctgctggacaccgaggacatggtgagactgagagagcccgactggaagtgcgtgtacacctacatccaggagttctacagatgcctggtgcagaagggcctggtgaagaccaagaagagctag

SEQ ID NO: 99242 - DNA, 114 bp, synthetic construct
  misc_feature 1..114: note = Description of Artificial Sequence: Synthetic coding sequence
  source 1..114: mol_type = other DNA
atggccgacgaggccctggccggcctggacgagggcgccctgagaaagctgctggaggtgaccgccgacctggccgagagaagaagaatcagaagcgccatcagagagctgtag

SEQ ID NO: 99243 - DNA, 2823 bp, synthetic construct
  misc_feature 1..2823: note = Description of Artificial Sequence: Synthetic coding sequence
  source 1..2823: mol_type = other DNA
atggccgacgaggccctggccggcctggacgagggcgccctgagaaagctgctggaggtgaccgccgacctggccgagagaagaagaatcagaagcgccatcagagagctgcagagacaggagctggagagagaggaggaggccctggccagcaagagattcagagccgagagacaggacaacaaggagaactggctgcacagccagcagagagaggccgagcagagagccgccctggccagactggccggccagctggagagcatgaacgacgtggaggagctgaccgccctgctgagaagcgccggcgagtacgaggagagaaagctgatcagagccgccatcagaagagtgagagcccaggagatcgaggccgccaccctggccggcagactgtacagcggcagacccaacagcggcagcagagaggacagcaagggcctggccgcccacagactggagcagtgcgaggtgcccgagagagaggagcaggagcagcaggccgaggtgagcaagcccacccccacccccgagggcaccagccaggacgtgaccaccgtgaccctgctgctgagagccccccccggcagcaccagcagcagccccgccagccccagcagcagccccacccccgccagccccgagccccccctggagcccgccgaggcccagtgcctgaccgccgaggtgcccggcagccccgagcccccccccagcccccccaagaccaccagccccgagccccaggagagccccaccctgcccagcaccgagggccaggtggtgaacaagctgctgagcggccccaaggagacccccgccgcccagagccccaccagaggccccagcgacaccaagagagccgacgtggccggccccagaccctgccagagaagcctgagcgtgctgagccccagacagcccgcccagaacagagagagcacccccctggccagcggccccagcagcttccagagagccggcagcgtgagagacagagtgcacaagttcaccagcgacagccccatggccgccagactgcaggacggcaccccccaggccgccctgagccccctgacccccgccagactgctgggccccagcctgaccagcaccacccccgccagcagcagcagcggcagcagcagcagaggccccagcgacaccagcagcagattcagcaaggagcagagaggcgtggcccagcccctggcccagctgagaagctgcccccaggaggagggccccagaggcagaggcctggccgccagacccctggagaacagagccggcggccccgtggccagaagcgaggagcccggcgcccccctgcccgtggccgtgggcaccgccgagcccggcggcagcatgaagaccaccttcaccatcgagatcaaggacggcagaggccaggccagcaccggcagagtgctgctgcccaccggcaaccagagagccgagctgaccctgggcctgagagccccccccaccctgctgagcaccagcagcggcggcaagagcaccatcaccagagtgaacagccccggcaccctggccagactgggcagcgtgacccacgtgaccagcttcagccacgccccccccagcagcagaggcggctgcagcatcaagatggaggccgagcccgccgagcccctggccgccgccgtggaggccgccaacggcgccgagcagaccagagtgaacaaggcccccgagggcagaagccccctgagcgccgaggagctgatgaccatcgaggacgagggcgtgctggacaagatgctggaccagagcaccgacttcgaggagagaaagctgatcagagccgccctgagagagctgagacagagaaagagagaccagagagacaaggagagagagagaagactgcaggaggccagaggcagacccggcgagggcagaggcaacaccgccaccgagaccaccaccagacacagccagagagccgccgacggcagcgccgtgagcaccgtgaccaagaccgagagactggtgcacagcaacgacggcaccagaaccgccagaaccaccaccgtggagagcagcttcgtgagaagaagcgagaacggcagcggcagcaccatgatgcagaccaagaccttcagcagcagcagcagcagcaagaagatgggcagcatcttcgacagagaggaccaggccagccccagagccggcagcctggccgccctggagaagagacaggccgagaagaagaaggagctgatgaaggcccagagcctgcccaagaccagcgccagccaggccagaaaggccatgatcgagaagctggagaaggagggcgccgccggcagccccggcggccccagagccgccgtgcagagaagcaccagcttcggcgtgcccaacgccaacagcatcaagcagatgctgctggactggtgcagagccaagaccagaggctacgagcacgtggacatccagaacttcagcagcagctggagcgacggcatggccttctgcgccctggtgcacaacttcttccccgaggccttcgactacggccagctgagcccccagaacagaagacagaacttcgaggtggccttcagcagcgccgagacccacgccgactgcccccagctgctggacaccgaggacatggtgagactgagagagcccgactggaagatgctggtggactgcgtgcccctggtggaggtggacgacatgatgatcatgggcaagaagcccgaccccaagtgcgtgttcacctacgtgcagagcctgtacaaccacctgagaagacacgagctgagactgagaggcaagaacgtgtag

SEQ ID NO: 99244 - DNA, 1374 bp, synthetic construct
  misc_feature 1..1374: note = Description of Artificial Sequence: Synthetic coding sequence
  source 1..1374: mol_type = other DNA
atggagcagaaggagggcaagctgagcgaggacggcaccaccgtgagccccgccgccgacaaccccgagatgagcggcggcggcgcccccgccgaggagaccaagggcaccgccggcaaggccatcaacgagggcccccccaccgagagcggcaagcaggagaaggcccccgccgaggacggcatgagcgccgagctgcagggcgaggccaacggcctggacgaggtgaaggtggagagccagagagaggccggcggcaaggaggacgccgaggccgagctgaagaaggaggacggcgagaaggaggagaccaccgtgggcagccaggagatgaccggcagaaaggaggagaccaagagcgagcccaaggaggccgaggagaaggagagcaccctggccagcgagaagcagaaggccgaggagaaggaggccaagcccgagagcggccagaaggccgacgccaacgacagagacaagcccgagcccaaggccaccgtggaggaggaggacgccaagaccgccagccaggaggagaccgtggtggaggacgaggccaaggccgagcccaaggagcccgacggcaaggaggaggccaagcacggcgccaaggaggaggccgacgagcccggcagccccagcgaggagcaggagcaggacgtggagaaggagcccgagggcggcgccggcgtgatccccagcagccccgaggagtggcccgagagccccaccggcgagggccacaacctgagcaccgacggcctgggccccgactgcgtggccagcggccagaccagccccagcgccagcgagagcagccccagcgacgtgccccagagcccccccgagagccccagcagcggcgagaagaaggagaaggcccccgagagaagagtgagcgcccccgccagacccagaggccccagagcccagaacagaaaggccatcgtggacaagttcggcggcgccgccagcggccccaccgccctgttcagaaacaccaaggccgccggcgccgccatcggcggcgtgaagaacatgctgctggagtggtgcagagccatgaccaagaagtacgagcacgtggacatccagaacttcagcagcagctggagcagcggcatggccttctgcgccctgatccacaagttcttccccgacgccttcgactacgccgagctggaccccgccaagagaagacacaacttcaccctggccttcagcaccgccgagaagctggccgactgcgcccagctgctggacgtggacgacatggtgagactggccgtgcccgacagcaagtgcgtgtacacctacatccaggagctgtacagaagcctggtgcagaagggcctggtgaagaccaagaagaagtag

SEQ ID NO: 99245 - DNA, 1539 bp, synthetic construct
  misc_feature 1..1539: note = Description of Artificial Sequence: Synthetic coding sequence
  source 1..1539: mol_type = other DNA
atgctgcccggcgccgtgggcgagagcgactgcagcgccgaggccagagagaagatggagcagaaggagggcaagctgagcgaggacggcaccaccgtgagccccgccgccgacaaccccgagatgagcggcggcggcgcccccgccgaggagaccaagggcaccgccggcaaggccatcaacgagggcccccccaccgagagcggcaagcaggagaaggcccccgccgaggacggcatgagcgccgagctgcagggcgaggccaacggcctggacgaggtgaaggtggagagccagagagaggccggcggcaaggaggacgccgaggccgagctgaagaaggaggacggcgagaaggaggagaccaccgtgggcagccaggagatgaccggcagaaaggaggagaccaagagcgagcccaaggaggccgaggagaaggagagcaccctggccagcgagaagcagaaggccgaggagaaggaggccaagcccgagagcggccagaaggccgacgccaacgacagagacaagcccgagcccaaggccaccgtggaggaggaggacgccaagaccgccagccaggaggagaccggccagagaaaggagtgcagcaccgagcccaaggagaaggccaccgacgaggaggccaaggccgagagccagaaggccgtggtggaggacgaggccaaggccgagcccaaggagcccgacggcaaggaggaggccaagcacggcgccaaggaggaggccgacgccaaggaggaggccgaggacgccgaggaggccgagcccggcagccccagcgaggagcaggagcaggacgtggagaaggagcccgagggcggcgccggcgtgatccccagcagccccgaggagtggcccgagagccccaccggcgagggccacaacctgagcaccgacggcctgggccccgactgcgtggccagcggccagaccagccccagcgccagcgagagcagccccagcgacgtgccccagagcccccccgagagccccagcagcggcgagaagaaggagaaggcccccgagagaagagtgagcgcccccgccagacccagaggccccagagcccagaacagaaaggccatcgtggacaagttcggcggcgccgccagcggccccaccgccctgttcagaaacaccaaggccgccggcgccgccatcggcggcgtgaagaacatgctgctggagtggtgcagagccatgaccaagaagtacgagcacgtggacatccagaacttcagcagcagctggagcagcggcatggccttctgcgccctgatccacaagttcttccccgacgccttcgactacgccgagctggaccccgccaagagaagacacaacttcaccctggccttcagcaccgccgagaagctggccgactgcgcccagctgctggacgtggacgacatggtgagactggccgtgcccgacagcaagtgcgtgtacacctacatccaggagctgtacagaagcctggtgcagaagggcctggtgaagaccaagaagaagtag

SEQ ID NO: 99246 - DNA, 1485 bp, synthetic construct
  misc_feature 1..1485: note = Description of Artificial Sequence: Synthetic coding sequence
  source 1..1485: mol_type = other DNA
atggagcagaaggagggcaagctgagcgaggacggcaccaccgtgagccccgccgccgacaaccccgagatgagcggcggcggcgcccccgccgaggagaccaagggcaccgccggcaaggccatcaacgagggcccccccaccgagagcggcaagcaggagaaggcccccgccgaggacggcatgagcgccgagctgcagggcgaggccaacggcctggacgaggtgaaggtggagagccagagagaggccggcggcaaggaggacgccgaggccgagctgaagaaggaggacggcgagaaggaggagaccaccgtgggcagccaggagatgaccggcagaaaggaggagaccaagagcgagcccaaggaggccgaggagaaggagagcaccctggccagcgagaagcagaaggccgaggagaaggaggccaagcccgagagcggccagaaggccgacgccaacgacagagacaagcccgagcccaaggccaccgtggaggaggaggacgccaagaccgccagccaggaggagaccggccagagaaaggagtgcagcaccgagcccaaggagaaggccaccgacgaggaggccaaggccgagagccagaaggccgtggtggaggacgaggccaaggccgagcccaaggagcccgacggcaaggaggaggccaagcacggcgccaaggaggaggccgacgccaaggaggaggccgaggacgccgaggaggccgagcccggcagccccagcgaggagcaggagcaggacgtggagaaggagcccgagggcggcgccggcgtgatccccagcagccccgaggagtggcccgagagccccaccggcgagggccacaacctgagcaccgacggcctgggccccgactgcgtggccagcggccagaccagccccagcgccagcgagagcagccccagcgacgtgccccagagcccccccgagagccccagcagcggcgagaagaaggagaaggcccccgagagaagagtgagcgcccccgccagacccagaggccccagagcccagaacagaaaggccatcgtggacaagttcggcggcgccgccagcggccccaccgccctgttcagaaacaccaaggccgccggcgccgccatcggcggcgtgaagaacatgctgctggagtggtgcagagccatgaccaagaagtacgagcacgtggacatccagaacttcagcagcagctggagcagcggcatggccttctgcgccctgatccacaagttcttccccgacgccttcgactacgccgagctggaccccgccaagagaagacacaacttcaccctggccttcagcaccgccgagaagctggccgactgcgcccagctgctggacgtggacgacatggtgagactggccgtgcccgacagcaagtgcgtgtacacctacatccaggagctgtacagaagcctggtgcagaagggcctggtgaagaccaagaagaagtag

SEQ ID NO: 99247 - DNA, 312 bp, synthetic construct
  misc_feature 1..312: note = Description of Artificial Sequence: Synthetic coding sequence
  source 1..312: mol_type = other DNA
atgagcgaggagaagcccaaggagggcgtgaagaccgagaacgaccacatcaacctgaaggtggccggccaggacggcagcgtggtgcagttcaagatcaagagacacacccccctgagcaagctgatgaaggcctactgcgagagacagggcctgagcatgagacagatcagattcagattcgacggccagcccatcaacgagaccgacacccccgcccagctggagatggaggacgaggacaccatcgacgtgttccagcagcagaccggcggcgtgcccgagagcagcctggccggccacagcttctag

SEQ ID NO: 99248 - DNA, 426 bp, synthetic construct
  misc_feature 1..426: note = Description of Artificial Sequence: Synthetic coding sequence
  source 1..426: mol_type = other DNA
atgagcgaggagaagcccaaggagggcgtgaagaccgagaacgaccacatcaacctgaaggtggccggccaggacggcagcgtggtgcagttcaagatcaagagacacacccccctgagcaagctgatgaaggcctactgcgagagacaggtgagacacctggcccccccccagagcctgcccgtgtgcgccctggtgctgtgcgtgcccggcatccccagagccagagccagcagaggctggacccagatgcagctgcccgagggcctgagcatgagacagatcagattcagattcgacggccagcccatcaacgagaccgacacccccgcccagctggagatggaggacgaggacaccatcgacgtgttccagcagcagaccggcggcgtgcccgagagcagcctggccggccacagcttctag

SEQ ID NO: 99249 - DNA, 288 bp, synthetic construct
  misc_feature 1..288: note = Description of Artificial Sequence: Synthetic coding sequence
  source 1..288: mol_type = other DNA
atggccaacgagaagcccaccgaggaggtgaagaccgagaacaacaaccacatcaacctgaaggtggccggccaggacggcagcgtggtgcagttcaagatcaagagacagacccccctgagcaagctgatgaaggcctactgcgagcccagaggcctgagcgtgaagcagatcagattcagattcggcggccagcccatcagcggcaccgacaagcccgcccagctggagatggaggacgaggacaccatcgacgtgttccagcagcccaccggcggcgtgtactag

SEQ ID NO: 99250 - DNA, 411 bp, synthetic construct
  misc_feature 1..411: note = Description of Artificial Sequence: Synthetic coding sequence
  source 1..411: mol_type = other DNA
atggccggcgccggcagcgccgccgtgagcggcgccggcacccccgtggccggccccaccggcagagacctgttcgccgagggcctgctggagttcctgagacccgccgtgcagcagctggacagccacgtgcacgccgtgagagagagccaggtggagctgagagagcagatcgacaacctggccaccgagctgtgcagaatcaacgaggaccagaaggtggccctggacctggacccctacgtgaagaagctgctgaacgccagaagaagagtggtgctggtgaacaacatcctgcagaacgcccaggagagactgagaagactgaaccacagcgtggccaaggagaccgccagaagaagagccatgctggacagcggcatctacccccccggcagccccggcaagtag

SEQ ID NO: 99251 - DNA, 2298 bp, synthetic construct
  misc_feature 1..2298: note = Description of Artificial Sequence: Synthetic coding sequence
  source 1..2298: mol_type = other DNA
atggccggcttcaagagaggctacgacggcaagatcgccggcctgtacgacctggacaagaccctgggcagaggccacttcgccgtggtgaagctggccagacacgtgttcaccggcgagaaggtggccgtgaaggtgatcgacaagaccaagctggacaccctggccaccggccacctgttccaggaggtgagatgcatgaagctggtgcagcaccccaacatcgtgagactgtacgaggtgatcgacacccagaccaagctgtacctgatcctggagctgggcgacggcggcgacatgttcgactacatcatgaagcacgaggagggcctgaacgaggacctggccaagaagtacttcgcccagatcgtgcacgccatcagctactgccacaagctgcacgtggtgcacagagacctgaagcccgagaacgtggtgttcttcgagaagcagggcctggtgaagctgaccgacttcggcttcagcaacaagttccagcccggcaagaagctgaccaccagctgcggcagcctggcctacagcgcccccgagatcctgctgggcgacgagtacgacgcccccgccgtggacatctggagcctgggcgtgatcctgttcatgctggtgtgcggccagccccccttccaggaggccaacgacagcgagaccctgaccatgatcatggactgcaagtacaccgtgcccagccacgtgagcaaggagtgcaaggacctgatcaccagaatgctgcagagagaccccaagagaagagccagcctggaggagatcgagaaccacccctggctgcagggcgtggaccccagccccgccaccaagtacaacatccccctggtgagctacaagaacctgagcgaggaggagcacaacagcatcatccagagaatggtgctgggcgacatcgccgacagagacgccatcgtggaggccctggagaccaacagatacaaccacatcaccgccacctacttcctgctggccgagagaatcctgagagagaagcaggagaaggagatccagaccagaagcgccagccccagcaacatcaaggcccagttcagacagagctggcccaccaagatcgacgtgccccaggacctggaggacgacctgaccgccacccccctgagccacgccaccgtgccccagagccccgccagagccgccgacagcgtgctgaacggccacagaagcaagggcctgtgcgacagcgccaagaaggacgacctgcccgagctggccggccccgccctgagcaccgtgccccccgccagcctgaagcccaccgccagcggcagaaagtgcctgttcagagtggaggaggacgaggaggaggacgaggaggacaagaagcccatgagcctgagcacccaggtggtgctgagaagaaagcccagcgtgaccaacagactgaccagcagaaagagcgcccccgtgctgaaccagatcttcgaggagggcgagagcgacgacgagttcgacatggacgagaacctgccccccaagctgagcagactgaagatgaacatcgccagccccggcaccgtgcacaagagataccacagaagaaagagccagggcagaggcagcagctgcagcagcagcgagaccagcgacgacgacagcgagagcagaagaagactggacaaggacagcggcttcacctacagctggcacagaagagacagcagcgagggcccccccggcagcgagggcgacggcggcggccagagcaagcccagcaacgccagcggcggcgtggacaaggccagccccagcgagaacaacgccggcggcggcagccccagcagcggcagcggcggcaaccccaccaacaccagcggcaccaccagaagatgcgccggccccagcaacagcatgcagctggccagcagaagcgccggcgagctggtggagagcctgaagctgatgagcctgtgcctgggcagccagctgcacggcagcaccaagtacatcatcgacccccagaacggcctgagcttcagcagcgtgaaggtgcaggagaagagcacctggaagatgtgcatcagcagcaccggcaacgccggccaggtgcccgccgtgggcggcatcaagttcttcagcgaccacatggccgacaccaccaccgagctggagagaatcaagagcaagaacctgaagaacaacgtgctgcagctgcccctgtgcgagaagaccatcagcgtgaacatccagagaaaccccaaggagggcctgctgtgcgccagcagccccgccagctgctgccacgtgatctag

SEQ ID NO: 99252 - DNA, 2298 bp, synthetic construct; identical to SEQ ID NO: 99251
  misc_feature 1..2298: note = Description of Artificial Sequence: Synthetic coding sequence
  source 1..2298: mol_type = other DNA

SEQ ID NO: 99253 - DNA, 2298 bp, synthetic construct; identical to SEQ ID NO: 99251
  misc_feature 1..2298: note = Description of Artificial Sequence: Synthetic coding sequence
  source 1..2298: mol_type = other DNA

SEQ ID NO: 99254 - DNA, 9693 bp, synthetic construct
  misc_feature 1..9693: note = Description of Artificial Sequence: Synthetic coding sequence
  source 1..9693: mol_type = other DNA
atgcagagcagccccagccccgcccacccccagctgcccgtgctgcagacccagatggtgagcgacggcatgaccggcagcaaccccgtgagccccgccagcagcagcagccccgccagcagcggcgccggcggcatcagcccccagcacatcgcccaggacagcagcctggacggcccccccggcccccccgacggcgccaccgtgcccctggagggcttcagcctgagccaggccgccgacctggccaacaagggccccaagtgggagaagagccacgccgagatcgccgagcaggccaagcacgaggccgagatcgagaccagaatcgccgagctgagaaaggagggcttctggagcctgaagagactgcccaaggtgcccgagccccccagacccaagggccactgggactacctgtgcgaggagatgcagtggctgagcgccgacttcgcccaggagagaagatggaagagaggcgtggccagaaaggtggtgagaatggtgatcagacaccacgaggagcagagacagaaggaggagagagccagaagagaggagcaggccaagctgagaagaatcgccagcaccatggccaaggacgtgagacagttctggagcaacgtggagaaggtggtgcagttcaagcagcagagcagactggaggagaagagaaagaaggccctggacctgcacctggacttcatcgtgggccagaccgagaagtacagcgacctgctgagccagagcctgaaccagcccctgaccagcagcaaggccggcagcagcccctgcctgggcagcagcagcgccgccagcagcccccccccccccgccagcagactggacgacgaggacggcgacttccagccccaggaggacgaggaggaggacgacgaggagaccatcgaggtggaggagcagcaggagggcaacgacgccgaggcccagagaagagagatcgagctgctgagaagagagggcgagctgcccctggaggagctgctgagaagcctgcccccccagctgctggagggccccagcagccccagccagacccccagcagccacgacagcgacaccagagacggccccgaggagggcgccgaggaggagcccccccaggtgctggagatcaagcccccccccagcgccgtgacccagagaaacaagcagccctggcaccccgacgaggacgacgaggagttcaccgccaacgaggaggaggccgaggacgaggaggacaccatcgccgccgaggagcagctggagggcgaggtggaccacgccatggagctgagcgagctggccagagagggcgagctgagcatggaggagctgctgcagcagtacgccggcgcctacgcccccggcagcggcagcagcgaggacgaggacgaggacgaggtggacgccaacagcagcgactgcgagcccgagggccccgtggaggccgaggagcccccccaggaggacagcagcagccagagcgacagcgtggaggacagaagcgaggacgaggaggacgagcacagcgaggaggaggagaccagcggcagcagcgccagcgaggagagcgagagcgaggagagcgaggacgcccagagccagagccaggccgacgaggaggaggaggacgacgacttcggcgtggagtacctgctggccagagacgaggagcagagcgaggccgacgccggcagcggcccccccacccccggccccaccaccctgggccccaagaaggagatcaccgacatcgccgccgccgccgagagcctgcagcccaagggctacaccctggccaccacccaggtgaagacccccatccccctgctgctgagaggccagctgagagagtaccagcacatcggcctggactggctggtgaccatgtacgagaagaagctgaacggcatcctggccgacgagatgggcctgggcaagaccatccagaccatcagcctgctggcccacctggcctgcgagaagggcaactggggcccccacctgatcatcgtgcccaccagcgtgatgctgaactgggagatggagctgaagagatggtgccccagcttcaagatcctgacctactacggcgcccagaaggagagaaagctgaagagacagggctggaccaagcccaacgccttccacgtgtgcatcaccagctacaagctggtgctgcaggaccaccaggccttcagaagaaagaactggagatacctgatcctggacgaggcccagaacatcaagaacttcaagagccagagatggcagagcctgctgaacttcaacagccagagaagactgctgctgaccggcacccccctgcagaacagcctgatggagctgtggagcctgatgcacttcctgatgccccacgtgttccagagccacagagagttcaaggagtggttcagcaaccccctgaccggcatgatcgagggcagccaggagtacaacgagggcctggtgaagagactgcacaaggtgctgagacccttcctgctgagaagagtgaaggtggacgtggagaagcagatgcccaagaagtacgagcacgtgatcagatgcagactgagcaagagacagagatgcctgtacgacgacttcatggcccagaccaccaccaaggagaccctggccaccggccacttcatgagcgtgatcaacatcctgatgcagctgagaaaggtgtgcaaccaccccaacctgttcgaccccagacccgtgaccagccccttcatcacccccggcatctgcttcagcaccgccagcctggtgctgagagccaccgacgtgcaccccctgcagagaatcgacatgggcagattcgacctgatcggcctggagggcagagtgagcagatacgaggccgacaccttcctgcccagacacagactgagcagaagagtgctgctggaggtggccaccgcccccgaccccccccccagacccaagcccgtgaagatgaaggtgaacagaatgctgcagcccgtgcccaagcaggagggcagaaccgtggtggtggtgaacaaccccagagcccccctgggccccgtgcccgtgagacccccccccggccccgagctgagcgcccagcccacccccggccccgtgccccaggtgctgcccgccagcctgatggtgagcgccagccccgccggcccccccctgatccccgccagcagaccccccggccccgtgctgctgccccccctgcagcccaacagcggcagcctgccccaggtgctgcccagccccctgggcgtgctgagcggcaccagcagaccccccacccccaccctgagcctgaagcccaccccccccgcccccgtgagactgagccccgcccccccccccggcagcagcagcctgctgaagcccctgaccgtgccccccggctacaccttcccccccgccgccgccaccaccaccagcaccaccaccgccaccgccaccaccaccgccgtgcccgcccccacccccgccccccagagactgatcctgagccccgacatgcaggccagactgcccagcggcgaggtggtgagcatcggccagctggccagcctggcccagagacccgtggccaacgccggcggcagcaagcccctgaccttccagatccagggcaacaagctgaccctgaccggcgcccaggtgagacagctggccgtgggccagcccagacccctgcagagaaacgtggtgcacctggtgagcgccggcggccagcaccacctgatcagccagcccgcccacgtggccctgatccaggccgtggcccccacccccggccccacccccgtgagcgtgctgcccagcagcacccccagcaccacccccgcccccaccggcctgagcctgcccctggccgccaaccaggtgccccccaccatggtgaacaacaccggcgtggtgaagatcgtggtgagacaggcccccagagacggcctgacccccgtgccccccctggcccccgcccccagaccccccagcagcggcctgcccgccgtgctgaaccccagacccaccctgacccccggcagactgcccacccccaccctgggcaccgccagagcccccatgcccacccccaccctggtgagacccctgctgaagctggtgcacagccccagccccgaggtgagcgccagcgcccccggcgccgcccccctgaccatcagcagccccctgcacgtgcccagcagcctgcccggccccgccagcagccccatgcccatccccaacagcagccccctggccagccccgtgagcagcaccgtgagcgtgcccctgagcagcagcctgcccatcagcgtgcccaccaccctgcccgcccccgccagcgcccccctgaccatccccatcagcgcccccctgaccgtgagcgccagcggccccgccctgctgaccagcgtgaccccccccctggcccccgtggtgcccgccgcccccggcccccccagcctggcccccagcggcgccagccccagcgccagcgccctgaccctgggcctggccaccgcccccagcctgagcagcagccagacccccggccaccccctgctgctggcccccaccagcagccacgtgcccggcctgaacagcaccgtggcccccgcctgcagccccgtgctggtgcccgccagcgccctggccagccccttccccagcgcccccaaccccgcccccgcccaggccagcctgctggcccccgccagcagcgccagccaggccctggccacccccctggcccccatggccgccccccagaccgccatcctggcccccagccccgccccccccctggcccccctgcccgtgctggcccccagccccggcgccgcccccgtgctggccagcagccagacccccgtgcccgtgatggcccccagcagcacccccggcaccagcctggccagcgccagccccgtgcccgcccccacccccgtgctggcccccagcagcacccagaccatgctgcccgcccccgtgcccagccccctgcccagccccgccagcacccagaccctggccctggcccccgccctggcccccaccctgggcggcagcagccccagccagaccctgagcctgggcaccggcaacccccagggccccttccccacccagaccctgagcctgacccccgccagcagcctggtgcccacccccgcccagaccctgagcctggcccccggcccccccctgggccccacccagaccctgagcctggcccccgccccccccctggcccccgccagccccgtgggccccgcccccgcccacaccctgaccctggcccccgccagcagcagcgccagcctgctggcccccgccagcgtgcagaccctgaccctgagccccgcccccgtgcccaccctgggccccgccgccgcccagaccctggccctggcccccgccagcacccagagccccgccagccaggccagcagcctggtggtgagcgccagcggcgccgcccccctgcccgtgaccatggtgagcagactgcccgtgagcaaggacgagcccgacaccctgaccctgagaagcggcccccccagcccccccagcaccgccaccagcttcggcggccccagacccagaagacagcccccccccccccccagaagccccttctacctggacagcctggaggagaagagaaagagacagagaagcgagagactggagagaatcttccagctgagcgaggcccacggcgccctggcccccgtgtacggcaccgaggtgctggacttctgcaccctgccccagcccgtggccagccccatcggccccagaagccccggccccagccaccccaccttctggacctacaccgaggccgcccacagagccgtgctgttcccccagcagagactggaccagctgagcgagatcatcgagagattcatcttcgtgatgccccccgtggaggcccccccccccagcctgcacgcctgccacccccccccctggctggcccccagacaggccgccttccaggagcagctggccagcgagctgtggcccagagccagacccctgcacagaatcgtgtgcaacatgagaacccagttccccgacctgagactgatccagtacgactgcggcaagctgcagaccctggccgtgctgctgagacagctgaaggccgagggccacagagtgctgatcttcacccagatgaccagaatgctggacgtgctggagcagttcctgacctaccacggccacctgtacctgagactggacggcagcaccagagtggagcagagacaggccctgatggagagattcaacgccgacaagagaatcttctgcttcatcctgagcaccagaagcggcggcgtgggcgtgaacctgaccggcgccgacaccgtggtgttctacgacagcgactggaaccccaccatggacgcccaggcccaggacagatgccacagaatcggccagaccagagacgtgcacatctacagactgatcagcgagagaaccgtggaggagaacatcctgaagaaggccaaccagaagagaatgctgggcgacatggccatcgagggcggcaacttcaccaccgcctacttcaagcagcagaccatcagagagctgttcgacatgcccctggaggagcccagcagcagcagcgtgcccagcgcccccgaggaggaggaggagaccgtggccagcaagcagacccacatcctggagcaggccctgtgcagagccgaggacgaggaggacatcagagccgccacccaggccaaggccgagcaggtggccgagctggccgagttcaacgagaacgacggcttccccgccggcgagggcgaggaggccggcagacccggcgccgaggacgaggagatgagcagagccgagcaggagatcgccgccctggtggagcagctgacccccatcgagagatacgccatgaagttcctggaggccagcctggaggaggtgagcagagaggagctgaagcaggccgaggagcaggtggaggccgccagaaaggacctggaccaggccaaggaggaggtgttcagactgccccaggaggaggaggagggccccggcgccggcgacgagagcagctgcggcaccggcggcggcacccacagaagaagcaagaaggccaaggcccccgagagacccggcaccagagtgagcgagagactgagaggcgccagagccgagacccagggcgccaaccacacccccgtgatcagcgcccaccagaccagaagcaccaccaccccccccagatgcagccccgccagagagagagtgcccagacccgcccccagacccagacccacccccgccagcgcccccgccgccatccccgccctggtgcccgtgcccgtgagcgcccccgtgcccatcagcgcccccaaccccatcaccatcctgcccgtgcacatcctgcccagcccccccccccccagccagatccccccctgcagcagccccgcctgcacccccccccccgcctgcacccccccccccgcccacacccccccccccgcccagacctgcctggtgacccccagcagccccctgctgctgggcccccccagcgtgcccatcagcgccagcgtgaccaacctgcccctgggcctgagacccgaggccgagctgtgcgcccaggccctggccagccccgagagcctggagctggccagcgtggccagcagcgagaccagcagcctgagcctggtgccccccaaggacctgctgcccgtggccgtggagatcctgcccgtgagcgagaagaacctgagcctgacccccagcgcccccagcctgaccctggaggccggcagcatccccaacggccaggagcaggaggcccccgacagcgccgagggcaccaccctgaccgtgctgcccgagggcgaggagctgcccctgtgcgtgagcgagagcaacggcctggagctgccccccagcgccgccagcgacgagcccctgcaggagcccctggaggccgacagaaccagcgaggagctgaccgaggccaagacccccaccagcagccccgagaagccccaggagctggtgaccgccgaggtggccgcccccagcaccagcagcagcgccaccagcagccccgagggccccagccccgccagaccccccagaagaagaaccagcgccgacgtggagatcagaggccagggcaccggcagacccggccagccccccggccccaaggtgctgagaaagctgcccggcagactggtgaccgtggtggaggagaaggagctggtgagaagaagaagacagcagagaggcgccgccagcaccctggtgcccggcgtgagcgagaccagcgccagccccggcagccccagcgtgagaagcatgagcggccccgagagcagcccccccatcggcggcccctgcgaggccgcccccagcagcagcctgcccacccccccccagcagcccttcatcgccagaagacacatcgagctgggcgtgaccggcggcggcagccccgagaacggcgacggcgccctgctggccatcaccccccccgccgtgaagagaagaagaggcagaccccccaagaagaacagaagccccgccgacgccggcagaggcgtggacgaggcccccagcagcaccctgaagggcaagaccaacggcgccgaccccgtgcccggccccgagaccctgatcgtggccgaccccgtgctggagccccagctgatccccggcccccagcccctgggcccccagcccgtgcacagacccaaccccctgctgagccccgtggagaagagaagaagaggcagaccccccaaggccagagacctgcccatccccggcaccatcagcagcgccggcgacggcaacagcgagagcagaacccagccccccccccaccccagccccctgacccccctgccccccctgctggtgtgccccaccgccaccgtggccaacaccgtgaccaccgtgaccatcagcaccagcccccccaagagaaagagaggcagaccccccaagaacccccccagccccagacccagccagctgcccgtgctggacagagacagcaccagcgtgctggagagctgcggcctgggcagaagaagacagccccagggccagggcgagagcgagggcagcagcagcgacgaggacggcagcagacccctgaccagactggccagactgagactggaggccgagggcatgagaggcagaaagagcggcggcagcatggtggtggccgtgatccaggacgacctggacctggccgacagcggccccggcggcctggagctgaccccccccgtggtgagcctgacccccaagctgagaagcaccagactgagacccggcagcctggtgccccccctggagaccgagaagctgcccagaaagagagccggcgcccccgtgggcggcagccccggcctggccaagagaggcagactgcagccccccagccccctgggccccgagggcagcgtggaggagagcgaggccgaggccagcggcgaggaggaggagggcgacggcacccccagaagaagacccggccccagaagactggtgggcaccaccaaccagggcgaccagagaatcctgagaagcagcgccccccccagcctggccggccccgccgtgagccacagaggcagaaaggccaagacctag

SEQ ID NO: 99255 - DNA, 9219 bp, synthetic construct
  misc_feature 1..9219: note = Description of Artificial Sequence: Synthetic coding sequence
  source 1..9219: mol_type = other DNA
atgcagagcagccccagccccgcccacccccagctgcccgtgctgcagacccagatggtgagcgacggcatgaccggcagcaaccccgtgagccccgccagcagcagcagccccgccagcagcggcgccggcggcatcagcccccagcacatcgcccaggacagcagcctggacggcccccccggcccccccgacggcgccaccgtgcccctggagggcttcagcctgagccaggccgccgacctggccaacaagggccccaagtgggagaagagccacgccgagatcgccgagcaggccaagcacgaggccgagatcgagaccagaatcgccgagctgagaaaggagggcttctggagcctgaagagactgcccaaggtgcccgagccccccagacccaagggccactgggactacctgtgcgaggagatgcagtggctgagcgccgacttcgcccaggagagaagatggaagagaggcgtggccagaaaggtggtgagaatggtgatcagacaccacgaggagcagagacagaaggaggagagagccagaagagaggagcaggccaagctgagaagaatcgccagcaccatggccaaggacgtgagacagttctggagcaacgtggagaaggtggtgcagttcaagcagcagagcagactggaggagaagagaaagaaggccctggacctgcacctggacttcatcgtgggccagaccgagaagtacagcgacctgctgagccagagcctgaaccagcccctgaccagcagcaaggccggcagcagcccctgcctgggcagcagcagcgccgccagcagcccccccccccccgccagcagactggacgacgaggacggcgacttccagccccaggaggacgaggaggaggacgacgaggagaccatcgaggtggaggagcagcaggagggcaacgacgccgaggcccagagaagagagatcgagctgctgagaagagagggcgagctgcccctggaggagctgctgagaagcctgcccccccagctgctggagggccccagcagccccagccagacccccagcagccacgacagcgacaccagagacggccccgaggagggcgccgaggaggagcccccccaggtgctggagatcaagcccccccccagcgccgtgacccagagaaacaagcagccctggcaccccgacgaggacgacgaggagttcaccgccaacgaggaggaggccgaggacgaggaggacaccatcgccgccgaggagcagctggagggcgaggtggaccacgccatggagctgagcgagctggccagagagggcgagctgagcatggaggagctgctgcagcagtacgccggcgcctacgcccccggcagcggcagcagcgaggacgaggacgaggacgaggtggacgccaacagcagcgactgcgagcccgagggccccgtggaggccgaggagcccccccaggaggacagcagcagccagagcgacagcgtggaggacagaagcgaggacgaggaggacgagcacagcgaggaggaggagaccagcggcagcagcgccagcgaggagagcgagagcgaggagagcgaggacgcccagagccagagccaggccgacgaggaggaggaggacgacgacttcggcgtggagtacctgctggccagagacgaggagcagagcgaggccgacgccggcagcggcccccccacccccggccccaccaccctgggccccaagaaggagatcaccgacatcgccgccgccgccgagagcctgcagcccaagggctacaccctggccaccacccaggtgaagacccccatccccctgctgctgagaggccagctgagagagtaccagcacatcggcctggactggctggtgaccatgtacgagaagaagctgaacggcatcctggccgacgagatgggcctgggcaagaccatccagaccatcagcctgctggcccacctggcctgcgagaagggcaactggggcccccacctgatcatcgtgcccaccagcgtgatgctgaactgggagatggagctgaagagatggtgccccagcttcaagatcctgacctactacggcgcccagaaggagagaaagctgaagagacagggctggaccaagcccaacgccttccacgtgtgcatcaccagctacaagctggtgctgcaggaccaccaggccttcagaagaaagaactggagatacctgatcctggacgaggcccagaacatcaagaacttcaagagccagagatggcagagcctgctgaacttcaacagccagagaagactgctgctgaccggcacccccctgcagaacagcctgatggagctgtggagcctgatgcacttcctgatgccccacgtgttccagagccacagagagttcaaggagtggttcagcaaccccctgaccggcatgatcgagggcagccaggagtacaacgagggcctggtgaagagactgcacaaggtgctgagacccttcctgctgagaagagtgaaggtggacgtggagaagcagatgcccaagaagtacgagcacgtgatcagatgcagactgagcaagagacagagatgcctgtacgacgacttcatggcccagaccaccaccaaggagaccctggccaccggccacttcatgagcgtgatcaacatcctgatgcagctgagaaaggtgtgcaaccaccccaacctgttcgaccccagacccgtgaccagccccttcatcacccccggcatctgcttcagcaccgccagcctggtgctgagagccaccgacgtgcaccccctgcagagaatcgacatgggcagattcgacctgatcggcctggagggcagagtgagcagatacgaggccgacaccttcctgcccagacacagactgagcagaagagtgctgctggaggtggccaccgcccccgaccccccccccagacccaagcccgtgaagatgaaggtgaacagaatgctgcagcccgtgcccaagcaggagggcagaaccgtggtggtggtgaacaaccccagagcccccctgggccccgtgcccgtgagacccccccccggccccgagctgagcgcccagcccacccccggccccgtgccccaggtgctgcccgccagcctgatggtgagcgccagccccgccggcccccccctgatccccgccagcagaccccccggccccgtgctgctgccccccctgcagcccaacagcggcagcctgccccaggccggcgaggtggtgagcatcggccagctggccagcctggcccagagacccgtggccaacgccggcggcagcaagcccctgaccttccagatccagggcaacaagctgaccctgaccggcgcccaggtgagacagctggccgtgggccagcccagacccctgcagatgccccccaccatggtgaacaacaccggcgtggtgaagatcgtggtgagacaggcccccagagacggcctgacccccgtgccccccctggcccccgcccccagaccccccagcagcggcctgcccgccgtgctgaaccccagacccaccctgacccccggcagactgcccacccccaccctgggcaccgccagagcccccatgcccacccccaccctggtgagacccctgctgaagctggtgcacagccccagccccgaggtgagcgccagcgcccccggcgccgcccccctgaccatcagcagccccctgcacgtgcccagcagcctgcccggccccgccagcagccccatgcccatccccaacagcagccccctggccagccccgtgagcagcaccgtgagcgtgcccctgagcagcagcctgcccatcagcgtgcccaccaccctgcccgcccccgccagcgcccccctgaccatccccatcagcgcccccctgaccgtgagcgccagcggccccgccctgctgaccagcgtgaccccccccctggcccccgtggtgcccgccgcccccggcccccccagcctggcccccagcggcgccagccccagcgccagcgccctgaccctgggcctggccaccgcccccagcctgagcagcagccagacccccggccaccccctgctgctggcccccaccagcagccacgtgcccggcctgaacagcaccgtggcccccgcctgcagccccgtgctggtgcccgccagcgccctggccagccccttccccagcgcccccaaccccgcccccgcccaggccagcctgctggcccccgccagcagcgccagccaggccctggccacccccctggcccccatggccgccccccagaccgccatcctggcccccagccccgccccccccctggcccccctgcccgtgctggcccccagccccggcgccgcccccgtgctggccagcagccagacccccgtgcccgtgatggcccccagcagcacccccggcaccagcctggccagcgccagccccgtgcccgcccccacccccgtgctggcccccagcagcacccagaccatgctgcccgcccccgtgcccagccccctgcccagccccgccagcacccagaccctggccctggcccccgccctggcccccaccctgggcggcagcagccccagccagaccctgagcctgggcaccggcaacccccagggccccttccccacccagaccctgagcctgacccccgccagcagcctggtgcccacccccgcccagaccctgagcctggcccccggcccccccctgggccccacccagaccctgagcctggcccccgccccccccctggcccccgccagccccgtgggccccgcccccgcccacaccctgaccctggcccccgccagcagcagcgccagcctgctggcccccgccagcgtgcagaccctgaccctgagccccgcccccgtgcccaccctgggccccgccgccgcccagaccctggccctggcccccgccagcacccagagccccgccagccaggccagcagcctggtggtgagcgccagcggcgccgcccccctgcccgtgaccatggtgagcagactgcccgtgagcaaggacgagcccgacaccctgaccctgagaagcggcccccccagcccccccagcaccgccaccagcttcggcggccccagacccagaagacagcccccccccccccccagaagccccttctacctggacagcctggaggagaagagaaagagacagagaagcgagagactggagagaatcttccagctgagcgaggcccacggcgccctggcccccgtgtacggcaccgaggtgctggacttctgcaccctgccccagcccgtggccagccccatcggccccagaagccccggccccagccaccccaccttctggacctacaccgaggccgcccacagagccgtgctgttcccccagcagagactggaccagctgagcgagatcatcgagagattcatcttcgtgatgccccccgtggaggcccccccccccagcctgcacgcctgccacccccccccctggctggcccccagacaggccgccttccaggagcagctggccagcgagctgtggcccagagccagacccctgcacagaatcgtgtgcaacatgagaacccagttccccgacctgagactgatccagtacgactgcggcaagctgcagaccctggccgtgctgctgagacagctgaaggccgagggccacagagtgctgatcttcacccagatgaccagaatgctggacgtgctggagcagttcctgacctaccacggccacctgtacctgagactggacggcagcaccagagtggagcagagacaggccctgatggagagattcaacgccgacaagagaatcttctgcttcatcctgagcaccagaagcggcggcgtgggcgtgaacctgaccggcgccgacaccgtggtgttctacgacagcgactggaaccccaccatggacgcccaggcccaggacagatgccacagaatcggccagaccagagacgtgcacatctacagactgatcagcgagagaaccgtggaggagaacatcctgaagaaggccaaccagaagagaatgctgggcgacatggccatcgagggcggcaacttcaccaccgcctacttcaagcagcagaccatcagagagctgttcgacatgcccctggaggagcccagcagcagcagcgtgcccagcgcccccgaggaggaggaggagaccgtggccagcaagcagacccacatcctggagcaggccctgtgcagagccgaggacgaggaggacatcagagccgccacccaggccaaggccgagcaggtggccgagctggccgagttcaacgagaacgacggcttccccgccggcgagggcgaggaggccggcagacccggcgccgaggacgaggagatgagcagagccgagcaggagatcgccgccctggtggagcagctgacccccatcgagagatacgccatgaagttcctggaggccagcctggaggaggtgagcagagaggagctgaagcaggccgaggagcaggtggaggccgccagaaaggacctggaccaggccaaggaggaggtgttcagactgccccaggaggaggaggagggccccggcgccggcgacgagagcagctgcggcaccggcggcggcacccacagaagaagcaagaaggccaaggcccccgagagacccggcaccagagtgagcgagagactgagaggcgccagagccgagacccagggcgccaaccacacccccgtgatcagcgcccaccagaccagaagcaccaccaccccccccagatgcagccccgccagagagagagtgcccagacccgcccccagacccagacccacccccgccagcgcccccgccgccatccccgccctggtgcccgtgcccgtgagcgcccccgtgcccatcagcgcccccaaccccatcaccatcctgcccgtgcacatcctgcccagcccccccccccccagccagatccccccctgcagcagccccgcctgcacccccccccccgcctgcacccccccccccgcccacacccccccccccgcccagacctgcctggtgacccccagcagccccctgctgctgggcccccccagcgtgcccatcagcgccagcgtgaccaacctgcccctgggcctgagacccgaggccgagctgtgcgcccaggccctggccagccccgagagcctggagctggccagcgtggccagcagcgagaccagcagcctgagcctggtgccccccaaggacctgctgcccgtggccgtggagatcctgcccgtgagcgagaagaacctgagcctgacccccagcgcccccagcctgaccctggaggccggcagcatccccaacggccaggagcaggaggcccccgacagcgccgagggcaccaccctgaccgtgctgcccgagggcgaggagctgcccctgtgcgtgagcgagagcaacggcctggagctgccccccagcgccgccagcgacgagcccctgcaggagcccctggaggccgacagaaccagcgaggagctgaccgaggccaagacccccaccagcagccccgagaagccccaggagctggtgaccgccgaggtggccgcccccagcaccagcagcagcgccaccagcagccccgagggccccagccccgccagaccccccagaagaagaaccagcgccgacgtggagatcagaggccagggcaccggcagacccggccagccccccggccccaaggtgctgagaaagctgcccggcagactggtgaccgtggtggaggagaaggagctggtgagaagaagaagacagcagagaggcgccgccagcaccctggtgcccggcgtgagcgagaccagcgccagccccggcagccccagcgtgagaagcatgagcggccccgagagcagcccccccatcggcggcccctgcgaggccgcccccagcagcagcctgcccacccccccccagcagcccttcatcgccagaagacacatcgagctgggcgtgaccggcggcggcagccccgagaacggcgacggcgccctgctggccatcaccccccccgccgtgaagagaagaagaggcagaccccccaagaagaacagaagccccgccgacgccggcagaggcgtggacgaggcccccagcagcaccctgaagggcaagaccaacggcgccgaccccgtgcccggccccgagaccctgatcgtggccgaccccgtgctggagccccagctgatccccggcccccagcccctgggcccccagcccgtgcacagacccaaccccctgctgagccccgtggagaagagaagaagaggcagaccccccaaggccagagacctgcccatccccggcaccatcagcagcgccggcgacggcaacagcgagagcagaacccagccccccccccaccccagccccctgacccccctgccccccctgctggtgtgccccaccgccaccgtggccaacaccgtgaccaccgtgaccatcagcaccagcccccccaagagaaagagaggcagaccccccaagaacccccccagccccagacccagccagctgcccgtgctggacagagacagcaccagcgtgctggagagctgcggcctgggcagaagaagacagccccagggccagggcgagagcgagggcagcagcagcgacgaggacggcagcagacccctgaccagactggccagactgagactggaggccgagggcatgagaggcagaaagagcggcggcagcatggtggtggccgtgatccaggacgacctggacctggccgacagcggccccggcggcctggagctgaccccccccgtggtgagcctgacccccaagctgagaagcaccagactgagacccggcagcctggtgccccccctggagaccgagaagctgcccagaaagagagccggcgcccccgtgggcggcagccccggcctggccaagagaggcagactgcagccccccagccccctgggccccgagggcagcgtggaggagagcgaggccgaggccagcggcgaggaggaggagggcgacggcacccccagaagaagacccggccccagaagactggtgggcaccaccaaccagggcgaccagagaatcctgagaagcagcgccccccccagcctggccggccccgccgtgagccacagaggcagaaaggccaagacctag

SEQ ID NO: 99256 - DNA, 9507 bp, synthetic construct
  misc_feature 1..9507: note = Description of Artificial Sequence: Synthetic coding sequence
  source 1..9507: mol_type = other DNA
atgcagagcagccccagccccgcccacccccagctgcccgtgctgcagacccagatggtgagcgacggcatgaccggcagcaaccccgtgagccccgccagcagcagcagccccgccagcagcggcgccggcggcatcagcccccagcacatcgcccaggacagcagcctggacggcccccccggcccccccgacggcgccaccgtgcccctggagggcttcagcctgagccaggccgccgacctggccaacaagggccccaagtgggagaagagccacgccgagatcgccgagcaggccaagcacgaggccgagatcgagaccagaatcgccgagctgagaaaggagggcttctggagcctgaagagactgcccaaggtgcccgagccccccagacccaagggccactgggactacctgtgcgaggagatgcagtggctgagcgccgacttcgcccaggagagaagatggaagagaggcgtggccagaaaggtggtgagaatggtgatcagacaccacgaggagcagagacagaaggaggagagagccagaagagaggagcaggccaagctgagaagaatcgccagcaccatggccaaggacgtgagacagttctggagcaacgtggagaaggtggtgcagttcaagcagcagagcagactggaggagaagagaaagaaggccctggacctgcacctggacttcatcgtgggccagaccgagaagtacagcgacctgctgagccagagcctgaaccagcccctgaccagcagcaaggccggcagcagcccctgcctgggcagcagcagcgccgccagcagcccccccccccccgccagcagactggacgacgaggacggcgacttccagccccaggaggacgaggaggaggacgacgaggagaccatcgaggtggaggagcagcaggagggcaacgacgccgaggcccagagaagagagatcgagctgctgagaagagagggcgagctgcccctggaggagctgctgagaagcctgcccccccagctgctggagggccccagcagccccagccagacccccagcagccacgacagcgacaccagagacggccccgaggagggcgccgaggaggagcccccccaggtgctggagatcaagcccccccccagcgccgtgacccagagaaacaagcagccctggcaccccgacgaggacgacgaggagttcaccgccaacgaggaggaggccgaggacgaggaggacaccatcgccgccgaggagcagctggagggcgaggtggaccacgccatggagctgagcgagctggccagagagggcgagctgagcatggaggagctgctgcagcagtacgccggcgcctacgcccccggcagcggcagcagcgaggacgaggacgaggacgaggtggacgccaacagcagcgactgcgagcccgagggccccgtggaggccgaggagcccccccaggaggacagcagcagccagagcgacagcgtggaggacagaagcgaggacgaggaggacgagcacagcgaggaggaggagaccagcggcagcagcgccagcgaggagagcgagagcgaggagagcgaggacgcccagagccagagccaggccgacgaggaggaggaggacgacgacttcggcgtggagtacctgctggccagagacgaggagcagagcgaggccgacgccggcagcggcccccccacccccggccccaccaccctgggccccaagaaggagatcaccgacatcgccgccgccgccgagagcctgcagcccaagggctacaccctggccaccacccaggtgaagacccccatccccctgctgctgagaggccagctgagagagtaccagcacatcggcctggactggctggtgaccatgtacgagaagaagctgaacggcatcctggccgacgagatgggcctgggcaagaccatccagaccatcagcctgctggcccacctggcctgcgagaagggcaactggggcccccacctgatcatcgtgcccaccagcgtgatgctgaactgggagatggagctgaagagatggtgccccagcttcaagatcctgacctactacggcgcccagaaggagagaaagctgaagagacagggctggaccaagcccaacgccttccacgtgtgcatcaccagctacaagctggtgctgcaggaccaccaggccttcagaagaaagaactggagatacctgatcctggacgaggcccagaacatcaagaacttcaagagccagagatggcagagcctgctgaacttcaacagccagagaagactgctgctgaccggcacccccctgcagaacagcctgatggagctgtggagcctgatgcacttcctgatgccccacgtgttccagagccacagagagttcaaggagtggttcagcaaccccctgaccggcatgatcgagggcagccaggagtacaacgagggcctggtgaagagactgcacaaggtgctgagacccttcctgctgagaagagtgaaggtggacgtggagaagcagatgcccaagaagtacgagcacgtgatcagatgcagactgagcaagagacagagatgcctgtacgacgacttcatggcccagaccaccaccaaggagaccctggccaccggccacttcatgagcgtgatcaacatcctgatgcagctgagaaaggtgtgcaaccaccccaacctgttcgaccccagacccgtgaccagccccttcatcacccccggcatctgcttcagcaccgccagcctggtgctgagagccaccgacgtgcaccccctgcagagaatcgacatgggcagattcgacctgatcggcctggagggcagagtgagcagatacgaggccgacaccttcctgcccagacacagactgagcagaagagtgctgctggaggtggccaccgcccccgaccccccccccagacccaagcccgtgaagatgaaggtgaacagaatgctgcagcccgtgcccaagcaggagggcagaaccgtggtggtggtgaacaaccccagagcccccctgggccccgtgcccgtgagacccccccccggccccgagctgagcgcccagcccacccccggccccgtgccccaggtgctgcccgccagcctgatggtgagcgccagccccgccggcccccccctgatccccgccagcagaccccccggccccgtgctgctgccccccctgcagcccaacagcggcagcctgccccaggtgctgcccagccccctgggcgtgctgagcggcaccagcagaccccccacccccaccctgagcctgaagcccaccccccccgcccccgtgagactgagccccgcccccccccccggcagcagcagcctgctgaagcccctgaccgtgccccccggctacaccttcccccccgccgccgccaccaccaccagcaccaccaccgccaccgccaccaccaccgccgtgcccgcccccacccccgccccccagagactgatcctgagccccgacatgcaggccagactgcccagcggcgaggtggtgagcatcggccagctggccagcctggcccagagacccgtggccaacgccggcggcagcaagcccctgaccttccagatccagggcaacaagctgaccctgaccggcgcccaggtgagacagctggccgtgggccagcccagacccctgcagatgccccccaccatggtgaacaacaccggcgtggtgaagatcgtggtgagacaggcccccagagacggcctgacccccgtgccccccctggcccccgcccccagaccccccagcagcggcctgcccgccgtgctgaaccccagacccaccctgacccccggcagactgcccacccccaccctgggcaccgccagagcccccatgcccacccccaccctggtgagacccctgctgaagctggtgcacagccccagccccgaggtgagcgccagcgcccccggcgccgcccccctgaccatcagcagccccctgcacgtgcccagcagcctgcccggccccgccagcagccccatgcccatccccaacagcagccccctggccagccccgtgagcagcaccgtgagcgtgcccctgagcagcagcctgcccatcagcgtgcccaccaccctgcccgcccccgccagcgcccccctgaccatccccatcagcgcccccctgaccgtgagcgccagcggccccgccctgctgaccagcgtgaccccccccctggcccccgtggtgcccgccgcccccggcccccccagcctggcccccagcggcgccagccccagcgccagcgccctgaccctgggcctggccaccgcccccagcctgagcagcagccagacccccggccaccccctgctgctggcccccaccagcagccacgtgcccggcctgaacagcaccgtggcccccgcctgcagccccgtgctggtgcccgccagcgccctggccagccccttccccagcgcccccaaccccgcccccgcccaggccagcctgctggcccccgccagcagcgccagccaggccctggccacccccctggcccccatggccgccccccagaccgccatcctggcccccagccccgccccccccctggcccccctgcccgtgctggcccccagccccggcgccgcccccgtgctggccagcagccagacccccgtgcccgtgatggcccccagcagcacccccggcaccagcctggccagcgccagccccgtgcccgcccccacccccgtgctggcccccagcagcacccagaccatgctgcccgcccccgtgcccagccccctgcccagccccgccagcacccagaccctggccctggcccccgccctggcccccaccctgggcggcagcagccccagccagaccctgagcctgggcaccggcaacccccagggccccttccccacccagaccctgagcctgacccccgccagcagcctggtgcccacccccgcccagaccctgagcctggcccccggcccccccctgggccccacccagaccctgagcctggcccccgccccccccctggcccccgccagccccgtgggccccgcccccgcccacaccctgaccctggcccccgccagcagcagcgccagcctgctggcccccgccagcgtgcagaccctgaccctgagccccgcccccgtgcccaccctgggccccgccgccgcccagaccctggccctggcccccgccagcacccagagccccgccagccaggccagcagcctggtggtgagcgccagcggcgccgcccccctgcccgtgaccatggtgagcagactgcccgtgagcaaggacgagcccgacaccctgaccctgagaagcggcccccccagcccccccagcaccgccaccagcttcggcggccccagacccagaagacagcccccccccccccccagaagccccttctacctggacagcctggaggagaagagaaagagacagagaagcgagagactggagagaatcttccagctgagcgaggcccacggcgccctggcccccgtgtacggcaccgaggtgctggacttctgcaccctgccccagcccgtggccagccccatcggccccagaagccccggccccagccaccccaccttctggacctacaccgaggccgcccacagagccgtgctgttcccccagcagagactggaccagctgagcgagatcatcgagagattcatcttcgtgatgccccccgtggaggcccccccccccagcctgcacgcctgccacccccccccctggctggcccccagacaggccgccttccaggagcagctggccagcgagctgtggcccagagccagacccctgcacagaatcgtgtgcaacatgagaacccagttccccgacctgagactgatccagtacgactgcggcaagctgcagaccctggccgtgctgctgagacagctgaaggccgagggccacagagtgctgatcttcacccagatgaccagaatgctggacgtgctggagcagttcctgacctaccacggccacctgtacctgagactggacggcagcaccagagtggagcagagacaggccctgatggagagattcaacgccgacaagagaatcttctgcttcatcctgagcaccagaagcggcggcgtgggcgtgaacctgaccggcgccgacaccgtggtgttctacgacagcgactggaaccccaccatggacgcccaggcccaggacagatgccacagaatcggccagaccagagacgtgcacatctacagactgatcagcgagagaaccgtggaggagaacatcctgaagaaggccaaccagaagagaatgctgggcgacatggccatcgagggcggcaacttcaccaccgcctacttcaagcagcagaccatcagagagctgttcgacatgcccctggaggagcccagcagcagcagcgtgcccagcgcccccgaggaggaggaggagaccgtggccagcaagcagacccacatcctggagcaggccctgtgcagagccgaggacgaggaggacatcagagccgccacccaggccaaggccgagcaggtggccgagctggccgagttcaacgagaacgacggcttccccgccggcgagggcgaggaggccggcagacccggcgccgaggacgaggagatgagcagagccgagcaggagatcgccgccctggtggagcagctgacccccatcgagagatacgccatgaagttcctggaggccagcctggaggaggtgagcagagaggagctgaagcaggccgaggagcaggtggaggccgccagaaaggacctggaccaggccaaggaggaggtgttcagactgccccaggaggaggaggagggccccggcgccggcgacgagagcagctgcggcaccggcggcggcacccacagaagaagcaagaaggccaaggcccccgagagacccggcaccagagtgagcgagagactgagaggcgccagagccgagacccagggcgccaaccacacccccgtgatcagcgcccaccagaccagaagcaccaccaccccccccagatgcagccccgccagagagagagtgcccagacccgcccccagacccagacccacccccgccagcgcccccgccgccatccccgccctggtgcccgtgcccgtgagcgcccccgtgcccatcagcgcccccaaccccatcaccatcctgcccgtgcacatcctgcccagcccccccccccccagccagatccccccctgcagcagccccgcctgcacccccccccccgcctgcacccccccccccgcccacacccccccccccgcccagacctgcctggtgacccccagcagccccctgctgctgggcccccccagcgtgcccatcagcgccagcgtgaccaacctgcccctgggcctgagacccgaggccgagctgtgcgcccaggccctggccagccccgagagcctggagctggccagcgtggccagcagcgagaccagcagcctgagcctggtgccccccaaggacctgctgcccgtggccgtggagatcctgcccgtgagcgagaagaacctgagcctgacccccagcgcccccagcctgaccctggaggccggcagcatccccaacggccaggagcaggaggcccccgacagcgccgagggcaccaccctgaccgtgctgcccgagggcgaggagctgcccctgtgcgtgagcgagagcaacggcctggagctgccccccagcgccgccagcgacgagcccctgcaggagcccctggaggccgacagaaccagcgaggagctgaccgaggccaagacccccaccagcagccccgagaagccccaggagctggtgaccgccgaggtggccgcccccagcaccagcagcagcgccaccagcagccccgagggccccagccccgccagaccccccagaagaagaaccagcgccgacgtggagatcagaggccagggcaccggcagacccggccagccccccggccccaaggtgctgagaaagctgcccggcagactggtgaccgtggtggaggagaaggagctggtgagaagaagaagacagcagagaggcgccgccagcaccctggtgcccggcgtgagcgagaccagcgccagccccggcagccccagcgtgagaagcatgagcggccccgagagcagcccccccatcggcggcccctgcgaggccgcccccagcagcagcctgcccacccccccccagcagcccttcatcgccagaagacacatcgagctgggcgtgaccggcggcggcagccccgagaacggcgacggcgccctgctggccatcaccccccccgccgtgaagagaagaagaggcagaccccccaagaagaacagaagccccgccgacgccggcagaggcgtggacgaggcccccagcagcaccctgaagggcaagaccaacggcgccgaccccgtgcccggccccgagaccctgatcgtggccgaccccgtgctggagccccagctgatccccggcccccagcccctgggcccccagcccgtgcacagacccaaccccctgctgagccccgtggagaagagaagaagaggcagaccccccaaggccagagacctgcccatccccggcaccatcagcagcgccggcgacggcaacagcgagagcagaacccagccccccccccaccccagccccctgacccccctgccccccctgctggtgtgccccaccgccaccgtggccaacaccgtgaccaccgtgaccatcagcaccagcccccccaagagaaagagaggcagaccccccaagaacccccccagccccagacccagccagctgcccgtgctggacagagacagcaccagcgtgctggagagctgcggcctgggcagaagaagacagccccagggccagggcgagagcgagggcagcagcagcgacgaggacggcagcagacccctgaccagactggccagactgagactggaggccgagggcatgagaggcagaaagagcggcggcagcatggtggtggccgtgatccaggacgacctggacctggccgacagcggccccggcggcctggagctgaccccccccgtggtgagcctgacccccaagctgagaagcaccagactgagacccggcagcctggtgccccccctggagaccgagaagctgcccagaaagagagccggcgcccccgtgggcggcagccccggcctggccaagagaggcagactgcagccccccagccccctgggccccgagggcagcgtggaggagagcgaggccgaggccagcggcgaggaggaggagggcgacggcacccccagaagaagacccggccccagaagactggtgggcaccaccaaccagggcgaccagagaatcctgagaagcagcgccccccccagcctggccggccccgccgtgagccacagaggcagaaaggccaagacctag

SEQ ID NO: 99257 - DNA, 180 bp, synthetic construct
  misc_feature 1..180: note = Description of Artificial Sequence: Synthetic coding sequence
  source 1..180: mol_type = other DNA
atgcagagcagccccagccccgcccacccccagctgcccgtgctgcagacccagatggtgagcgacggcatgaccggcagcaaccccgtgagccccgccagcagcagcagccccgccagcagcggcgccggcggcatcagcccccagcacatcgcccaggacagcagcctggacggctag

SEQ ID NO: 99258 - DNA, 774 bp, synthetic construct
  misc_feature 1..774: note = Description of Artificial Sequence: Synthetic coding sequence
  source 1..774: mol_type = other DNA
atgcacagaagaggcgtgggcgccggcgccatcgccaagaagaagctggccgaggccaagtacaaggagagaggcaccgtgctggccgaggaccagctggcccagatgagcaagcagctggacatgttcaagaccaacctggaggagttcgccagcaagcacaagcaggagatcagaaagaaccccgagttcagagtgcagttccaggacatgtgcgccaccatcggcgtggaccccctggccagcggcaagggcttctggagcgagatgctgggcgtgggcgacttctactacgagctgggcgtgcagatcatcgaggtgtgcctggccctgaagcacagaaacggcggcctgatcaccctggaggagctgcaccagcaggtgctgaagggcagaggcaagttcgcccaggacgtgagccaggacgacctgatcagagccatcaagaagctgaaggccctgggcaccggcttcggcatcatccccgtgggcggcacctacctgatccagagcgtgcccgccgagctgaacatggaccacaccgtggtgctgcagctggccgagaacggctacgtgaccgtgagcgagatcaaggccagcctgaagtgggagaccgagagagccagacaggtgctggagcacctgctgaaggagggcctggcctggctggacctgcaggcccccggcgaggcccactactggctgcccgccctgttcaccgacctgtacagccaggagatcaccgccgaggaggccagagaggccctgccctag

SEQ ID NO: 99259 - DNA, 777 bp, synthetic construct
  misc_feature 1..777: note = Description of Artificial Sequence: Synthetic coding sequence
  source 1..777: mol_type = other DNA
atgcacagaagaggcgtgggcgccggcgccatcgccaagaagaagctggccgaggccaagtacaaggagagaggcaccgtgctggccgaggaccagctggcccagatgagcaagcagctggacatgttcaagaccaacctggaggagttcgccagcaagcacaagcaggagatcagaaagaaccccgagttcagagtgcagttccaggacatgtgcgccaccatcggcgtggaccccctggccagcggcaagggcttctggagcgagatgctgggcgtgggcgacttctactacgagctgggcgtgcagatcatcgaggtgtgcctggccctgaagcacagaaacggcggcctgatcaccctggaggagctgcaccagcaggtgctgaagggcagaggcaagttcgcccaggacgtgagccaggacgacctgatcagagccatcaagaagctgaaggccctgggcaccggcttcggcatcatccccgtgggcggcacctacctgatccagagcgtgcccgccgagctgaacatggaccacaccgtggtgctgcagctggccgagaagaacggctacgtgaccgtgagcgagatcaaggccagcctgaagtgggagaccgagagagccagacaggtgctggagcacctgctgaaggagggcctggcctggctggacctgcaggcccccggcgaggcccactactggctgcccgccctgttcaccgacctgtacagccaggagatcaccgccgaggaggccagagaggccctgccctag

SEQ ID NO: 99260 - DNA, 1611 bp, synthetic construct
  misc_feature 1..1611: note = Description of Artificial Sequence: Synthetic coding sequence
  source 1..1611: mol_type = other DNA
atgagcagcagcctgggcaaggagaaggacagcaaggagaaggaccccaaggtgcccagcgccaaggagagagagaaggaggccaaggccagcggcggcttcggcaaggagagcaaggagaaggagcccaagaccaagggcaaggacgccaaggacggcaagaaggacagcagcgccgcccagcccggcgtggccttcagcgtggacaacaccatcaagagacccaaccccgcccccggcaccagaaagaagagcagcaacgccgaggtgatcaaggagctgaacaagtgcagagaggagaacagcatgagactggacctgagcaagagaagcatccacatcctgcccagcagcatcaaggagctgacccagctgaccgagctgtacctgtacagcaacaagctgcagagcctgcccgccgaggtgggctgcctggtgaacctgatgaccctggccctgagcgagaacagcctgaccagcctgcccgacagcctggacaacctgaagaagctgagaatgctggacctgagacacaacaagctgagagagatccccagcgtggtgtacagactggacagcctgaccaccctgtacctgagattcaacagaatcaccaccgtggagaaggacatcaagaacctgagcaagctgagcatgctgagcatcagagagaacaagatcaagcagctgcccgccgagatcggcaacctgagcagcctgagcagactgggcctgagatacaacagactgagcgccatccccagaagcctggccaagtgcagcgccctggaggagctgaacctggagaacaacaacatcagcaccctgcccgagagcctgctgagcagcctggtgaagctgaacagcctgaccctggccagaaactgcttccagctgtaccccgtgggcggccccagccagttcagcaccatctacagcctgaacatggagcacaacagaatcaacaagatccccttcggcatcttcagcagagccaaggtgctgagcaagctgaacatgaaggacaaccagctgaccagcctgcccctggacttcggcacctggaccagcatggtggagctgaacctggccaccaaccagctgaccaagatccccgaggacgtgagcggcctggtgagcctggaggtgctgatcctgagcaacaacctgctgaagaagctgccccacggcctgggcaacctgagaaagctgagagagctggacctggaggagaacaagctggagagcctgcccaacgagatcgcctacctgaaggacctgcagaagctggtgctgaccaacaaccagctgaccaccctgcccagaggcatcggccacctgaccaacctgacccacctgggcctgggcgagaacctgctgacccacctgcccgaggagatcggcaccctggagaacctggaggagctgtacctgaacgacaaccccaacctgcacagcctgcccttcgagctggccctgtgcagcaagctgagcatcatgagcatcgagaactgccccctgagccacctgcccccccagatcgtggccggcggccccagcttcatcatccagttcctgaagatgcagggcccctacagagccatggtgtag

SEQ ID NO: 99261 - DNA, 1749 bp, synthetic construct
  misc_feature 1..1749: note = Description of Artificial Sequence: Synthetic coding sequence
  source 1..1749: mol_type = other DNA
atgagcagcagcctgggcaaggagaaggacagcaaggagaaggaccccaaggtgcccagcgccaaggagagagagaaggaggccaaggccagcggcggcttcggcaaggagagcaaggagaaggagcccaagaccaagggcaaggacgccaaggacggcaagaaggacagcagcgccgcccagcccggcgtggccttcagcgtggacaacaccatcaagagacccaaccccgcccccggcaccagaaagaagagcagcaacgccgaggtgatcaaggagctgaacaagtgcagagaggagaacagcatgagactggacctgagcaagagaagcatccacatcctgcccagcagcatcaaggagctgacccagctgaccgagctgtacctgtacagcaacaagctgcagagcctgcccgccgaggtgggctgcctggtgaacctgatgaccctggccctgagcgagaacagcctgaccagcctgcccgacagcctggacaacctgaagaagctgagaatgctggacctgagacacaacaagctgagagagatccccagcgtggtgtacagactggacagcctgaccaccctgtacctgagattcaacagaatcaccaccgtggagaaggacatcaagaacctgagcaagctgagcatgctgagcatcagagagaacaagatcaagcagctgcccgccgagatcggcgagctgtgcaacctgatcaccctggacgtggcccacaaccagctggagcacctgcccaaggagatcggcaactgcacccagatcaccaacctggacctgcagcacaacgagctgctggacctgcccgacaccatcggcaacctgagcagcctgagcagactgggcctgagatacaacagactgagcgccatccccagaagcctggccaagtgcagcgccctggaggagctgaacctggagaacaacaacatcagcaccctgcccgagagcctgctgagcagcctggtgaagctgaacagcctgaccctggccagaaactgcttccagctgtaccccgtgggcggccccagccagttcagcaccatctacagcctgaacatggagcacaacagaatcaacaagatccccttcggcatcttcagcagagccaaggtgctgagcaagctgaacatgaaggacaaccagctgaccagcctgcccctggacttcggcacctggaccagcatggtggagctgaacctggccaccaaccagctgaccaagatccccgaggacgtgagcggcctggtgagcctggaggtgctgatcctgagcaacaacctgctgaagaagctgccccacggcctgggcaacctgagaaagctgagagagctggacctggaggagaacaagctggagagcctgcccaacgagatcgcctacctgaaggacctgcagaagctggtgctgaccaacaaccagctgaccaccctgcccagaggcatcggccacctgaccaacctgacccacctgggcctgggcgagaacctgctgacccacctgcccgaggagatcggcaccctggagaacctggaggagctgtacctgaacgacaaccccaacctgcacagcctgcccttcgagctggccctgtgcagcaagctgagcatcatgagcatcgagaactgccccctgagccacctgcccccccagatcgtggccggcggccccagcttcatcatccagttcctgaagatgcagggcccctacagagccatggtgtag

SEQ ID NO: 99262 - DNA, 1119 bp, synthetic construct
  misc_feature 1..1119: note = Description of Artificial Sequence: Synthetic coding sequence
  source 1..1119: mol_type = other DNA
ctggacaacctgaagaagctgagaatgctggacctgagacacaacaagctgagagagatccccagcgtggtgtacagactggacagcctgaccaccctgtacctgagattcaacagaatcaccaccgtggagaaggacatcaagaacctgagcaagctgagcatgctgagcatcagagagaacaagatcaagcagctgcccgccgagatcggcaacctgagcagcctgagcagactgggcctgagatacaacagactgagcgccatccccagaagcctggccaagtgcagcgccctggaggagctgaacctggagaacaacaacatcagcaccctgcccgagagcctgctgagcagcctggtgaagctgaacagcctgaccctggccagaaactgcttccagctgtaccccgtgggcggccccagccagttcagcaccatctacagcctgaacatggagcacaacagaatcaacaagatccccttcggcatcttcagcagagccaaggtgctgagcaagctgaacatgaaggacaaccagctgaccagcctgcccctggacttcggcacctggaccagcatggtggagctgaacctggccaccaaccagctgaccaagatccccgaggacgtgagcggcctggtgagcctggaggtgctgatcctgagcaacaacctgctgaagaagctgccccacggcctgggcaacctgagaaagctgagagagctggacctggaggagaacaagctggagagcctgcccaacgagatcgcctacctgaaggacctgcagaagctggtgctgaccaacaaccagctgaccaccctgcccagaggcatcggccacctgaccaacctgacccacctgggcctgggcgagaacctgctgacccacctgcccgaggagatcggcaccctggagaacctggaggagctgtacctgaacgacaaccccaacctgcacagcctgcccttcgagctggccctgtgcagcaagctgagcatcatgagcatcgagaactgccccctgagccacctgcccccccagatcgtggccggcggccccagcttcatcatccagttcctgaagatgcagggcccctacagagccatggtgtag

SEQ ID NO: 99263 - DNA, 588 bp, synthetic construct
  misc_feature 1..588: note = Description of Artificial Sequence: Synthetic coding sequence
  source 1..588: mol_type = other DNA
atgctgagagacggcagattcgcctgcgccatctgcccccacagacccgtgctggacaccctggccatgctgaccgcccacagagccggcaagaagcacctgagcagcctgcagctgttctacggcaagaagcagcccggcaaggagagaaagcagaaccccaagcaccagaacgagctgagaagagaggagaccaaggccgaggcccccctgctgacccagaccagactgatcacccagagcgccctgcacagagccccccactacaacagctgctgcagaagaaagtacagacccgaggcccccggccccagcgtgagcctgagccccatgccccccagcgaggtgaagctgcagagcggcaagatcagcagagagcccgagcccgccgccggcccccaggccgaggagagcgccaccgtgagcgcccccgcccccatgagccccaccagaagaagagccctggaccactacctgaccctgagaagcagcggctggatccccgacggcagaggcagatgggtgaaggacgagaacgtggagttcgacagcgacgaggaggagccccccgacctgcccctggactag

SEQ ID NO: 99264 - DNA, 693 bp, synthetic construct
  misc_feature 1..693: note = Description of Artificial Sequence: Synthetic coding sequence
  source 1..693: mol_type = other DNA
atgagcttcaagagagagggcgacgactggagccagctgaacgtgctgaagaagagaagagtgggcgacctgctggccagctacatccccgaggacgaggccctgatgctgagagacggcagattcgcctgcgccatctgcccccacagacccgtgctggacaccctggccatgctgaccgcccacagagccggcaagaagcacctgagcagcctgcagctgttctacggcaagaagcagcccggcaaggagagaaagcagaaccccaagcaccagaacgagctgagaagagaggagaccaaggccgaggcccccctgctgacccagaccagactgatcacccagagcgccctgcacagagccccccactacaacagctgctgcagaagaaagtacagacccgaggcccccggccccagcgtgagcctgagccccatgccccccagcgaggtgaagctgcagagcggcaagatcagcagagagcccgagcccgccgccggcccccaggccgaggagagcgccaccgtgagcgcccccgcccccatgagccccaccagaagaagagccctggaccactacctgaccctgagaagcagcggctggatccccgacggcagaggcagatgggtgaaggacgagaacgtggagttcgacagcgacgaggaggagccccccgacctgcccctggactag

SEQ ID NO: 99265 - DNA, 1038 bp, synthetic construct
  misc_feature 1..1038: note = Description of Artificial Sequence: Synthetic coding sequence
  source 1..1038: mol_type = other DNA
atgtacaaggactgcatcgagagcaccggcgactacttcctgctgtgcgacgccgagggcccctggggcatcatcctggagagcctggccatcctgggcatcgtggtgaccatcctgctgctgctggccttcctgttcctgatgagaaagatccaggactgcagccagtggaacgtgctgcccacccagctgctgttcctgctgagcgtgctgggcctgttcggcctggccttcgccttcatcatcgagctgaaccagcagaccgcccccgtgagatacttcctgttcggcgtgctgttcgccctgtgcttcagctgcctgctggcccacgccagcaacctggtgaagctggtgagaggctgcgtgagcttcagctggaccaccatcctgtgcatcgccatcggctgcagcctgctgcagatcatcatcgccaccgagtacgtgaccctgatcatgaccagaggcatgatgttcgtgaacatgaccccctgccagctgaacgtggacttcgtggtgctgctggtgtacgtgctgttcctgatggccctgaccttcttcgtgagcaaggccaccttctgcggcccctgcgagaactggaagcagcacggcagactgatcttcatcaccgtgctgttcagcatcatcatctgggtggtgtggatcagcatgctgctgagaggcaacccccagttccagagacagccccagtgggacgaccccgtggtgtgcatcgccctggtgaccaacgcctgggtgttcctgctgctgtacatcgtgcccgagctgtgcatcctgtacagaagctgcagacaggagtgccccctgcagggcaacgcctgccccgtgaccgcctaccagcacagcttccaggtggagaaccaggagctgagcagagccagagacagcgacggcgccgaggaggacgtggccctgaccagctacggcacccccatccagccccagaccgtggaccccacccaggagtgcttcatcccccaggccaagctgagcccccagcaggacgccggcggcgtgtag

SEQ ID NO: 99266 - DNA, 2076 bp, synthetic construct
  misc_feature 1..2076: note = Description of Artificial Sequence: Synthetic coding sequence
  source 1..2076: mol_type = other DNA
atggagggcaacaagctggaggagcaggacagcagccccccccagagcacccccggcctgatgaagggcaacaagagagaggagcagggcctgggccccgagcccgccgccccccagcagcccaccgccgaggaggaggccctgatcgagttccacagaagctacagagagctgttcgagttcttctgcaacaacaccaccatccacggcgccatcagactggtgtgcagccagcacaacagaatgaagaccgccttctgggccgtgctgtggctgtgcaccttcggcatgatgtactggcagttcggcctgctgttcggcgagtacttcagctaccccgtgagcctgaacatcaacctgaacagcgacaagctggtgttccccgccgtgaccatctgcaccctgaacccctacagataccccgagatcaaggaggagctggaggagctggacagaatcaccgagcagaccctgttcgacctgtacaagtacagcagcttcaccaccctggtggccggcagcagaagcagaagagacctgagaggcaccctgccccaccccctgcagagactgagagtgcccccccccccccacggcgccagaagagccagaagcgtggccagcagcctgagagacaacaacccccaggtggactggaaggactggaagatcggcttccagctgtgcaaccagaacaagagcgactgcttctaccagacctacagcagcggcgtggacgccgtgagagagtggtacagattccactacatcaacatcctgagcagactgcccgagaccctgcccagcctggaggaggacaccctgggcaacttcatcttcgcctgcagattcaaccaggtgagctgcaaccaggccaactacagccacttccaccaccccatgtacggcaactgctacaccttcaacgacaagaacaacagcaacctgtggatgagcagcatgcccggcatcaacaacggcctgagcctgatgctgagagccgagcagaacgacttcatccccctgctgagcaccgtgaccggcgccagagtgatggtgcacggccaggacgagcccgccttcatggacgacggcggcttcaacctgagacccggcgtggagaccagcatcagcatgagaaaggagaccctggacagactgggcggcgactacggcgactgcaccaagaacggcagcgacgtgcccgtggagaacctgtaccccagcaagtacacccagcaggtgtgcatccacagctgcttccaggagagcatgatcaaggagtgcggctgcgcctacatcttctaccccagaccccagaacgtggagtactgcgactacagaaagcacagcagctggggccaggtgagaagcctgacccccgtgatccccgccctgtgggaggccgaggccggcagaagcagaggctactgctactacaagctgcaggtggacttcagcagcgaccacctgggctgcttcaccaagtgcagaaagccctgcagcgtgaccagctaccagctgagcgccggctacagcagatggcccagcgtgaccagccaggagtgggtgttccagatgctgagcagacagaacaactacaccgtgaacaacaagagaaacggcgtggccaaggtgaacatcttcttcaaggagctgaactacaagaccaacagcgagagccccagcgtgaccatggtgaccctgctgagcaacctgggcagccagtggagcctgtggttcggcagcagcgtgctgagcgtggtggagatggccgagctggtgttcgacctgctggtgatcatgttcctgatgctgctgagaagattcagaagcagatactggagccccggcagaggcggcagaggcgcccaggaggtggccagcaccctggccagcagcccccccagccacttctgcccccaccccatgagcctgagcctgagccagcccggccccgcccccagccccgccctgaccgcccccccccccgcctacgccaccctgggccccagacccagccccggcggcagcgccggcgccagcagcagcacctgccccctgggcggcccctag

SEQ ID NO: 99267 - DNA, 2058 bp, synthetic construct
  misc_feature 1..2058: note = Description of Artificial Sequence: Synthetic coding sequence
  source 1..2058: mol_type = other DNA
atgctgctgcacatcaaccccgcctacctgttcaagctgctgcacggcttccccccctggatcatgcccaccgacggcaacctgggcgacaagaacttccagatgggcaagcccggccacagagagggcgccaccatgcacgtgaagaagtacctgctgaagggcctgcacagactgcagaagggccccggctacacctacaaggagctgctggtgtggtactgcgacaacaccaacacccacggccccaagagaatcatctgcgagggccccaagaagaaggccatgtggttcctgctgaccctgctgttcgccgccctggtgtgctggcagtggggcatcttcatcagaacctacctgagctgggaggtgagcgtgagcctgagcgtgggcttcaagaccatggacttccccgccgtgaccatctgcaacgccagccccttcaagtacagcaagatcaagcacctgctgaaggacctggacgagctgatggaggccgtgctggagagaatcctggcccccgagctgagccacgccaacgccaccagaaacctgaacttcagcatctggaaccacacccccctggtgctgatcgacgagagaaacccccaccaccccatggtgctggacctgttcggcgacaaccacaacggcctgaccagcagcagcgccagcgagaagatctgcaacgcccacggctgcaagatggccatgagactgtgcagcctgaacagaacccagtgcaccttcagaaacttcaccagcgccacccaggccctgaccgagtggtacatcctgcaggccaccaacatcttcgcccaggtgccccagcaggagctggtggagatgagctaccccggcgagcagatgatcctggcctgcctgttcggcgccgagccctgcaactacagaaacttcaccagcatcttctacccccactacggcaactgctacatcttcaactggggcatgaccgagaaggccctgcccagcgccaaccccggcaccgagttcggcctgaagctgatcctggacatcggccaggaggactacgtgcccttcctggccagcaccgccggcgtgagactgatgctgcacgagcagagaagctaccccttcatcagagacgagggcatctacgccatgagcggcaccgagaccagcatcggcgtgctggtggacaagctgcagagaatgggcgagccctacagcccctgcaccgtgaacggcagcgaggtgcccgtgcagaacttctacagcgactacaacaccacctacagcatccaggcctgcctgagaagctgcttccaggaccacatgatcagaaactgcaactgcggccactacctgtaccccctgcccagaggcgagaagtactgcaacaacagagacttccccgactgggcccactgctacagcgacctgcagatgagcgtggcccagagagagacctgcatcggcatgtgcaaggagagctgcaacgacacccagtacaagatgaccatcagcatggccgactggcccagcgaggccagcgaggactggatcttccacgtgctgagccaggagagagaccagagcaccaacatcaccctgagcagaaagggcatcgtgaagctgaacatctacttccaggagttcaactacagaaccatcgaggagagcgccgccaacaacatcgtgtggctgctgagcaacctgggcggccagttcggcttctggatgggcggcagcgtgctgtgcctgatcgagttcggcgagatcatcatcgacttcgtgtggatcaccatcatcaagctggtggccctggccaagagcctgagacagagaagagcccaggccagctacgccggccccccccccaccgtggccgagctggtggaggcccacaccaacttcggcttccagcccgacaccgcccccagaagccccaacaccggcccctaccccagcgagcaggccctgcccatccccggcacccccccccccaactacgacagcctgagactgcagcccctggacgtgatcgagagcgacagcgagggcgacgccatctag

SEQ ID NO: 99268 - DNA, 1923 bp, synthetic construct
  misc_feature 1..1923: note = Description of Artificial Sequence: Synthetic coding sequence
  source 1..1923: mol_type = other DNA
atgcacgtgaagaagtacctgctgaagggcctgcacagactgcagaagggccccggctacacctacaaggagctgctggtgtggtactgcgacaacaccaacacccacggccccaagagaatcatctgcgagggccccaagaagaaggccatgtggttcctgctgaccctgctgttcgccgccctggtgtgctggcagtggggcatcttcatcagaacctacctgagctgggaggtgagcgtgagcctgagcgtgggcttcaagaccatggacttccccgccgtgaccatctgcaacgccagccccttcaagtacagcaagatcaagcacctgctgaaggacctggacgagctgatggaggccgtgctggagagaatcctggcccccgagctgagccacgccaacgccaccagaaacctgaacttcagcatctggaaccacacccccctggtgctgatcgacgagagaaacccccaccaccccatggtgctggacctgttcggcgacaaccacaacggcctgaccagcagcagcgccagcgagaagatctgcaacgcccacggctgcaagatggccatgagactgtgcagcctgaacagaacccagtgcaccttcagaaacttcaccagcgccacccaggccctgaccgagtggtacatcctgcaggccaccaacatcttcgcccaggtgccccagcaggagctggtggagatgagctaccccggcgagcagatgatcctggcctgcctgttcggcgccgagccctgcaactacagaaacttcaccagcatcttctacccccactacggcaactgctacatcttcaactggggcatgaccgagaaggccctgcccagcgccaaccccggcaccgagttcggcctgaagctgatcctggacatcggccaggaggactacgtgcccttcctggccagcaccgccggcgtgagactgatgctgcacgagcagagaagctaccccttcatcagagacgagggcatctacgccatgagcggcaccgagaccagcatcggcgtgctggtggacaagctgcagagaatgggcgagccctacagcccctgcaccgtgaacggcagcgaggtgcccgtgcagaacttctacagcgactacaacaccacctacagcatccaggcctgcctgagaagctgcttccaggaccacatgatcagaaactgcaactgcggccactacctgtaccccctgcccagaggcgagaagtactgcaacaacagagacttccccgactgggcccactgctacagcgacctgcagatgagcgtggcccagagagagacctgcatcggcatgtgcaaggagagctgcaacgacacccagtacaagatgaccatcagcatggccgactggcccagcgaggccagcgaggactggatcttccacgtgctgagccaggagagagaccagagcaccaacatcaccctgagcagaaagggcatcgtgaagctgaacatctacttccaggagttcaactacagaaccatcgaggagagcgccgccaacaacatcgtgtggctgctgagcaacctgggcggccagttcggcttctggatgggcggcagcgtgctgtgcctgatcgagttcggcgagatcatcatcgacttcgtgtggatcaccatcatcaagctggtggccctggccaagagcctgagacagagaagagcccaggccagctacgccggccccccccccaccgtggccgagctggtggaggcccacaccaacttcggcttccagcccgacaccgcccccagaagccccaacaccggcccctaccccagcgagcaggccctgcccatccccggcacccccccccccaactacgacagcctgagactgcagcccctggacgtgatcgagagcgacagcgagggcgacgccatctag

SEQ ID NO: 99269 - DNA, 2115 bp, synthetic construct
  misc_feature 1..2115: note = Description of Artificial Sequence: Synthetic coding sequence
  source 1..2115: mol_type = other DNA
atggccttcctgagcagaaccagccccgtggccgccgccagcttccagagcagacaggaggccagaggcagcatcctgctgcagagctgccagctgcccccccagtggctgagcaccgaggcctggaccggcgagtggaagcagccccacggcggcgccctgaccagcagaagccccggccccgtggccccccagagaccctgccacctgaagggctggcagcacagacccacccagcacaacgccgcctgcaagcagggccaggccgccgcccagaccccccccagacccggcccccccagcgcccccccccccccccccaaggagggccaccaggagggcctggtggagctgcccgccagcttcagagagctgctgaccttcttctgcaccaacgccaccatccacggcgccatcagactggtgtgcagcagaggcaacagactgaagaccaccagctggggcctgctgagcctgggcgccctggtggccctgtgctggcagctgggcctgctgttcgagagacactggcacagacccgtgctgatggccgtgagcgtgcacagcgagagaaagctgctgcccctggtgaccctgtgcgacggcaaccccagaagacccagccccgtgctgagacacctggagctgctggacgagttcgccagagagaacatcgacagcctgtacaacgtgaacctgagcaagggcagagccgccctgagcgccaccgtgcccagacacgagccccccttccacctggacagagagatcagactgcagagactgagccacagcggcagcagagtgagagtgggcttcagactgtgcaacagcaccggcggcgactgcttctacagaggctacaccagcggcgtggccgccgtgcaggactggtaccacttccactacgtggacatcctggccctgctgcccgccgcctgggaggacagccacggcagccaggacggccacttcgtgctgagctgcagctacgacggcctggactgccaggccagacagttcagaaccttccaccaccccacctacggcagctgctacaccgtggacggcgtgtggaccgcccagagacccggcatcacccacggcgtgggcctggtgctgagagtggagcagcagccccacctgcccctgctgagcaccctggccggcatcagagtgatggtgcacggcagaaaccacacccccttcctgggccaccacagcttcagcgtgagacccggcaccgaggccaccatcagcatcagagaggacgaggtgcacagactgggcagcccctacggccactgcaccgccggcggcgagggcgtggaggtggagctgctgcacaacaccagctacaccagacaggcctgcctggtgagctgcttccagcagctgatggtggagacctgcagctgcggctactacctgcaccccctgcccgccggcgccgagtactgcagcagcgccagacaccccgcctggggccactgcttctacagactgtaccaggacctggagacccacagactgccctgcaccagcagatgccccagaccctgcagagagagcgccttcaagctgagcaccggcaccagcagatggcccagcgccaagagcgccggctggaccctggccaccctgggcgagcagggcctgccccaccagagccacagacagagaagcagcctggccaagatcaacatcgtgtaccaggagctgaactacagaagcgtggaggaggcccccgtgtacagcgtgccccagctgctgagcgccatgggcagcctgtgcagcctgtggttcggcgccagcgtgctgagcctgctggagctgctggagctgctgctggacgccagcgccctgaccctggtgctgggcggcagaagactgagaagagcctggttcagctggcccagagccagccccgccagcggcgccagcagcatcaagcccgaggccagccagatgcccccccccgccggcggcaccagcgacgaccccgagcccagcggcccccacctgcccagagtgatgctgcccggcgtgctggccggcgtgagcgccgaggagagctgggccggcccccagcccctggagaccctggacacctag

SEQ ID NO: 99270 - DNA, 1917 bp, synthetic construct
  misc_feature 1..1917: note = Description of Artificial Sequence: Synthetic coding sequence
  source 1..1917: mol_type = other DNA
atggccgagcacagaagcatggacggcagaatggaggccgccaccagaggcggcagccacctgcaggccgccgcccagaccccccccagacccggcccccccagcgcccccccccccccccccaaggagggccaccaggagggcctggtggagctgcccgccagcttcagagagctgctgaccttcttctgcaccaacgccaccatccacggcgccatcagactggtgtgcagcagaggcaacagactgaagaccaccagctggggcctgctgagcctgggcgccctggtggccctgtgctggcagctgggcctgctgttcgagagacactggcacagacccgtgctgatggccgtgagcgtgcacagcgagagaaagctgctgcccctggtgaccctgtgcgacggcaaccccagaagacccagccccgtgctgagacacctggagctgctggacgagttcgccagagagaacatcgacagcctgtacaacgtgaacctgagcaagggcagagccgccctgagcgccaccgtgcccagacacgagccccccttccacctggacagagagatcagactgcagagactgagccacagcggcagcagagtgagagtgggcttcagactgtgcaacagcaccggcggcgactgcttctacagaggctacaccagcggcgtggccgccgtgcaggactggtaccacttccactacgtggacatcctggccctgctgcccgccgcctgggaggacagccacggcagccaggacggccacttcgtgctgagctgcagctacgacggcctggactgccaggccagacagttcagaaccttccaccaccccacctacggcagctgctacaccgtggacggcgtgtggaccgcccagagacccggcatcacccacggcgtgggcctggtgctgagagtggagcagcagccccacctgcccctgctgagcaccctggccggcatcagagtgatggtgcacggcagaaaccacacccccttcctgggccaccacagcttcagcgtgagacccggcaccgaggccaccatcagcatcagagaggacgaggtgcacagactgggcagcccctacggccactgcaccgccggcggcgagggcgtggaggtggagctgctgcacaacaccagctacaccagacaggcctgcctggtgagctgcttccagcagctgatggtggagacctgcagctgcggctactacctgcaccccctgcccgccggcgccgagtactgcagcagcgccagacaccccgcctggggccactgcttctacagactgtaccaggacctggagacccacagactgccctgcaccagcagatgccccagaccctgcagagagagcgccttcaagctgagcaccggcaccagcagatggcccagcgccaagagcgccggctggaccctggccaccctgggcgagcagggcctgccccaccagagccacagacagagaagcagcctggccaagatcaacatcgtgtaccaggagctgaactacagaagcgtggaggaggcccccgtgtacagcgtgccccagctgctgagcgccatgggcagcctgtgcagcctgtggttcggcgccagcgtgctgagcctgctggagctgctggagctgctgctggacgccagcgccctgaccctggtgctgggcggcagaagactgagaagagcctggttcagctggcccagagccagccccgccagcggcgccagcagcatcaagcccgaggccagccagatgcccccccccgccggcggcaccagcgacgaccccgagcccagcggcccccacctgcccagagtgatgctgcccggcgtgctggccggcgtgagcgccgaggagagctgggccggcccccagcccctggagaccctggacacctag

SEQ ID NO: 99271 - DNA, 927 bp, synthetic construct
  misc_feature 1..927: note = Description of Artificial Sequence: Synthetic coding sequence
  source 1..927: mol_type = other DNA
tgagccaccgccagagccgccaccgccttcaccgaggccaccagacaggcctggagactgagcagaaccggcaccaccagcaccatgtggatcagctggccctgctgccccagacacggcagaaccgccaccggcgccagaaccgccaccagcagcagccccgccgtgaccatggcctggaccgccagacccgacagcagcggccccagcaccaccccccccaccgccgccgccaccagaagcatggccagcggccagctgagcgcccccgccagccccaccgtgggcgccagcccctggcccgtgagaggccagggctgcagaagcggcggcctgacccccgccctgggcctgcccggcgtgggcctggtgctgagagtggagcagcagccccacctgcccctgctgagcaccctggccggcatcagagtgatggtgcacggcagaaaccacacccccttcctgggccaccacagcttcagcgtgagacccggcaccgaggccaccatcagcatcagagaggacgaggtgcacagactgggcagcccctacggccactgcaccgccggcggcgagggcgtggaggtggagctgctgcacaacaccagctacaccagacaggcctgcctggtgagctgcttccagcagctgatggtggagacctgcagctgcggctactacctgcaccccctgcccgccggcgccgagtactgcagcagcgccagacaccccgcctggggccactgcttctacagactgtaccaggacctggagacccacagactgccctgcaccagcagatgccccagaccctgcagagagagcgccttcaagctgagcaccggcaccagcagatggcccagcgccaagagcgccggctggaccctggccaccctgggcgagcagggcctgccccaccagagctag

SEQ ID NO: 99272 - DNA, 2010 bp, synthetic construct
  misc_feature 1..2010: note = Description of Artificial Sequence: Synthetic coding sequence
  source 1..2010: mol_type = other DNA
atggccgagcacagaagcatggacggcagaatggaggccgccaccagaggcggcagccacctgcagatcgcctgggcctgcggcagccccgaggccctgccccccgagggcatggccgcccagacccacagcgcccagagatgcctgcagaccggccccggctgcagccccgacgccccccagcccggcccccccagcgcccccccccccccccccaaggagggccaccaggagggcctggtggagctgcccgccagcttcagagagctgctgaccttcttctgcaccaacgccaccatccacggcgccatcagactggtgtgcagcagaggcaacagactgaagaccaccagctggggcctgctgagcctgggcgccctggtggccctgtgctggcagctgggcctgctgttcgagagacactggcacagacccgtgctgatggccgtgagcgtgcacagcgagagaaagctgctgcccctggtgaccctgtgcgacggcaaccccagaagacccagccccgtgctgagacacctggagctgctggacgagttcgccagagagaacatcgacagcctgtacaacgtgaacctgagcaagggcagagccgccctgagcgccaccgtgcccagacacgagccccccttccacctggacagagagatcagactgcagagactgagccacagcggcagcagagtgagagtgggcttcagactgtgcaacagcaccggcggcgactgcttctacagaggctacaccagcggcgtggccgccgtgcaggactggtaccacttccactacgtggacatcctggccctgctgcccgccgcctgggaggacagccacggcagccaggacggccacttcgtgctgagctgcagctacgacggcctggactgccaggccagacagttcagaaccttccaccaccccacctacggcagctgctacaccgtggacggcgtgtggaccgcccagagacccggcatcacccacggcgtgggcctggtgctgagagtggagcagcagccccacctgcccctgctgagcaccctggccggcatcagagtgatggtgcacggcagaaaccacacccccttcctgggccaccacagcttcagcgtgagacccggcaccgaggccaccatcagcatcagagaggacgaggtgcacagactgggcagcccctacggccactgcaccgccggcggcgagggcgtggaggtggagctgctgcacaacaccagctacaccagacaggcctgcctggtgagctgcttccagcagctgatggtggagacctgcagctgcggctactacctgcaccccctgcccgccggcgccgagtactgcagcagcgccagacaccccgcctggggccactgcttctacagactgtaccaggacctggagacccacagactgccctgcaccagcagatgccccagaccctgcagagagagcgccttcaagctgagcaccggcaccagcagatggcccagcgccaagagcgccggctggaccctggccaccctgggcgagcagggcctgccccaccagagccacagacagagaagcagcctggccaagatcaacatcgtgtaccaggagctgaactacagaagcgtggaggaggcccccgtgtacagcgtgccccagctgctgagcgccatgggcagcctgtgcagcctgtggttcggcgccagcgtgctgagcctgctggagctgctggagctgctgctggacgccagcgccctgaccctggtgctgggcggcagaagactgagaagagcctggttcagctggcccagagccagccccgccagcggcgccagcagcatcaagcccgaggccagccagatgcccccccccgccggcggcaccagcgacgaccccgagcccagcggcccccacctgcccagagtgatgctgcccggcgtgctggccggcgtgagcgccgaggagagctgggccggcccccagcccctggagaccctggacacctag

SEQ ID NO: 99273 - DNA, 2409 bp, synthetic construct
  misc_feature 1..2409: note = Description of Artificial Sequence: Synthetic coding sequence
  source 1..2409: mol_type = other DNA
atgagagccgtgctgagccagaagaccacccccctgcccagatacctgtggcccggccacctgagcggccccagaagactgacctggagctggtgcagcgaccacagaacccccacctgcagagagctgggcagcccccaccccaccccctgcaccggccccgccagaggctggcccagaagaggcggcggcccctgcggcttcaccagcgccggccacgtgctgtgcggctaccccctgtgcctgctgagcggccccatccagggctgcggcaccggcctgggcgacagcagcatggccttcctgagcagaaccagccccgtggccgccgccagcttccagagcagacaggaggccagaggcagcatcctgctgcagagctgccagctgcccccccagtggctgagcaccgaggcctggaccggcgagtggaagcagccccacggcggcgccctgaccagcagaagccccggccccgtggccccccagagaccctgccacctgaagggctggcagcacagacccacccagcacaacgccgcctgcaagcagggccaggccgccgcccagaccccccccagacccggcccccccagcgcccccccccccccccccaaggagggccaccaggagggcctggtggagctgcccgccagcttcagagagctgctgaccttcttctgcaccaacgccaccatccacggcgccatcagactggtgtgcagcagaggcaacagactgaagaccaccagctggggcctgctgagcctgggcgccctggtggccctgtgctggcagctgggcctgctgttcgagagacactggcacagacccgtgctgatggccgtgagcgtgcacagcgagagaaagctgctgcccctggtgaccctgtgcgacggcaaccccagaagacccagccccgtgctgagacacctggagctgctggacgagttcgccagagagaacatcgacagcctgtacaacgtgaacctgagcaagggcagagccgccctgagcgccaccgtgcccagacacgagccccccttccacctggacagagagatcagactgcagagactgagccacagcggcagcagagtgagagtgggcttcagactgtgcaacagcaccggcggcgactgcttctacagaggctacaccagcggcgtggccgccgtgcaggactggtaccacttccactacgtggacatcctggccctgctgcccgccgcctgggaggacagccacggcagccaggacggccacttcgtgctgagctgcagctacgacggcctggactgccaggccagacagttcagaaccttccaccaccccacctacggcagctgctacaccgtggacggcgtgtggaccgcccagagacccggcatcacccacggcgtgggcctggtgctgagagtggagcagcagccccacctgcccctgctgagcaccctggccggcatcagagtgatggtgcacggcagaaaccacacccccttcctgggccaccacagcttcagcgtgagacccggcaccgaggccaccatcagcatcagagaggacgaggtgcacagactgggcagcccctacggccactgcaccgccggcggcgagggcgtggaggtggagctgctgcacaacaccagctacaccagacaggcctgcctggtgagctgcttccagcagctgatggtggagacctgcagctgcggctactacctgcaccccctgcccgccggcgccgagtactgcagcagcgccagacaccccgcctggggccactgcttctacagactgtaccaggacctggagacccacagactgccctgcaccagcagatgccccagaccctgcagagagagcgccttcaagctgagcaccggcaccagcagatggcccagcgccaagagcgccggctggaccctggccaccctgggcgagcagggcctgccccaccagagccacagacagagaagcagcctggccaagatcaacatcgtgtaccaggagctgaactacagaagcgtggaggaggcccccgtgtacagcgtgccccagctgctgagcgccatgggcagcctgtgcagcctgtggttcggcgccagcgtgctgagcctgctggagctgctggagctgctgctggacgccagcgccctgaccctggtgctgggcggcagaagactgagaagagcctggttcagctggcccagagccagccccgccagcggcgccagcagcatcaagcccgaggccagccagatgcccccccccgccggcggcaccagcgacgaccccgagcccagcggcccccacctgcccagagtgatgctgcccggcgtgctggccggcgtgagcgccgaggagagctgggccggcccccagcccctggagaccctggacacctag

SEQ ID NO: 99274 - DNA, 1917 bp, synthetic construct; identical to SEQ ID NO: 99270
  misc_feature 1..1917: note = Description of Artificial Sequence: Synthetic coding sequence
  source 1..1917: mol_type = other DNA

SEQ ID NO: 99275 - DNA, 1950 bp, synthetic construct
  misc_feature 1..1950: note = Description of Artificial Sequence: Synthetic coding sequence
  source 1..1950: mol_type = other DNA
atggcccccggcgagaagatcaaggccaagatcaagaagaacctgcccgtgaccggcccccaggcccccaccatcaaggagctgatgagatggtactgcctgaacaccaacacccacggctgcagaagaatcgtggtgagcagaggcagactgagaagactgctgtggatcggcttcaccctgaccgccgtggccctgatcctgtggcagtgcgccctgctggtgttcagcttctacaccgtgagcgtgagcatcaaggtgcacttcagaaagctggacttccccgccgtgaccatctgcaacatcaacccctacaagtacagcaccgtgagacacctgctggccgacctggagcaggagaccagagaggccctgaagagcctgtacggcttccccgagagcagaaagagaagagaggccgagagctggaacagcgtgagcgagggcaagcagcccagattcagccacagaatccccctgctgatcttcgaccaggacgagaagggcaaggccagagacttcttcaccggcagaaagagaaaggtgggcggcagcatcatccacaaggccagcaacgtgatgcacatcgagagcaagcaggtggtgggcttccagctgtgcagcaacgacaccagcgactgcgccacctacaccttcagcagcggcatcaacgccatccaggagtggtacaagctgcactacatgaacatcatggcccaggtgcccctggagaagaagatcaacatgagctacagcgccgaggagctgctggtgacctgcttcttcgacggcgtgagctgcgacgccagaaacttcaccctgttccaccaccccatgcacggcaactgctacaccttcaacaacagagagaacgagaccatcctgagcaccagcatgggcggcagcgagtacggcctgcaggtgatcctgtacatcaacgaggaggagtacaaccccttcctggtgagcagcaccggcgccaaggtgatcatccacagacaggacgagtaccccttcgtggaggacgtgggcaccgagatcgagaccgccatggtgaccagcatcggcatgcacctgaccgagagcttcaagctgagcgagccctacagccagtgcaccgaggacggcagcgacgtgcccatcagaaacatctacaacgccgcctacagcctgcagatctgcctgcacagctgcttccagaccaagatggtggagaagtgcggctgcgcccagtacagccagcccctgccccccgccgccaactactgcaactaccagcagcaccccaactggatgtactgctactaccagctgcacagagccttcgtgcaggaggagctgggctgccagagcgtgtgcaaggaggcctgcagcttcaaggagtggaccctgaccaccagcctggcccagtggcccagcgtggtgagcgagaagtggctgctgcccgtgctgacctgggaccagggcagacaggtgaacaagaagctgaacaagaccgacctggccaagctgctgatcttctacaaggacctgaaccagagaagcatcatggagagccccgccaacagcatcgagatgctgctgagcaacttcggcggccagctgggcctgtggatgagctgcagcgtggtgtgcgtgatcgagatcatcgaggtgttcttcatcgacttcttcagcatcatcgccagaagacagtggcagaaggccaaggagtggtgggcctggaagcaggcccccccctgccccgaggcccccagaagcccccagggccaggacaaccccgccctggacatcgacgacgacctgcccaccttcaacagcgccctgcacctgccccccgccctgggcacccaggtgcccggcacccccccccccaagtacaacaccctgagactggagagagccttcagcaaccagctgaccgacacccagatgctggacgagctgtag

SEQ ID NO: 99276 - DNA, 5943 bp, synthetic construct
  misc_feature 1..5943: note = Description of Artificial Sequence: Synthetic coding sequence
  source 1..5943: mol_type = other DNA
atggccgccagactgctggccccccccggccccgacagcttcaagcccttcacccccgagagcctggccaacatcgagagaagaatcgccgagagcaagctgaagaagccccccaaggccgacggcagccacagagaggacgacgaggacagcaagcccaagcccaacagcgacctggaggccggcaagagcctgcccttcatctacggcgacatcccccagggcctggtggccgtgcccctggaggacttcgacccctactacctgacccagaagaccttcgtggtgctgaacagaggcaagaccctgttcagattcagcgccacccccgccctgtacatcctgagccccttcaacctgatcagaagaatcgccatcaagatcctgatccacagcgtgttcagcatgatcatcatgtgcaccatcctgaccaactgcgtgttcatgaccttcagcaacccccccgactggagcaagaacgtggagtacaccttcaccggcatctacaccttcgagagcctggtgaagatcatcgccagaggcttctgcatcgacggcttcaccttcctgagagacccctggaactggctggacttcagcgtgatcatgatggcctacatcaccgagttcgtgaacctgggcaacgtgagcgccctgagaaccttcagagtgctgagagccctgaagaccatcagcgtgatccccggcctgaagaccatcgtgggcgccctgatccagagcgtgaagaagctgagcgacgtgatgatcctgaccgtgttctgcctgagcgtgttcgccctgatcggcctgcagctgttcatgggcaacctgagaaacaagtgcgtggtgtggcccatcaacttcaacgagagctacctggagaacggcaccaagggcttcgactgggaggagtacatcaacaacaagaccaacttctacaccgtgcccggcatgctggagcccctgctgtgcggcaacagcagcgacgccggccagtgccccgagggctaccagtgcatgaaggccggcagaaaccccaactacggctacaccagcttcgacaccttcagctgggccttcctggccctgttcagactgatgacccaggactactgggagaacctgtaccagctgaccctgagagccgccggcaagacctacatgatcttcttcgtgctggtgatcttcgtgggcagcttctacctggtgaacctgatcctggccgtggtggccatggcctacgaggagcagaaccaggccaccctggaggaggccgagcagaaggaggccgagttcaaggccatgctggagcagctgaagaagcagcaggaggaggcccaggccgccgccatggccaccagcgccggcaccgtgagcgaggacgccatcgaggaggagggcgaggagggcggcggcagccccagaagcagcagcgagatcagcaagctgagcagcaagagcgccaaggagagaagaaacagaagaaagaagagaaagcagaaggagctgagcgagggcgaggagaagggcgaccccgagaaggtgttcaagagcgagagcgaggacggcatgagaagaaaggccttcagactgcccgacaacagaatcggcagaaagttcagcatcatgaaccagagcctgctgagcatccccggcagccccttcctgagcagacacaacagcaagagcagcatcttcagcttcagaggccccggcagattcagagaccccggcagcgagaacgagttcgccgacgacgagcacagcaccgtggaggagagcgagggcagaagagacagcctgttcatccccatcagagccagagagagaagaagcagctacagcggctacagcggctacagccagggcagcagaagcagcagaatcttccccagcctgagaagaagcgtgaagagaaacagcaccgtggactgcaacggcgtggtgagcctgatcggcggccccggcagccacatcggcggcagactgctgcccgaggccaccaccgaggtggagatcaagaagaagggccccggcagcctgctggtgagcatggaccagctggccagctacggcagaaaggacagaatcaacagcatcatgagcgtggtgaccaacaccctggtggaggagctggaggagagccagagaaagtgccccccctgctggtacaagttcgccaacaccttcctgatctgggagtgccacccctactggatcaagctgaaggagatcgtgaacctgatcgtgatggaccccttcgtggacctggccatcaccatctgcatcgtgctgaacaccctgttcatggccatggagcaccaccccatgaccccccagttcgagcacgtgctggccgtgggcaacctggtgttcaccggcatcttcaccgccgagatgttcctgaagctgatcgccatggacccctactactacttccaggagggctggaacatcttcgacggcttcatcgtgagcctgagcctgatggagctgagcctggccgacgtggagggcctgagcgtgctgagaagcttcagactgctgagagtgttcaagctggccaagagctggcccaccctgaacatgctgatcaagatcatcggcaacagcgtgggcgccctgggcaacctgaccctggtgctggccatcatcgtgttcatcttcgccgtggtgggcatgcagctgttcggcaagagctacaaggagtgcgtgtgcaagatcaaccaggactgcgagctgcccagatggcacatgcacgacttcttccacagcttcctgatcgtgttcagagtgctgtgcggcgagtggatcgagaccatgtgggactgcatggaggtggccggccaggccatgtgcctgatcgtgttcatgatggtgatggtgatcggcaacctggtggtgctgaacctgttcctggccctgctgctgagcagcttcagcgccgacaacctggccgccaccgacgacgacggcgagatgaacaacctgcagatcagcgtgatcagaatcaagaagggcgtggcctggaccaagctgaaggtgcacgccttcatgcaggcccacttcaagcagagagaggccgacgaggtgaagcccctggacgagctgtacgagaagaaggccaactgcatcgccaaccacaccggcgccgacatccacagaaacggcgacttccagaagaacggcaacggcaccaccagcggcatcggcagcagcgtggagaagtacatcatcgacgaggaccacatgagcttcatcaacaaccccaacctgaccgtgagagtgcccatcgccgtgggcgagagcgacttcgagaacctgaacaccgaggacgtgagcagcgagagcgaccccgagggcagcaaggacaagctggacgacaccagcagcagcgagggcagcaccatcgacatcaagcccgaggtggaggaggtgcccgtggagcagcccgaggagtacctggaccccgacgcctgcttcaccgagggctgcgtgcagagattcaagtgctgccaggtgaacatcgaggagggcctgggcaagagctggtggatcctgagaaagacctgcttcctgatcgtggagcacaactggttcgagaccttcatcatcttcatgatcctgctgagcagcggcgccctggccttcgaggacatctacatcgagcagagaaagaccatcagaaccatcctggagtacgccgacaaggtgttcacctacatcttcatcctggagatgctgctgaagtggaccgcctacggcttcgtgaagttcttcaccaacgcctggtgctggctggacttcctgatcgtggccgtgagcctggtgagcctgatcgccaacgccctgggctacagcgagctgggcgccatcaagagcctgagaaccctgagagccctgagacccctgagagccctgagcagattcgagggcatgagagtggtggtgaacgccctggtgggcgccatccccagcatcatgaacgtgctgctggtgtgcctgatcttctggctgatcttcagcatcatgggcgtgaacctgttcgccggcaagtaccactactgcttcaacgagaccagcgagatcagattcgagatcgaggacgtgaacaacaagaccgagtgcgagaagctgatggagggcaacaacaccgagatcagatggaagaacgtgaagatcaacttcgacaacgtgggcgccggctacctggccctgctgcaggtggccaccttcaagggctggatggacatcatgtacgccgccgtggacagcagaaagcccgacgagcagcccaagtacgaggacaacatctacatgtacatctacttcgtgatcttcatcatcttcggcagcttcttcaccctgaacctgttcatcggcgtgatcatcgacaacttcaaccagcagaagaagaagttcggcggccaggacatcttcatgaccgaggagcagaagaagtactacaacgccatgaagaagctgggcagcaagaagccccagaagcccatccccagacccctgaacaagatccagggcatcgtgttcgacttcgtgacccagcaggccttcgacatcgtgatcatgatgctgatctgcctgaacatggtgaccatgatggtggagaccgacacccagagcaagcagatggagaacatcctgtactggatcaacctggtgttcgtgatcttcttcacctgcgagtgcgtgctgaagatgttcgccctgagacactactacttcaccatcggctggaacatcttcgacttcgtggtggtgatcctgagcatcgtgggcatgttcctggccgacatcatcgagaagtacttcgtgagccccaccctgttcagagtgatcagactggccagaatcggcagaatcctgagactgatcaagggcgccaagggcatcagaaccctgctgttcgccctgatgatgagcctgcccgccctgttcaacatcggcctgctgctgttcctggtgatgttcatcttcagcatcttcggcatgagcaacttcgcctacgtgaagcacgaggccggcatcgacgacatgttcaacttcgagaccttcggcaacagcatgatctgcctgttccagatcaccaccagcgccggctgggacggcctgctgctgcccatcctgaacagaccccccgactgcagcctggacaaggagcaccccggcagcggcttcaagggcgactgcggcaaccccagcgtgggcatcttcttcttcgtgagctacatcatcatcagcttcctgatcgtggtgaacatgtacatcgccatcatcctggagaacttcagcgtggccaccgaggagagcgccgaccccctgagcgaggacgacttcgagaccttctacgagatctgggagaagttcgaccccgacgccacccagttcatcgagtactgcaagctggccgacttcgccgacgccctggagcaccccctgagagtgcccaagcccaacaccatcgagctgatcgccatggacctgcccatggtgagcggcgacagaatccactgcctggacatcctgttcgccttcaccaagagagtgctgggcgacagcggcgagctggacatcctgagacagcagatggaggagagattcgtggccagcaaccccagcaaggtgagctacgagcccatcaccaccaccctgagaagaaagcaggaggaggtgagcgccgtggtgctgcagagagcctacagaggccacctggccagaagaggcttcatctgcaagaagaccaccagcaacaagctggagaacggcggcacccacagagagaagaaggagagcacccccagcaccgccagcctgcccagctacgacagcgtgaccaagcccgagaaggagaagcagcagagagccgaggagggcagaagagagagagccaagagacagaaggaggtgagagagagcaagtgctag

SEQ ID NO: 99277 - DNA, 4674 bp, synthetic construct
  misc_feature 1..4674: note = Description of Artificial Sequence: Synthetic coding sequence
  source 1..4674: mol_type = other DNA
atggccgccagactgctggccccccccggccccgacagcttcaagcccttcacccccgagagcctggccaacatcgagagaagaatcgccgagagcaagctgaagaagccccccaaggccgacggcagccacagagaggacgacgaggacagcaagcccaagcccaacagcgacctggaggccggcaagagcctgcccttcatctacggcgacatcccccagggcctggtggccgtgcccctggaggacttcgacccctactacctgacccagaagaccttcgtggtgctgaacagaggcaagaccctgttcagattcagcgccacccccgccctgtacatcctgagccccttcaacctgatcagaagaatcgccatcaagatcctgatccacagcgtgttcagcatgatcatcatgtgcaccatcctgaccaactgcgtgttcatgaccttcagcaacccccccgactggagcaagaacgtggagtacaccttcaccggcatctacaccttcgagagcctggtgaagatcatcgccagaggcttctgcatcgacggcttcaccttcctgagagacccctggaactggctggacttcagcgtgatcatgatggcctacatcaccgagttcgtgaacctgggcaacgtgagcgccctgagaaccttcagagtgctgagagccctgaagaccatcagcgtgatccccggcctgaagaccatcgtgggcgccctgatccagagcgtgaagaagctgagcgacgtgatgatcctgaccgtgttctgcctgagcgtgttcgccctgatcggcctgcagctgttcatgggcaacctgagaaacaagtgcgtggtgtggcccatcaacttcaacgagagctacctggagaacggcaccaagggcttcgactgggaggagtacatcaacaacaagaccaacttctacaccgtgcccggcatgctggagcccctgctgtgcggcaacagcagcgacgccggccagtgccccgagggctaccagtgcatgaaggccggcagaaaccccaactacggctacaccagcttcgacaccttcagctgggccttcctggccctgttcagactgatgacccaggactactgggagaacctgtaccagctgaccctgagagccgccggcaagacctacatgatcttcttcgtgctggtgatcttcgtgggcagcttctacctggtgaacctgatcctggccgtggtggccatggcctacgaggagcagaaccaggccaccctggaggaggccgagcagaaggaggccgagttcaaggccatgctggagcagctgaagaagcagcaggaggaggcccaggccgccgccatggccaccagcgccggcaccgtgagcgaggacgccatcgaggaggagggcgaggagggcggcggcagccccagaagcagcagcgagatcagcaagctgagcagcaagagcgccaaggagagaagaaacagaagaaagaagagaaagcagaaggagctgagcgagggcgaggagaagggcgaccccgagaaggtgttcaagagcgagagcgaggacggcatgagaagaaaggccttcagactgcccgacaacagaatcggcagaaagttcagcatcatgaaccagagcctgctgagcatccccggcagccccttcctgagcagacacaacagcaagagcagcatcttcagcttcagaggccccggcagattcagagaccccggcagcgagaacgagttcgccgacgacgagcacagcaccgtggaggagagcgagggcagaagagacagcctgttcatccccatcagagccagagagagaagaagcagctacagcggctacagcggctacagccagggcagcagaagcagcagaatcttccccagcctgagaagaagcgtgaagagaaacagcaccgtggactgcaacggcgtggtgagcctgatcggcggccccggcagccacatcggcggcagactgctgcccgaggccaccaccgaggtggagatcaagaagaagggccccggcagcctgctggtgagcatggaccagctggccagctacggcagaaaggacagaatcaacagcatcatgagcgtggtgaccaacaccctggtggaggagctggaggagagccagagaaagtgccccccctgctggtacaagttcgccaacaccttcctgatctgggagtgccacccctactggatcaagctgaaggagatcgtgaacctgatcgtgatggaccccttcgtggacctggccatcaccatctgcatcgtgctgaacaccctgttcatggccatggagcaccaccccatgaccccccagttcgagcacgtgctggccgtgggcaacctggtgttcaccggcatcttcaccgccgagatgttcctgaagctgatcgccatggacccctactactacttccaggagggctggaacatcttcgacggcttcatcgtgagcctgagcctgatggagctgagcctggccgacgtggagggcctgagcgtgctgagaagcttcagactgctgagagtgttcaagctggccaagagctggcccaccctgaacatgctgatcaagatcatcggcaacagcgtgggcgccctgggcaacctgaccctggtgctggccatcatcgtgttcatcttcgccgtggtgggcatgcagctgttcggcaagagctacaaggagtgcgtgtgcaagatcaaccaggactgcgagctgcccagatggcacatgcacgacttcttccacagcttcctgatcgtgttcagagtgctgtgcggcgagtggatcgagaccatgtgggactgcatggaggtggccggccaggccatgtgcctgatcgtgttcatgatggtgatggtgatcggcaacctggtggtgctgaacctgttcctggccctgctgctgagcagcttcagcgccgacaacctggccgccaccgacgacgacggcgagatgaacaacctgcagatcagcgtgatcagaatcaagaagggcgtggcctggaccaagctgaaggtgcacgccttcatgcaggcccacttcaagcagagagaggccgacgaggtgaagcccctggacgagctgtacgagaagaaggccaactgcatcgccaaccacaccggcgccgacatccacagaaacggcgacttccagaagaacggcaacggcaccaccagcggcatcggcagcagcgtggagaagtacatcatcgacgaggaccacatgagcttcatcaacaaccccaacctgaccgtgagagtgcccatcgccgtgggcgagagcgacttcgagaacctgaacaccgaggacgtgagcagcgagagcgaccccgagggcagcaaggacaagctggacgacaccagcagcagcgagggcagcaccatcgacatcaagcccgaggtggaggaggtgcccgtggagcagcccgaggagtacctggaccccgacgcctgcttcaccgagggctgcgtgcagagattcaagtgctgccaggtgaacatcgaggagggcctgggcaagagctggtggatcctgagaaagacctgcttcctgatcgtggagcacaactggttcgagaccttcatcatcttcatgatcctgctgagcagcggcgccctggccttcgaggacatctacatcgagcagagaaagaccatcagaaccatcctggagtacgccgacaaggtgttcacctacatcttcatcctggagatgctgctgaagtggaccgcctacggcttcgtgaagttcttcaccaacgcctggtgctggctggacttcctgatcgtggccgtggtggtgaacgccctggtgggcgccatccccagcatcatgaacgtgctgctggtgtgcctgatcttctggctgatcttcagcatcatgggcgtgaacctgttcgccggcaagtaccactactgcttcaacgagaccagcgagatcagattcgagatcgaggacgtgaacaacaagaccgagtgcgagaagctgatggagggcaacaacaccgagatcagatggaagaacgtgaagatcaacttcgacaacgtgggcgccggctacctggccctgctgcaggtggccaccttcaagggctggatggacatcatgtacgccgccgtggacagcagaaagcccgacgagcagcccaagtacgaggacaacatctacatgtacatctacttcgtgatcttcatcatcttcggcagcttcttcaccctgaacctgttcatcggcgtgatcatcgacaacttcaaccagcagaagaagaagttcggcggccaggacatcttcatgaccgaggagcagaagaagtactacaacgccatgaagaagctgggcagcaagaagccccagaagcccatccccagacccctgaacaagatccagggcatcgtgttcgacttcgtgacccagcaggccttcgacatcgtgatcatgatgctgatctgcctgaacatggtgaccatgatggtggagaccgacacccagagcaagcagatggagaacatcctgtactggatcaacctggtgttcgtgatcttcttcacctgcgagtgcgtgctgaagatgttcgccctgagacactactacttcaccatcggctggaacatcttcgacttcgtggtggtgatcctgagcatcgtgtag

SEQ ID NO: 99278 - DNA, 3588 bp, synthetic construct
  misc_feature 1..3588: note = Description of Artificial Sequence: Synthetic coding sequence
  source 1..3588: mol_type = other DNA
ttcctgagcccccagaccttcgtggtgctgaacagaggcaagaccctgttcagattcagcgccacccccgccctgtacatcctgagccccttcaacctgatcagaagaatcgccatcaagatcctgatccacagcctgttcagcatgatcatcatgtgcaccatcctgaccaactgcgtgttcatgaccttcagcaacccccccgactggagcaagaacgtggagtacaccttcaccggcatctacaccttcgagagcctggtgaagatcatcgccagaggcttctgcatcgacggcttcaccttcctgagagacccctggaactggctggacttcagcgtgatcatgatggcctacatcaccgagttcgtgaacctgggcaacgtgagcgccctgagaaccttcagagtgctgagagccctgaagaccatcagcgtgatccccggcctgaagaccatcgtgggcgccctgatccagagcgtgaagaagctgagcgacgtgatgatcctgaccgtgttctgcctgagcgtgttcgccctgatcggcctgcagctgttcatgggcaacctgagaaacaagtgcgtggtgtggcccatcaacttcaacgagagctacctggagaacggcaccaagggcttcgactgggaggagtacatcaacaacaagaccaacttctacaccgtgcccggcatgctggagcccctgctgtgcggcaacagcagcgacgccggccagtgccccgagggctaccagtgcatgaaggccggcagaaaccccaactacggctacaccagcttcgacaccttcagctgggccttcctggccctgttcagactgatgacccaggactactgggagaacctgtaccagctgaccctgagagccgccggcaagacctacatgatcttcttcgtgctggtgatcttcgtgggcagcttctacctggtgaacctgatcctggccgtggtggccatggcctacgaggagcagaaccaggccaccctggaggaggccgagcagaaggaggccgagttcaaggccatgctggagcagctgaagaagcagcaggaggaggcccaggccgccgccatggccaccagcgccggcaccgtgagcgaggacgccatcgaggaggagggcgaggagggcggcggcagccccagaagcagcagcgagatcagcaagctgagcagcaagagcgccaaggagagaagaaacagaagaaagaagagaaagcagaaggagctgagcgagggcgaggagaagggcgaccccgagaaggtgttcaagagcgagagcgaggacggcatgagaagaaaggccttcagactgcccgacaacagaatcggcagaaagttcagcatcatgaaccagagcctgctgagcatccccggcagccccttcctgagcagacacaacagcaagagcagcatcttcagcttcagaggccccggcagattcagagaccccggcagcgagaacgagttcgccgacgacgagcacagcaccgtggaggagagcgagggcagaagagacagcctgttcatccccatcagagccagagagagaagaagcagctacagcggctacagcggctacagccagggcagcagaagcagcagaatcttccccagcctgagaagaagcgtgaagagaaacagcaccgtggactgcaacggcgtggtgagcctgatcggcggccccggcagccacatcggcggcagactgctgcccgaggccaccaccgaggtggagatcaagaagaagggccccggcagcctgctggtgagcatggaccagctggccagctacggcagaaaggacagaatcaacagcatcatgagcgtggtgaccaacaccctggtggaggagctggaggagagccagagaaagtgccccccctgctggtacaagttcgccaacaccttcctgatctgggagtgccacccctactggatcaagctgaaggagatcgtgaacctgatcgtgatggaccccttcgtggacctggccatcaccatctgcatcgtgctgaacaccctgttcatggccatggagcaccaccccatgaccccccagttcgagcacgtgctggccgtgggcaacctggtgttcaccggcatcttcaccgccgagatgttcctgaagctgatcgccatggacccctactactacttccaggagggctggaacatcttcgacggcttcatcgtgagcctgagcctgatggagctgagcctggccgacgtggagggcctgagcgtgctgagaagcttcagactgctgagagtgttcaagctggccaagagctggcccaccctgaacatgctgatcaagatcatcggcaacagcgtgggcgccctgggcaacctgaccctggtgctggccatcatcgtgttcatcttcgccgtggtgggcatgcagctgttcggcaagagctacaaggagtgcgtgtgcaagatcaaccaggactgcgagctgcccagatggcacatgcacgacttcttccacagcttcctgatcgtgttcagagtgctgtgcggcgagtggatcgagaccatgtgggactgcatggaggtggccggccaggccatgtgcctgatcgtgttcatgatggtgatggtgatcggcaacctggtggtgctgaacctgttcctggccctgctgctgagcagcttcagcgccgacaacctggccgccaccgacgacgacggcgagatgaacaacctgcagatcagcgtgatcagaatcaagaagggcgtggcctggaccaagctgaaggtgcacgccttcatgcaggcccacttcaagcagagagaggccgacgaggtgaagcccctggacgagctgtacgagaagaaggccaactgcatcgccaaccacaccggcgccgacatccacagaaacggcgacttccagaagaacggcaacggcaccaccagcggcatcggcagcagcgtggagaagtacatcatcgacgaggaccacatgagcttcatcaacaaccccaacctgaccgtgagagtgcccatcgccgtgggcgagagcgacttcgagaacctgaacaccgaggacgtgagcagcgagagcgaccccgagggcagcaaggacaagctggacgacaccagcagcagcgagggcagcaccatcgacatcaagcccgaggtggaggaggtgcccgtggagcagcccgaggagtacctggaccccgacgcctgcttcaccgagggctgcgtgcagagattcaagtgctgccaggtgaacatcgaggagggcctgggcaagagctggtggatcctgagaaagacctgcttcctgatcgtggagcacaactggttcgagaccttcatcatcttcatgatcctgctgagcagcggcgccctggccttcgaggacatctacatcgagcagagaaagaccatcagaaccatcctggagtacgccgacaaggtgttcacctacatcttcatcctggagatgctgctgaagtggaccgcctacggcttcgtgaagttcttcaccaacgcctggtgctggctggacttcctgatcgtggccgtgcccctgaacctgagcggcctgatctag

SEQ ID NO: 99279 - DNA, 5820 bp, synthetic construct
  misc_feature 1..5820: note = Description of Artificial Sequence: Synthetic coding sequence
  source 1..5820: mol_type = other DNA
atggccgccagactgctggccccccccggccccgacagcttcaagcccttcacccccgagagcctggccaacatcgagagaagaatcgccgagagcaagctgaagaagccccccaaggccgacggcagccacagagaggacgacgaggacagcaagcccaagcccaacagcgacctggaggccggcaagagcctgcccttcatctacggcgacatcccccagggcctggtggccgtgcccctggaggacttcgacccctactacctgacccagaagaccttcgtggtgctgaacagaggcaagaccctgttcagattcagcgccacccccgccctgtacatcctgagccccttcaacctgatcagaagaatcgccatcaagatcctgatccacagcgtgttcagcatgatcatcatgtgcaccatcctgaccaactgcgtgttcatgaccttcagcaacccccccgactggagcaagaacgtggagtacaccttcaccggcatctacaccttcgagagcctggtgaagatcatcgccagaggcttctgcatcgacggcttcaccttcctgagagacccctggaactggctggacttcagcgtgatcatgatggcctacatcaccgagttcgtgaacctgggcaacgtgagcgccctgagaaccttcagagtgctgagagccctgaagaccatcagcgtgatccccggcctgaagaccatcgtgggcgccctgatccagagcgtgaagaagctgagcgacgtgatgatcctgaccgtgttctgcctgagcgtgttcgccctgatcggcctgcagctgttcatgggcaacctgagaaacaagtgcgtggtgtggcccatcaacttcaacgagagctacctggagaacggcaccaagggcttcgactgggaggagtacatcaacaacaagaccaacttctacaccgtgcccggcatgctggagcccctgctgtgcggcaacagcagcgacgccggccagtgccccgagggctaccagtgcatgaaggccggcagaaaccccaactacggctacaccagcttcgacaccttcagctgggccttcctggccctgttcagactgatgacccaggactactgggagaacctgtaccagctgaccctgagagccgccggcaagacctacatgatcttcttcgtgctggtgatcttcgtgggcagcttctacctggtgaacctgatcctggccgtggtggccatggcctacgaggagcagaaccaggccaccctggaggaggccgagcagaaggaggccgagttcaaggccatgctggagcagctgaagaagcagcaggaggaggcccaggccgccgccatggccaccagcgccggcaccgtgagcgaggacgccatcgaggaggagggcgaggagggcggcggcagccccagaagcagcagcgagatcagcaagctgagcagcaagagcgccaaggagagaagaaacagaagaaagaagagaaagcagaaggagctgagcgagggcgaggagaagggcgaccccgagaaggtgttcaagagcgagagcgaggacggcatgagaagaaaggccttcagactgcccgacaacagaatcggcagaaagttcagcatcatgaaccagagcctgctgagcatccccggcagccccttcctgagcagacacaacagcaagagcagcatcttcagcttcagaggccccggcagattcagagaccccggcagcgagaacgagttcgccgacgacgagcacagcaccgtggaggagagcgagggcagaagagacagcctgttcatccccatcagagccagagagagaagaagcagctacagcggctacagcggctacagccagggcagcagaagcagcagaatcttccccagcctgagaagaagcgtgaagagaaacagcaccgtggactgcaacggcgtggtgagcctgatcggcggccccggcagccacatcggcggcagactgctgcccgaggccaccaccgaggtggagatcaagaagaagggccccggcagcctgctggtgagcatggaccagctggccagctacggcagaaaggacagaatcaacagcatcatgagcgtggtgaccaacaccctggtggaggagctggaggagagccagagaaagtgccccccctgctggtacaagttcgccaacaccttcctgatctgggagtgccacccctactggatcaagctgaaggagatcgtgaacctgatcgtgatggaccccttcgtggacctggccatcaccatctgcatcgtgctgaacaccctgttcatggccatggagcaccaccccatgaccccccagttcgagcacgtgctggccgtgggcaacctggtgttcaccggcatcttcaccgccgagatgttcctgaagctgatcgccatggacccctactactacttccaggagggctggaacatcttcgacggcttcatcgtgagcctgagcctgatggagctgagcctggccgacgtggagggcctgagcgtgctgagaagcttcagactgctgagagtgttcaagctggccaagagctggcccaccctgaacatgctgatcaagatcatcggcaacagcgtgggcgccctgggcaacctgaccctggtgctggccatcatcgtgttcatcttcgccgtggtgggcatgcagctgttcggcaagagctacaaggagtgcgtgtgcaagatcaaccaggactgcgagctgcccagatggcacatgcacgacttcttccacagcttcctgatcgtgttcagagtgctgtgcggcgagtggatcgagaccatgtgggactgcatggaggtggccggccaggccatgtgcctgatcgtgttcatgatggtgatggtgatcggcaacctggtggtgctgaacctgttcctggccctgctgctgagcagcttcagcgccgacaacctggccgccaccgacgacgacggcgagatgaacaacctgcagatcagcgtgatcagaatcaagaagggcgtggcctggaccaagctgaaggtgcacgccttcatgcaggcccacttcaagcagagagaggccgacgaggtgaagcccctggacgagctgtacgagaagaaggccaactgcatcgccaaccacaccggcgccgacatccacagaaacggcgacttccagaagaacggcaacggcaccaccagcggcatcggcagcagcgtggagaagtacatcatcgacgaggaccacatgagcttcatcaacaaccccaacctgaccgtgagagtgcccatcgccgtgggcgagagcgacttcgagaacctgaacaccgaggacgtgagcagcgagagcgaccccgagggcagcaaggacaagctggacgacaccagcagcagcgagggcagcaccatcgacatcaagcccgaggtggaggaggtgcccgtggagcagcccgaggagtacctggaccccgacgcctgcttcaccgagggctgcgtgcagagattcaagtgctgccaggtgaacatcgaggagggcctgggcaagagctggtggatcctgagaaagacctgcttcctgatcgtggagcacaactggttcgagaccttcatcatcttcatgatcctgctgagcagcggcgccctggccttcgaggacatctacatcgagcagagaaagaccatcagaaccatcctggagtacgccgacaaggtgttcacctacatcttcatcctggagatgctgctgaagtggaccgcctacggcttcgtgaagttcttcaccaacgcctggtgctggctggacttcctgatcgtggccgtggtggtgaacgccctggtgggcgccatccccagcatcatgaacgtgctgctggtgtgcctgatcttctggctgatcttcagcatcatgggcgtgaacctgttcgccggcaagtaccactactgcttcaacgagaccagcgagatcagattcgagatcgaggacgtgaacaacaagaccgagtgcgagaagctgatggagggcaacaacaccgagatcagatggaagaacgtgaagatcaacttcgacaacgtgggcgccggctacctggccctgctgcaggtggccaccttcaagggctggatggacatcatgtacgccgccgtggacagcagaaagcccgacgagcagcccaagtacgaggacaacatctacatgtacatctacttcgtgatcttcatcatcttcggcagcttcttcaccctgaacctgttcatcggcgtgatcatcgacaacttcaaccagcagaagaagaagttcggcggccaggacatcttcatgaccgaggagcagaagaagtactacaacgccatgaagaagctgggcagcaagaagccccagaagcccatccccagacccctgaacaagatccagggcatcgtgttcgacttcgtgacccagcaggccttcgacatcgtgatcatgatgctgatctgcctgaacatggtgaccatgatggtggagaccgacacccagagcaagcagatggagaacatcctgtactggatcaacctggtgttcgtgatcttcttcacctgcgagtgcgtgctgaagatgttcgccctgagacactactacttcaccatcggctggaacatcttcgacttcgtggtggtgatcctgagcatcgtgggcatgttcctggccgacatcatcgagaagtacttcgtgagccccaccctgttcagagtgatcagactggccagaatcggcagaatcctgagactgatcaagggcgccaagggcatcagaaccctgctgttcgccctgatgatgagcctgcccgccctgttcaacatcggcctgctgctgttcctggtgatgttcatcttcagcatcttcggcatgagcaacttcgcctacgtgaagcacgaggccggcatcgacgacatgttcaacttcgagaccttcggcaacagcatgatctgcctgttccagatcaccaccagcgccggctgggacggcctgctgctgcccatcctgaacagaccccccgactgcagcctggacaaggagcaccccggcagcggcttcaagggcgactgcggcaaccccagcgtgggcatcttcttcttcgtgagctacatcatcatcagcttcctgatcgtggtgaacatgtacatcgccatcatcctggagaacttcagcgtggccaccgaggagagcgccgaccccctgagcgaggacgacttcgagaccttctacgagatctgggagaagttcgaccccgacgccacccagttcatcgagtactgcaagctggccgacttcgccgacgccctggagcaccccctgagagtgcccaagcccaacaccatcgagctgatcgccatggacctgcccatggtgagcggcgacagaatccactgcctggacatcctgttcgccttcaccaagagagtgctgggcgacagcggcgagctggacatcctgagacagcagatggaggagagattcgtggccagcaaccccagcaaggtgagctacgagcccatcaccaccaccctgagaagaaagcaggaggaggtgagcgccgtggtgctgcagagagcctacagaggccacctggccagaagaggcttcatctgcaagaagaccaccagcaacaagctggagaacggcggcacccacagagagaagaaggagagcacccccagcaccgccagcctgcccagctacgacagcgtgaccaagcccgagaaggagaagcagcagagagccgaggagggcagaagagagagagccaagagacagaaggaggtgagagagagcaagtgctag

SEQ ID NO: 99280 - DNA, 2919 bp, synthetic construct
  misc_feature 1..2919: note = Description of Artificial Sequence: Synthetic coding sequence
  source 1..2919: mol_type = other DNA
atggccgccagactgctggccccccccggccccgacagcttcaagcccttcacccccgagagcctggccaacatcgagagaagaatcgccgagagcaagctgaagaagccccccaaggccgacggcagccacagagaggacgacgaggacagcaagcccaagcccaacagcgacctggaggccggcaagagcctgcccttcatctacggcgacatcccccagggcctggtggccgtgcccctggaggacttcgacccctactacctgacccagaagaccttcgtggtgctgaacagaggcaagaccctgttcagattcagcgccacccccgccctgtacatcctgagccccttcaacctgatcagaagaatcgccatcaagatcctgatccacagcgtgttcagcatgatcatcatgtgcaccatcctgaccaactgcgtgttcatgaccttcagcaacccccccgactggagcaagaacgtggagtacaccttcaccggcatctacaccttcgagagcctggtgaagatcatcgccagaggcttctgcatcgacggcttcaccttcctgagagacccctggaactggctggacttcagcgtgatcatgatggcctacgtgaccgagttcgtggacctgggcaacgtgagcgccctgagaaccttcagagtgctgagagccctgaagaccatcagcgtgatccccggcctgaagaccatcgtgggcgccctgatccagagcgtgaagaagctgagcgacgtgatgatcctgaccgtgttctgcctgagcgtgttcgccctgatcggcctgcagctgttcatgggcaacctgagaaacaagtgcgtggtgtggcccatcaacttcaacgagagctacctggagaacggcaccaagggcttcgactgggaggagtacatcaacaacaagaccaacttctacaccgtgcccggcatgctggagcccctgctgtgcggcaacagcagcgacgccggccagtgccccgagggctaccagtgcatgaaggccggcagaaaccccaactacggctacaccagcttcgacaccttcagctgggccttcctggccctgttcagactgatgacccaggactactgggagaacctgtaccagctgaccctgagagccgccggcaagacctacatgatcttcttcgtgctggtgatcttcgtgggcagcttctacctggtgaacctgatcctggccgtggtggccatggcctacgaggagcagaaccaggccaccctggaggaggccgagcagaaggaggccgagttcaaggccatgctggagcagctgaagaagcagcaggaggaggcccaggccgccgccatggccaccagcgccggcaccgtgagcgaggacgccatcgaggaggagggcgaggagggcggcggcagccccagaagcagcagcgagatcagcaagctgagcagcaagagcgccaaggagagaagaaacagaagaaagaagagaaagcagaaggagctgagcgagggcgaggagaagggcgaccccgagaaggtgttcaagagcgagagcgaggacggcatgagaagaaaggccttcagactgcccgacaacagaatcggcagaaagttcagcatcatgaaccagagcctgctgagcatccccggcagccccttcctgagcagacacaacagcaagagcagcatcttcagcttcagaggccccggcagattcagagaccccggcagcgagaacgagttcgccgacgacgagcacagcaccgtggaggagagcgagggcagaagagacagcctgttcatccccatcagagccagagagagaagaagcagctacagcggctacagcggctacagccagggcagcagaagcagcagaatcttccccagcctgagaagaagcgtgaagagaaacagcaccgtggactgcaacggcgtggtgagcctgatcggcggccccggcagccacatcggcggcagactgctgcccgaggccaccaccgaggtggagatcaagaagaagggccccggcagcctgctggtgagcatggaccagctggccagctacggcagaaaggacagaatcaacagcatcatgagcgtggtgaccaacaccctggtggaggagctggaggagagccagagaaagtgccccccctgctggtacaagttcgccaacaccttcctgatctgggagtgccacccctactggatcaagctgaaggagatcgtgaacctgatcgtgatggaccccttcgtggacctggccatcaccatctgcatcgtgctgaacaccctgttcatggccatggagcaccaccccatgaccccccagttcgagcacgtgctggccgtgggcaacctggtgttcaccggcatcttcaccgccgagatgttcctgaagctgatcgccatggacccctactactacttccaggagggctggaacatcttcgacggcttcatcgtgagcctgagcctgatggagctgagcctggccgacgtggagggcctgagcgtgctgagaagcttcagactgctgagagtgttcaagctggccaagagctggcccaccctgaacatgctgatcaagatcatcggcaacagcgtgggcgccctgggcaacctgaccctggtgctggccatcatcgtgttcatcttcgccgtggtgggcatgcagctgttcggcaagagctacaaggagtgcgtgtgcaagatcaaccaggactgcgagctgcccagatggcacatgcacgacttcttccacagcttcctgatcgtgttcagagtgctgtgcggcgagtggatcgagaccatgtgggactgcatggaggtggccggccaggccatgtgcctgatcgtgttcatgatggtgatggtgatcggcaacctggtggtgagcaccaacctgtag

SEQ ID NO: 99281 - DNA, 6030 bp, synthetic construct
  misc_feature 1..6030: note = Description of Artificial Sequence: Synthetic coding sequence
  source 1..6030: mol_type = other DNA
atggagcagaccgtgctggtgccccccggccccgacagcttcaacttcttcaccagagagagcctggccgccatcgagagaagaatcgccgaggagaaggccaagaaccccaagcccgacaagaaggacgacgacgagaacggccccaagcccaacagcgacctggaggccggcaagaacctgcccttcatctacggcgacatcccccccgagatggtgagcgagcccctggaggacctggacccctactacatcaacaagaagaccttcatcgtgctgaacaagggcaaggccatcttcagattcagcgccaccagcgccctgtacatcctgacccccttcaaccccctgagaaagatcgccatcaagatcctggtgcacagcctgttcagcatgctgatcatgtgcaccatcctgaccaactgcgtgttcatgaccatgagcaacccccccgactggaccaagaacgtggagtacaccttcaccggcatctacaccttcgagagcctgatcaagatcatcgccagaggcttctgcctggaggacttcaccttcctgagagacccctggaactggctggacttcaccgtgatcaccttcgcctacgtgaccgagttcgtggacctgggcaacgtgagcgccctgagaaccttcagagtgctgagagccctgaagaccatcagcgtgatccccggcctgaagaccatcgtgggcgccctgatccagagcgtgaagaagctgagcgacgtgatgatcctgaccgtgttctgcctgagcgtgttcgccctgatcggcctgcagctgttcatgggcaacctgagaaacaagtgcatccagtggccccccaccaacgccagcctggaggagcacagcatcgagaagaacatcaccgtgaactacaacggcaccctgatcaacgagaccgtgttcgagttcgactggaagagctacatccaggacagcagataccactacttcctggagggcttcctggacgccctgctgtgcggcaacagcagcgacgccggccagtgccccgagggctacatgtgcgtgaaggccggcagaaaccccaactacggctacaccagcttcgacaccttcagctgggccttcctgagcctgttcagactgatgacccaggacttctgggagaacctgtaccagctgaccctgagagccgccggcaagacctacatgatcttcttcgtgctggtgatcttcctgggcagcttctacctgatcaacctgatcctggccgtggtggccatggcctacgaggagcagaaccaggccaccctggaggaggccgagcagaaggaggccgagttccagcagatgatcgagcagctgaagaagcagcaggaggccgcccagcaggccgccaccgccaccgccagcgagcacagcagagagcccagcgccgccggcagactgagcgacagcagcagcgaggccagcaagctgagcagcaagagcgccaaggagagaagaaacagaagaaagaagagaaagcagaaggagcagagcggcggcgaggagaaggacgaggacgagttccagaagagcgagagcgaggacagcatcagaagaaagggcttcagattcagcatcgagggcaacagactgacctacgagaagagatacagcagcccccaccagagcctgctgagcatcagaggcagcctgttcagccccagaagaaacagcagaaccagcctgttcagcttcagaggcagagccaaggacgtgggcagcgagaacgacttcgccgacgacgagcacagcaccttcgaggacaacgagagcagaagagacagcctgttcgtgcccagaagacacggcgagagaagaaacagcaacctgagccagaccagcagaagcagcagaatgctggccgtgttccccgccaacggcaagatgcacagcaccgtggactgcaacggcgtggtgagcctggtgggcggccccagcgtgcccaccagccccgtgggccagctgctgcccgaggtgatcatcgacaagcccgccaccgacgacaacggcaccaccaccgagaccgagatgagaaagagaagaagcagcagcttccacgtgagcatggacttcctggaggaccccagccagagacagagagccatgagcatcgccagcatcctgaccaacaccgtggaggagctggaggagagcagacagaagtgccccccctgctggtacaagttcagcaacatcttcctgatctgggactgcagcccctactggctgaaggtgaagcacgtggtgaacctggtggtgatggaccccttcgtggacctggccatcaccatctgcatcgtgctgaacaccctgttcatggccatggagcactaccccatgaccgaccacttcaacaacgtgctgaccgtgggcaacctggtgttcaccggcatcttcaccgccgagatgttcctgaagatcatcgccatggacccctactactacttccaggagggctggaacatcttcgacggcttcatcgtgaccctgagcctggtggagctgggcctggccaacgtggagggcctgagcgtgctgagaagcttcagactgctgagagtgttcaagctggccaagagctggcccaccctgaacatgctgatcaagatcatcggcaacagcgtgggcgccctgggcaacctgaccctggtgctggccatcatcgtgttcatcttcgccgtggtgggcatgcagctgttcggcaagagctacaaggactgcgtgtgcaagatcgccagcgactgccagctgcccagatggcacatgaacgacttcttccacagcttcctgatcgtgttcagagtgctgtgcggcgagtggatcgagaccatgtgggactgcatggaggtggccggccaggccatgtgcctgaccgtgttcatgatggtgatggtgatcggcaacctggtggtgctgaacctgttcctggccctgctgctgagcagcttcagcgccgacaacctggccgccaccgacgacgacaacgagatgaacaacctgcagatcgccgtggacagaatgcacaagggcgtggcctacgtgaagagaaagatctacgagttcatccagcagagcttcatcagaaagcagaagatcctggacgagatcaagcccctggacgacctgaacaacaagaaggacagctgcatgagcaaccacaccgccgagatcggcaaggacctggactacctgaaggacgtgaacggcaccaccagcggcatcggcaccggcagcagcgtggagaagtacatcatcgacgagagcgactacatgagcttcatcaacaaccccagcctgaccgtgaccgtgcccatcgccgtgggcgagagcgacttcgagaacctgaacaccgaggacttcagcagcgagagcgacctggaggagagcaaggagaagctgaacgagagcagcagcagcagcgagggcagcaccgtggacatcggcgcccccgtggaggagcagcccgtggtggagcccgaggagaccctggagcccgaggcctgcttcaccgagggctgcgtgcagagattcaagtgctgccagatcaacgtggaggagggcagaggcaagcagtggtggaacctgagaagaacctgcttcagaatcgtggagcacaactggttcgagaccttcatcgtgttcatgatcctgctgagcagcggcgccctggccttcgaggacatctacatcgaccagagaaagaccatcaagaccatgctggagtacgccgacaaggtgttcacctacatcttcatcctggagatgctgctgaagtgggtggcctacggctaccagacctacttcaccaacgcctggtgctggctggacttcctgatcgtggacgtgagcctggtgagcctgaccgccaacgccctgggctacagcgagctgggcgccatcaagagcctgagaaccctgagagccctgagacccctgagagccctgagcagattcgagggcatgagagtggtggtgaacgccctgctgggcgccatccccagcatcatgaacgtgctgctggtgtgcctgatcttctggctgatcttcagcatcatgggcgtgaacctgttcgccggcaagttctaccactgcatcaacaccaccaccggcgacagattcgacatcgaggacgtgaacaaccacaccgactgcctgaagctgatcgagagaaacgagaccgccagatggaagaacgtgaaggtgaacttcgacaacgtgggcttcggctacctgagcctgctgcaggtggccaccttcaagggctggatggacatcatgtacgccgccgtggacagcagaaacgtggagctgcagcccaagtacgaggagagcctgtacatgtacctgtacttcgtgatcttcatcatcttcggcagcttcttcaccctgaacctgttcatcggcgtgatcatcgacaacttcaaccagcagaagaagaagttcggcggccaggacatcttcatgaccgaggagcagaagaagtactacaacgccatgaagaagctgggcagcaagaagccccagaagcccatccccagacccggcaacaagttccagggcatggtgttcgacttcgtgaccagacaggtgttcgacatcagcatcatgatcctgatctgcctgaacatggtgaccatgatggtggagaccgacgaccagagcgagtacgtgaccaccatcctgagcagaatcaacctggtgttcatcgtgctgttcaccggcgagtgcgtgctgaagctgatcagcctgagacactactacttcaccatcggctggaacatcttcgacttcgtggtggtgatcctgagcatcgtgggcatgttcctggccgagctgatcgagaagtacttcgtgagccccaccctgttcagagtgatcagactggccagaatcggcagaatcctgagactgatcaagggcgccaagggcatcagaaccctgctgttcgccctgatgatgagcctgcccgccctgttcaacatcggcctgctgctgttcctggtgatgttcatctacgccatcttcggcatgagcaacttcgcctacgtgaagagagaggtgggcatcgacgacatgttcaacttcgagaccttcggcaacagcatgatctgcctgttccagatcaccaccagcgccggctgggacggcctgctggcccccatcctgaacagcaagccccccgactgcgaccccaacaaggtgaaccccggcagcagcgtgaagggcgactgcggcaaccccagcgtgggcatcttcttcttcgtgagctacatcatcatcagcttcctggtggtggtgaacatgtacatcgccgtgatcctggagaacttcagcgtggccaccgaggagagcgccgagcccctgagcgaggacgacttcgagatgttctacgaggtgtgggagaagttcgaccccgacgccacccagttcatggagttcgagaagctgagccagttcgccgccgccctggagccccccctgaacctgccccagcccaacaagctgcagctgatcgccatggacctgcccatggtgagcggcgacagaatccactgcctggacatcctgttcgccttcaccaagagagtgctgggcgagagcggcgagatggacgccctgagaatccagatggaggagagattcatggccagcaaccccagcaaggtgagctaccagcccatcaccaccaccctgaagagaaagcaggaggaggtgagcgccgtgatcatccagagagcctacagaagacacctgctgaagagaaccgtgaagcaggccagcttcacctacaacaagaacaagatcaagggcggcgccaacctgctgatcaaggaggacatgatcatcgacagaatcaacgagaacagcatcaccgagaagaccgacctgaccatgagcaccgccgcctgcccccccagctacgacagagtgaccaagcccatcgtggagaagcacgagcaggagggcaaggacgagaaggccaagggcaagtag

SEQ ID NO: 99282 - DNA, 5997 bp, synthetic construct
  misc_feature 1..5997: note = Description of Artificial Sequence: Synthetic coding sequence
  source 1..5997: mol_type = other DNA
atggagcagaccgtgctggtgccccccggccccgacagcttcaacttcttcaccagagagagcctggccgccatcgagagaagaatcgccgaggagaaggccaagaaccccaagcccgacaagaaggacgacgacgagaacggccccaagcccaacagcgacctggaggccggcaagaacctgcccttcatctacggcgacatcccccccgagatggtgagcgagcccctggaggacctggacccctactacatcaacaagaagaccttcatcgtgctgaacaagggcaaggccatcttcagattcagcgccaccagcgccctgtacatcctgacccccttcaaccccctgagaaagatcgccatcaagatcctggtgcacagcctgttcagcatgctgatcatgtgcaccatcctgaccaactgcgtgttcatgaccatgagcaacccccccgactggaccaagaacgtggagtacaccttcaccggcatctacaccttcgagagcctgatcaagatcatcgccagaggcttctgcctggaggacttcaccttcctgagagacccctggaactggctggacttcaccgtgatcaccttcgcctacgtgaccgagttcgtggacctgggcaacgtgagcgccctgagaaccttcagagtgctgagagccctgaagaccatcagcgtgatccccggcctgaagaccatcgtgggcgccctgatccagagcgtgaagaagctgagcgacgtgatgatcctgaccgtgttctgcctgagcgtgttcgccctgatcggcctgcagctgttcatgggcaacctgagaaacaagtgcatccagtggccccccaccaacgccagcctggaggagcacagcatcgagaagaacatcaccgtgaactacaacggcaccctgatcaacgagaccgtgttcgagttcgactggaagagctacatccaggacagcagataccactacttcctggagggcttcctggacgccctgctgtgcggcaacagcagcgacgccggccagtgccccgagggctacatgtgcgtgaaggccggcagaaaccccaactacggctacaccagcttcgacaccttcagctgggccttcctgagcctgttcagactgatgacccaggacttctgggagaacctgtaccagctgaccctgagagccgccggcaagacctacatgatcttcttcgtgctggtgatcttcctgggcagcttctacctgatcaacctgatcctggccgtggtggccatggcctacgaggagcagaaccaggccaccctggaggaggccgagcagaaggaggccgagttccagcagatgatcgagcagctgaagaagcagcaggaggccgcccagcaggccgccaccgccaccgccagcgagcacagcagagagcccagcgccgccggcagactgagcgacagcagcagcgaggccagcaagctgagcagcaagagcgccaaggagagaagaaacagaagaaagaagagaaagcagaaggagcagagcggcggcgaggagaaggacgaggacgagttccagaagagcgagagcgaggacagcatcagaagaaagggcttcagattcagcatcgagggcaacagactgacctacgagaagagatacagcagcccccaccagagcctgctgagcatcagaggcagcctgttcagccccagaagaaacagcagaaccagcctgttcagcttcagaggcagagccaaggacgtgggcagcgagaacgacttcgccgacgacgagcacagcaccttcgaggacaacgagagcagaagagacagcctgttcgtgcccagaagacacggcgagagaagaaacagcaacctgagccagaccagcagaagcagcagaatgctggccgtgttccccgccaacggcaagatgcacagcaccgtggactgcaacggcgtggtgagcctggtgggcggccccagcgtgcccaccagccccgtgggccagctgctgcccgagggcaccaccaccgagaccgagatgagaaagagaagaagcagcagcttccacgtgagcatggacttcctggaggaccccagccagagacagagagccatgagcatcgccagcatcctgaccaacaccgtggaggagctggaggagagcagacagaagtgccccccctgctggtacaagttcagcaacatcttcctgatctgggactgcagcccctactggctgaaggtgaagcacgtggtgaacctggtggtgatggaccccttcgtggacctggccatcaccatctgcatcgtgctgaacaccctgttcatggccatggagcactaccccatgaccgaccacttcaacaacgtgctgaccgtgggcaacctggtgttcaccggcatcttcaccgccgagatgttcctgaagatcatcgccatggacccctactactacttccaggagggctggaacatcttcgacggcttcatcgtgaccctgagcctggtggagctgggcctggccaacgtggagggcctgagcgtgctgagaagcttcagactgctgagagtgttcaagctggccaagagctggcccaccctgaacatgctgatcaagatcatcggcaacagcgtgggcgccctgggcaacctgaccctggtgctggccatcatcgtgttcatcttcgccgtggtgggcatgcagctgttcggcaagagctacaaggactgcgtgtgcaagatcgccagcgactgccagctgcccagatggcacatgaacgacttcttccacagcttcctgatcgtgttcagagtgctgtgcggcgagtggatcgagaccatgtgggactgcatggaggtggccggccaggccatgtgcctgaccgtgttcatgatggtgatggtgatcggcaacctggtggtgctgaacctgttcctggccctgctgctgagcagcttcagcgccgacaacctggccgccaccgacgacgacaacgagatgaacaacctgcagatcgccgtggacagaatgcacaagggcgtggcctacgtgaagagaaagatctacgagttcatccagcagagcttcatcagaaagcagaagatcctggacgagatcaagcccctggacgacctgaacaacaagaaggacagctgcatgagcaaccacaccgccgagatcggcaaggacctggactacctgaaggacgtgaacggcaccaccagcggcatcggcaccggcagcagcgtggagaagtacatcatcgacgagagcgactacatgagcttcatcaacaaccccagcctgaccgtgaccgtgcccatcgccgtgggcgagagcgacttcgagaacctgaacaccgaggacttcagcagcgagagcgacctggaggagagcaaggagaagctgaacgagagcagcagcagcagcgagggcagcaccgtggacatcggcgcccccgtggaggagcagcccgtggtggagcccgaggagaccctggagcccgaggcctgcttcaccgagggctgcgtgcagagattcaagtgctgccagatcaacgtggaggagggcagaggcaagcagtggtggaacctgagaagaacctgcttcagaatcgtggagcacaactggttcgagaccttcatcgtgttcatgatcctgctgagcagcggcgccctggccttcgaggacatctacatcgaccagagaaagaccatcaagaccatgctggagtacgccgacaaggtgttcacctacatcttcatcctggagatgctgctgaagtgggtggcctacggctaccagacctacttcaccaacgcctggtgctggctggacttcctgatcgtggacgtgagcctggtgagcctgaccgccaacgccctgggctacagcgagctgggcgccatcaagagcctgagaaccctgagagccctgagacccctgagagccctgagcagattcgagggcatgagagtggtggtgaacgccctgctgggcgccatccccagcatcatgaacgtgctgctggtgtgcctgatcttctggctgatcttcagcatcatgggcgtgaacctgttcgccggcaagttctaccactgcatcaacaccaccaccggcgacagattcgacatcgaggacgtgaacaaccacaccgactgcctgaagctgatcgagagaaacgagaccgccagatggaagaacgtgaaggtgaacttcgacaacgtgggcttcggctacctgagcctgctgcaggtggccaccttcaagggctggatggacatcatgtacgccgccgtggacagcagaaacgtggagctgcagcccaagtacgaggagagcctgtacatgtacctgtacttcgtgatcttcatcatcttcggcagcttcttcaccctgaacctgttcatcggcgtgatcatcgacaacttcaaccagcagaagaagaagttcggcggccaggacatcttcatgaccgaggagcagaagaagtactacaacgccatgaagaagctgggcagcaagaagccccagaagcccatccccagacccggcaacaagttccagggcatggtgttcgacttcgtgaccagacaggtgttcgacatcagcatcatgatcctgatctgcctgaacatggtgaccatgatggtggagaccgacgaccagagcgagtacgtgaccaccatcctgagcagaatcaacctggtgttcatcgtgctgttcaccggcgagtgcgtgctgaagctgatcagcctgagacactactacttcaccatcggctggaacatcttcgacttcgtggtggtgatcctgagcatcgtgggcatgttcctggccgagctgatcgagaagtacttcgtgagccccaccctgttcagagtgatcagactggccagaatcggcagaatcctgagactgatcaagggcgccaagggcatcagaaccctgctgttcgccctgatgatgagcctgcccgccctgttcaacatcggcctgctgctgttcctggtgatgttcatctacgccatcttcggcatgagcaacttcgcctacgtgaagagagaggtgggcatcgacgacatgttcaacttcgagaccttcggcaacagcatgatctgcctgttccagatcaccaccagcgccggctgggacggcctgctggcccccatcctgaacagcaagccccccgactgcgaccccaacaaggtgaaccccggcagcagcgtgaagggcgactgcggcaaccccagcgtgggcatcttcttcttcgtgagctacatcatcatcagcttcctggtggtggtgaacatgtacatcgccgtgatcctggagaacttcagcgtggccaccgaggagagcgccgagcccctgagcgaggacgacttcgagatgttctacgaggtgtgggagaagttcgaccccgacgccacccagttcatggagttcgagaagctgagccagttcgccgccgccctggagccccccctgaacctgccccagcccaacaagctgcagctgatcgccatggacctgcccatggtgagcggcgacagaatccactgcctggacatcctgttcgccttcaccaagagagtgctgggcgagagcggcgagatggacgccctgagaatccagatggaggagagattcatggccagcaaccccagcaaggtgagctaccagcccatcaccaccaccctgaagagaaagcaggaggaggtgagcgccgtgatcatccagagagcctacagaagacacctgctgaagagaaccgtgaagcaggccagcttcacctacaacaagaacaagatcaagggcggcgccaacctgctgatcaaggaggacatgatcatcgacagaatcaacgagaacagcatcaccgagaagaccgacctgaccatgagcaccgccgcctgcccccccagctacgacagagtgaccaagcccatcgtggagaagcacgagcaggagggcaaggacgagaaggccaagggcaagtag

SEQ ID NO: 99283 - DNA, 5946 bp, synthetic construct
  misc_feature 1..5946: note = Description of Artificial Sequence: Synthetic coding sequence
  source 1..5946: mol_type = other DNA
atggagcagaccgtgctggtgccccccggccccgacagcttcaacttcttcaccagagagagcctggccgccatcgagagaagaatcgccgaggagaaggccaagaaccccaagcccgacaagaaggacgacgacgagaacggccccaagcccaacagcgacctggaggccggcaagaacctgcccttcatctacggcgacatcccccccgagatggtgagcgagcccctggaggacctggacccctactacatcaacaagaagaccttcatcgtgctgaacaagggcaaggccatcttcagattcagcgccaccagcgccctgtacatcctgacccccttcaaccccctgagaaagatcgccatcaagatcctggtgcacagcctgttcagcatgctgatcatgtgcaccatcctgaccaactgcgtgttcatgaccatgagcaacccccccgactggaccaagaacgtggagtacaccttcaccggcatctacaccttcgagagcctgatcaagatcatcgccagaggcttctgcctggaggacttcaccttcctgagagacccctggaactggctggacttcaccgtgatcaccttcgcctacgtgaccgagttcgtggacctgggcaacgtgagcgccctgagaaccttcagagtgctgagagccctgaagaccatcagcgtgatccccggcctgaagaccatcgtgggcgccctgatccagagcgtgaagaagctgagcgacgtgatgatcctgaccgtgttctgcctgagcgtgttcgccctgatcggcctgcagctgttcatgggcaacctgagaaacaagtgcatccagtggccccccaccaacgccagcctggaggagcacagcatcgagaagaacatcaccgtgaactacaacggcaccctgatcaacgagaccgtgttcgagttcgactggaagagctacatccaggacagcagataccactacttcctggagggcttcctggacgccctgctgtgcggcaacagcagcgacgccggccagtgccccgagggctacatgtgcgtgaaggccggcagaaaccccaactacggctacaccagcttcgacaccttcagctgggccttcctgagcctgttcagactgatgacccaggacttctgggagaacctgtaccagctgaccctgagagccgccggcaagacctacatgatcttcttcgtgctggtgatcttcctgggcagcttctacctgatcaacctgatcctggccgtggtggccatggcctacgaggagcagaaccaggccaccctggaggaggccgagcagaaggaggccgagttccagcagatgatcgagcagctgaagaagcagcaggaggccgcccagcaggccgccaccgccaccgccagcgagcacagcagagagcccagcgccgccggcagactgagcgacagcagcagcgaggccagcaagctgagcagcaagagcgccaaggagagaagaaacagaagaaagaagagaaagcagaaggagcagagcggcggcgaggagaaggacgaggacgagttccagaagagcgagagcgaggacagcatcagaagaaagggcttcagattcagcatcgagggcaacagactgacctacgagaagagatacagcagcccccaccagagcctgctgagcatcagaggcagcctgttcagccccagaagaaacagcagaaccagcctgttcagcttcagaggcagagccaaggacgtgggcagcgagaacgacttcgccgacgacgagcacagcaccttcgaggacaacgagagcagaagagacagcctgttcgtgcccagaagacacggcgagagaagaaacagcaacctgagccagaccagcagaagcagcagaatgctggccgtgttccccgccaacggcaagatgcacagcaccgtggactgcaacggcgtggtgagcctgggcaccaccaccgagaccgagatgagaaagagaagaagcagcagcttccacgtgagcatggacttcctggaggaccccagccagagacagagagccatgagcatcgccagcatcctgaccaacaccgtggaggagctggaggagagcagacagaagtgccccccctgctggtacaagttcagcaacatcttcctgatctgggactgcagcccctactggctgaaggtgaagcacgtggtgaacctggtggtgatggaccccttcgtggacctggccatcaccatctgcatcgtgctgaacaccctgttcatggccatggagcactaccccatgaccgaccacttcaacaacgtgctgaccgtgggcaacctggtgttcaccggcatcttcaccgccgagatgttcctgaagatcatcgccatggacccctactactacttccaggagggctggaacatcttcgacggcttcatcgtgaccctgagcctggtggagctgggcctggccaacgtggagggcctgagcgtgctgagaagcttcagactgctgagagtgttcaagctggccaagagctggcccaccctgaacatgctgatcaagatcatcggcaacagcgtgggcgccctgggcaacctgaccctggtgctggccatcatcgtgttcatcttcgccgtggtgggcatgcagctgttcggcaagagctacaaggactgcgtgtgcaagatcgccagcgactgccagctgcccagatggcacatgaacgacttcttccacagcttcctgatcgtgttcagagtgctgtgcggcgagtggatcgagaccatgtgggactgcatggaggtggccggccaggccatgtgcctgaccgtgttcatgatggtgatggtgatcggcaacctggtggtgctgaacctgttcctggccctgctgctgagcagcttcagcgccgacaacctggccgccaccgacgacgacaacgagatgaacaacctgcagatcgccgtggacagaatgcacaagggcgtggcctacgtgaagagaaagatctacgagttcatccagcagagcttcatcagaaagcagaagatcctggacgagatcaagcccctggacgacctgaacaacaagaaggacagctgcatgagcaaccacaccgccgagatcggcaaggacctggactacctgaaggacgtgaacggcaccaccagcggcatcggcaccggcagcagcgtggagaagtacatcatcgacgagagcgactacatgagcttcatcaacaaccccagcctgaccgtgaccgtgcccatcgccgtgggcgagagcgacttcgagaacctgaacaccgaggacttcagcagcgagagcgacctggaggagagcaaggagaagctgaacgagagcagcagcagcagcgagggcagcaccgtggacatcggcgcccccgtggaggagcagcccgtggtggagcccgaggagaccctggagcccgaggcctgcttcaccgagggctgcgtgcagagattcaagtgctgccagatcaacgtggaggagggcagaggcaagcagtggtggaacctgagaagaacctgcttcagaatcgtggagcacaactggttcgagaccttcatcgtgttcatgatcctgctgagcagcggcgccctggccttcgaggacatctacatcgaccagagaaagaccatcaagaccatgctggagtacgccgacaaggtgttcacctacatcttcatcctggagatgctgctgaagtgggtggcctacggctaccagacctacttcaccaacgcctggtgctggctggacttcctgatcgtggacgtgagcctggtgagcctgaccgccaacgccctgggctacagcgagctgggcgccatcaagagcctgagaaccctgagagccctgagacccctgagagccctgagcagattcgagggcatgagagtggtggtgaacgccctgctgggcgccatccccagcatcatgaacgtgctgctggtgtgcctgatcttctggctgatcttcagcatcatgggcgtgaacctgttcgccggcaagttctaccactgcatcaacaccaccaccggcgacagattcgacatcgaggacgtgaacaaccacaccgactgcctgaagctgatcgagagaaacgagaccgccagatggaagaacgtgaaggtgaacttcgacaacgtgggcttcggctacctgagcctgctgcaggtggccaccttcaagggctggatggacatcatgtacgccgccgtggacagcagaaacgtggagctgcagcccaagtacgaggagagcctgtacatgtacctgtacttcgtgatcttcatcatcttcggcagcttcttcaccctgaacctgttcatcggcgtgatcatcgacaacttcaaccagcagaagaagaagttcggcggccaggacatcttcatgaccgaggagcagaagaagtactacaacgccatgaagaagctgggcagcaagaagccccagaagcccatccccagacccggcaacaagttccagggcatggtgttcgacttcgtgaccagacaggtgttcgacatcagcatcatgatcctgatctgcctgaacatggtgaccatgatggtggagaccgacgaccagagcgagtacgtgaccaccatcctgagcagaatcaacctggtgttcatcgtgctgttcaccggcgagtgcgtgctgaagctgatcagcctgagacactactacttcaccatcggctggaacatcttcgacttcgtggtggtgatcctgagcatcgtgggcatgttcctggccgagctgatcgagaagtacttcgtgagccccaccctgttcagagtgatcagactggccagaatcggcagaatcctgagactgatcaagggcgccaagggcatcagaaccctgctgttcgccctgatgatgagcctgcccgccctgttcaacatcggcctgctgctgttcctggtgatgttcatctacgccatcttcggcatgagcaacttcgcctacgtgaagagagaggtgggcatcgacgacatgttcaacttcgagaccttcggcaacagcatgatctgcctgttccagatcaccaccagcgccggctgggacggcctgctggcccccatcctgaacagcaagccccccgactgcgaccccaacaaggtgaaccccggcagcagcgtgaagggcgactgcggcaaccccagcgtgggcatcttcttcttcgtgagctacatcatcatcagcttcctggtggtggtgaacatgtacatcgccgtgatcctggagaacttcagcgtggccaccgaggagagcgccgagcccctgagcgaggacgacttcgagatgttctacgaggtgtgggagaagttcgaccccgacgccacccagttcatggagttcgagaagctgagccagttcgccgccgccctggagccccccctgaacctgccccagcccaacaagctgcagctgatcgccatggacctgcccatggtgagcggcgacagaatccactgcctggacatcctgttcgccttcaccaagagagtgctgggcgagagcggcgagatggacgccctgagaatccagatggaggagagattcatggccagcaaccccagcaaggtgagctaccagcccatcaccaccaccctgaagagaaagcaggaggaggtgagcgccgtgatcatccagagagcctacagaagacacctgctgaagagaaccgtgaagcaggccagcttcacctacaacaagaacaagatcaagggcggcgccaacctgctgatcaaggaggacatgatcatcgacagaatcaacgagaacagcatcaccgagaagaccgacctgaccatgagcaccgccgcctgcccccccagctacgacagagtgaccaagcccatcgtggagaagcacgagcaggagggcaaggacgagaaggccaagggcaagtag

SEQ ID NO: 99284 - DNA, 6030 bp, synthetic construct; identical to SEQ ID NO: 99281
  misc_feature 1..6030: note = Description of Artificial Sequence: Synthetic coding sequence
  source 1..6030: mol_type = other DNA

SEQ ID NO: 99285 - DNA, 657 bp, synthetic construct
  misc_feature 1..657: note = Description of Artificial Sequence: Synthetic coding sequence
  source 1..657: mol_type = other DNA
atgggcagactgctggccctggtggtgggcgccgccctggtgagcagcgcctgcggcggctgcgtggaggtggacagcgagaccgaggccgtgtacggcatgaccttcaagatcctgtgcatcagctgcaagagaagaagcgagaccaacgccgagaccttcaccgagtggaccttcagacagaagggcaccgaggagttcgtgaagatcctgagatacgagaacgaggtgctgcagctggaggaggacgagagattcgagggcagagtggtgtggaacggcagcagaggcaccaaggacctgcaggacctgagcatcttcatcaccaacgtgacctacaaccacagcggcgactacgagtgccacgtgtacagactgctgttcttcgagaactacgagcacaacaccagcgtggtgaagaagatccacatcgaggtggtggacaaggccaacagagacatggccagcatcgtgagcgagatcatgatgtacgtgctgatcgtggtgctgaccatctggctggtggccgagatgatctactgctacaagaagatcgccgccgccaccgagaccgccgcccaggagaacgccagcgagtacctggccatcaccagcgagagcaaggagaactgcaccggcgtgcaggtggccgagtag

SEQ ID NO: 99286 - DNA, 807 bp, synthetic construct
  misc_feature 1..807: note = Description of Artificial Sequence: Synthetic coding sequence
  source 1..807: mol_type = other DNA
atgggcagactgctggccctggtggtgggcgccgccctggtgagcagcgcctgcggcggctgcgtggaggtggacagcgagaccgaggccgtgtacggcatgaccttcaagatcctgtgcatcagctgcaagagaagaagcgagaccaacgccgagaccttcaccgagtggaccttcagacagaagggcaccgaggagttcgtgaagatcctgagatacgagaacgaggtgctgcagctggaggaggacgagagattcgagggcagagtggtgtggaacggcagcagaggcaccaaggacctgcaggacctgagcatcttcatcaccaacgtgacctacaaccacagcggcgactacgagtgccacgtgtacagactgctgttcttcgagaactacgagcacaacaccagcgtggtgaagaagatccacatcgaggtggtggacaagggcgagagcggcgccgcctgccccttcaccgtgacccacagaagagccagatggagagacagatggcaggccgtggacagaaccggctggctgtgcgcctggcccgccaacagaccccagcagagagccgagggcgagggcagcagccccagctgccccctgcagctgtggcccctgttcctgagcagccccagaagaggccagagcatgcccgtgccccacagaagaagcggctacagaacccagctgtgccacctgtgctgcatgaccagcggcagatgcctgctgagcctgagccagagagtggtgctgggcctgcccggcatcatcatcagatgcgtgagcagaggcgtggtgtag

SEQ ID NO: 99287 - DNA, 6018 bp, synthetic construct
  misc_feature 1..6018: note = Description of Artificial Sequence: Synthetic coding sequence
  source 1..6018: mol_type = other DNA
atggcccagagcgtgctggtgccccccggccccgacagcttcagattcttcaccagagagagcctggccgccatcgagcagagaatcgccgaggagaaggccaagagacccaagcaggagagaaaggacgaggacgacgagaacggccccaagcccaacagcgacctggaggccggcaagagcctgcccttcatctacggcgacatcccccccgagatggtgagcgtgcccctggaggacctggacccctactacatcaacaagaagaccttcatcgtgctgaacaagggcaaggccatcagcagattcagcgccacccccgccctgtacatcctgacccccttcaaccccatcagaaagctggccatcaagatcctggtgcacagcctgttcaacatgctgatcatgtgcaccatcctgaccaactgcgtgttcatgaccatgagcaacccccccgactggaccaagaacgtggagtacaccttcaccggcatctacaccttcgagagcctgatcaagatcctggccagaggcttctgcctggaggacttcaccttcctgagagacccctggaactggctggacttcaccgtgatcaccttcgcctacgtgaccgagttcgtggacctgggcaacgtgagcgccctgagaaccttcagagtgctgagagccctgaagaccatcagcgtgatccccggcctgaagaccatcgtgggcgccctgatccagagcgtgaagaagctgagcgacgtgatgatcctgaccgtgttctgcctgagcgtgttcgccctgatcggcctgcagctgttcatgggcaacctgagaaacaagtgcctgcagtggccccccgacaacagcagcttcgagatcaacatcaccagcttcttcaacaacagcctggacggcaacggcaccaccttcaacagaaccgtgagcatcttcaactgggacgagtacatcgaggacaagagccacttctacttcctggagggccagaacgacgccctgctgtgcggcaacagcagcgacgccggccagtgccccgagggctacatctgcgtgaaggccggcagaaaccccaactacggctacaccagcttcgacaccttcagctgggccttcctgagcctgttcagactgatgacccaggacttctgggagaacctgtaccagctgaccctgagagccgccggcaagacctacatgatcttcttcgtgctggtgatcttcctgggcagcttctacctgatcaacctgatcctggccgtggtggccatggcctacgaggagcagaaccaggccaccctggaggaggccgagcagaaggaggccgagttccagcagatgctggagcagctgaagaagcagcaggaggaggcccaggccgccgccgccgccgccagcgccgagagcagagacttcagcggcgccggcggcatcggcgtgttcagcgagagcagcagcgtggccagcaagctgagcagcaagagcgagaaggagctgaagaacagaagaaagaagaagaagcagaaggagcagagcggcgaggaggagaagaacgacagagtgagaaagagcgagagcgaggacagcatcagaagaaagggcttcagattcagcctggagggcagcagactgacctacgagaagagattcagcagcccccaccagagcctgctgagcatcagaggcagcctgttcagccccagaagaaacagcagagccagcctgttcagcttcagaggcagagccaaggacatcggcagcgagaacgacttcgccgacgacgagcacagcaccttcgaggacaacgacagcagaagagacagcctgttcgtgccccacagacacggcgagagaagacacagcaacgtgagccaggccagcagagccagcagagtgctgcccatcctgcccatgaacggcaagatgcacagcgccgtggactgcaacggcgtggtgagcctggtgggcggccccagcaccctgaccagcgccggccagctgctgcccgagggcaccaccaccgagaccgagatcagaaagagaagaagcagcagctaccacgtgagcatggacctgctggaggaccccaccagcagacagagagccatgagcatcgccagcatcctgaccaacaccatggaggagctggaggagagcagacagaagtgccccccctgctggtacaagttcgccaacatgtgcctgatctgggactgctgcaagccctggctgaaggtgaagcacctggtgaacctggtggtgatggaccccttcgtggacctggccatcaccatctgcatcgtgctgaacaccctgttcatggccatggagcactaccccatgaccgagcagttcagcagcgtgctgagcgtgggcaacctggtgttcaccggcatcttcaccgccgagatgttcctgaagatcatcgccatggacccctactactacttccaggagggctggaacatcttcgacggcttcatcgtgagcctgagcctgatggagctgggcctggccaacgtggagggcctgagcgtgctgagaagcttcagactgctgagagtgttcaagctggccaagagctggcccaccctgaacatgctgatcaagatcatcggcaacagcgtgggcgccctgggcaacctgaccctggtgctggccatcatcgtgttcatcttcgccgtggtgggcatgcagctgttcggcaagagctacaaggagtgcgtgtgcaagatcagcaacgactgcgagctgcccagatggcacatgcacgacttcttccacagcttcctgatcgtgttcagagtgctgtgcggcgagtggatcgagaccatgtgggactgcatggaggtggccggccagaccatgtgcctgaccgtgttcatgatggtgatggtgatcggcaacctggtggtgctgaacctgttcctggccctgctgctgagcagcttcagcagcgacaacctggccgccaccgacgacgacaacgagatgaacaacctgcagatcgccgtgggcagaatgcagaagggcatcgacttcgtgaagagaaagatcagagagttcatccagaaggccttcgtgagaaagcagaaggccctggacgagatcaagcccctggaggacctgaacaacaagaaggacagctgcatcagcaaccacaccaccatcgagatcggcaaggacctgaactacctgaaggacggcaacggcaccaccagcggcatcggcagcagcgtggagaagtacgtggtggacgagagcgactacatgagcttcatcaacaaccccagcctgaccgtgaccgtgcccatcgccgtgggcgagagcgacttcgagaacctgaacaccgaggagttcagcagcgagagcgacatggaggagagcaaggagaagctgaacgccaccagcagcagcgagggcagcaccgtggacatcggcgcccccgccgagggcgagcagcccgaggtggagcccgaggagagcctggagcccgaggcctgcttcaccgaggactgcgtgagaaagttcaagtgctgccagatcagcatcgaggagggcaagggcaagctgtggtggaacctgagaaagacctgctacaagatcgtggagcacaactggttcgagaccttcatcgtgttcatgatcctgctgagcagcggcgccctggccttcgaggacatctacatcgagcagagaaagaccatcaagaccatgctggagtacgccgacaaggtgttcacctacatcttcatcctggagatgctgctgaagtgggtggcctacggcttccaggtgtacttcaccaacgcctggtgctggctggacttcctgatcgtggacgtgagcctggtgagcctgaccgccaacgccctgggctacagcgagctgggcgccatcaagagcctgagaaccctgagagccctgagacccctgagagccctgagcagattcgagggcatgagagtggtggtgaacgccctgctgggcgccatccccagcatcatgaacgtgctgctggtgtgcctgatcttctggctgatcttcagcatcatgggcgtgaacctgttcgccggcaagttctaccactgcatcaactacaccaccggcgagatgttcgacgtgagcgtggtgaacaactacagcgagtgcaaggccctgatcgagagcaaccagaccgccagatggaagaacgtgaaggtgaacttcgacaacgtgggcctgggctacctgagcctgctgcaggtggccaccttcaagggctggatggacatcatgtacgccgccgtggacagcagaaacgtggagctgcagcccaagtacgaggacaacctgtacatgtacctgtacttcgtgatcttcatcatcttcggcagcttcttcaccctgaacctgttcatcggcgtgatcatcgacaacttcaaccagcagaagaagaagttcggcggccaggacatcttcatgaccgaggagcagaagaagtactacaacgccatgaagaagctgggcagcaagaagccccagaagcccatccccagacccgccaacaagttccagggcatggtgttcgacttcgtgaccaagcaggtgttcgacatcagcatcatgatcctgatctgcctgaacatggtgaccatgatggtggagaccgacgaccagagccaggagatgaccaacatcctgtactggatcaacctggtgttcatcgtgctgttcaccggcgagtgcgtgctgaagctgatcagcctgagatactactacttcaccatcggctggaacatcttcgacttcgtggtggtgatcctgagcatcgtgggcatgttcctggccgagctgatcgagaagtacttcgtgagccccaccctgttcagagtgatcagactggccagaatcggcagaatcctgagactgatcaagggcgccaagggcatcagaaccctgctgttcgccctgatgatgagcctgcccgccctgttcaacatcggcctgctgctgttcctggtgatgttcatctacgccatcttcggcatgagcaacttcgcctacgtgaagagagaggtgggcatcgacgacatgttcaacttcgagaccttcggcaacagcatgatctgcctgttccagatcaccaccagcgccggctgggacggcctgctggcccccatcctgaacagcggcccccccgactgcgaccccgacaaggaccaccccggcagcagcgtgaagggcgactgcggcaaccccagcgtgggcatcttcttcttcgtgagctacatcatcatcagcttcctggtggtggtgaacatgtacatcgccgtgatcctggagaacttcagcgtggccaccgaggagagcgccgagcccctgagcgaggacgacttcgagatgttctacgaggtgtgggagaagttcgaccccgacgccacccagttcatcgagttcgccaagctgagcgacttcgccgacgccctggacccccccctgctgatcgccaagcccaacaaggtgcagctgatcgccatggacctgcccatggtgagcggcgacagaatccactgcctggacatcctgttcgccttcaccaagagagtgctgggcgagagcggcgagatggacgccctgagaatccagatggaggagagattcatggccagcaaccccagcaaggtgagctacgagcccatcaccaccaccctgaagagaaagcaggaggaggtgagcgccatcatcatccagagagcctacagaagatacctgctgaagcagaaggtgaagaaggtgagcagcatctacaagaaggacaagggcaaggagtgcgacggcacccccatcaaggaggacaccctgatcgacaagctgaacgagaacagcacccccgagaagaccgacatgacccccagcaccaccagcccccccagctacgacagcgtgaccaagcccgagaaggagaagttcgagaaggacaagagcgagaaggaggacaagggcaaggacatcagagagagcaagaagtag

SEQ ID NO: 99288 - DNA, 6018 bp, synthetic construct
  misc_feature 1..6018: note = Description of Artificial Sequence: Synthetic coding sequence
  source 1..6018: mol_type = other DNA
atggcccagagcgtgctggtgccccccggccccgacagcttcagattcttcaccagagagagcctggccgccatcgagcagagaatcgccgaggagaaggccaagagacccaagcaggagagaaaggacgaggacgacgagaacggccccaagcccaacagcgacctggaggccggcaagagcctgcccttcatctacggcgacatcccccccgagatggtgagcgtgcccctggaggacctggacccctactacatcaacaagaagaccttcatcgtgctgaacaagggcaaggccatcagcagattcagcgccacccccgccctgtacatcctgacccccttcaaccccatcagaaagctggccatcaagatcctggtgcacagcctgttcaacatgctgatcatgtgcaccatcctgaccaactgcgtgttcatgaccatgagcaacccccccgactggaccaagaacgtggagtacaccttcaccggcatctacaccttcgagagcctgatcaagatcctggccagaggcttctgcctggaggacttcaccttcctgagagacccctggaactggctggacttcaccgtgatcaccttcgcctacgtgaccgagttcgtgaacctgggcaacgtgagcgccctgagaaccttcagagtgctgagagccctgaagaccatcagcgtgatccccggcctgaagaccatcgtgggcgccctgatccagagcgtgaagaagctgagcgacgtgatgatcctgaccgtgttctgcctgagcgtgttcgccctgatcggcctgcagctgttcatgggcaacctgagaaacaagtgcctgcagtggccccccgacaacagcagcttcgagatcaacatcaccagcttcttcaacaacagcctggacggcaacggcaccaccttcaacagaaccgtgagcatcttcaactgggacgagtacatcgaggacaagagccacttctacttcctggagggccagaacgacgccctgctgtgcggcaacagcagcgacgccggccagtgccccgagggctacatctgcgtgaaggccggcagaaaccccaactacggctacaccagcttcgacaccttcagctgggccttcctgagcctgttcagactgatgacccaggacttctgggagaacctgtaccagctgaccctgagagccgccggcaagacctacatgatcttcttcgtgctggtgatcttcctgggcagcttctacctgatcaacctgatcctggccgtggtggccatggcctacgaggagcagaaccaggccaccctggaggaggccgagcagaaggaggccgagttccagcagatgctggagcagctgaagaagcagcaggaggaggcccaggccgccgccgccgccgccagcgccgagagcagagacttcagcggcgccggcggcatcggcgtgttcagcgagagcagcagcgtggccagcaagctgagcagcaagagcgagaaggagctgaagaacagaagaaagaagaagaagcagaaggagcagagcggcgaggaggagaagaacgacagagtgagaaagagcgagagcgaggacagcatcagaagaaagggcttcagattcagcctggagggcagcagactgacctacgagaagagattcagcagcccccaccagagcctgctgagcatcagaggcagcctgttcagccccagaagaaacagcagagccagcctgttcagcttcagaggcagagccaaggacatcggcagcgagaacgacttcgccgacgacgagcacagcaccttcgaggacaacgacagcagaagagacagcctgttcgtgccccacagacacggcgagagaagacacagcaacgtgagccaggccagcagagccagcagagtgctgcccatcctgcccatgaacggcaagatgcacagcgccgtggactgcaacggcgtggtgagcctggtgggcggccccagcaccctgaccagcgccggccagctgctgcccgagggcaccaccaccgagaccgagatcagaaagagaagaagcagcagctaccacgtgagcatggacctgctggaggaccccaccagcagacagagagccatgagcatcgccagcatcctgaccaacaccatggaggagctggaggagagcagacagaagtgccccccctgctggtacaagttcgccaacatgtgcctgatctgggactgctgcaagccctggctgaaggtgaagcacctggtgaacctggtggtgatggaccccttcgtggacctggccatcaccatctgcatcgtgctgaacaccctgttcatggccatggagcactaccccatgaccgagcagttcagcagcgtgctgagcgtgggcaacctggtgttcaccggcatcttcaccgccgagatgttcctgaagatcatcgccatggacccctactactacttccaggagggctggaacatcttcgacggcttcatcgtgagcctgagcctgatggagctgggcctggccaacgtggagggcctgagcgtgctgagaagcttcagactgctgagagtgttcaagctggccaagagctggcccaccctgaacatgctgatcaagatcatcggcaacagcgtgggcgccctgggcaacctgaccctggtgctggccatcatcgtgttcatcttcgccgtggtgggcatgcagctgttcggcaagagctacaaggagtgcgtgtgcaagatcagcaacgactgcgagctgcccagatggcacatgcacgacttcttccacagcttcctgatcgtgttcagagtgctgtgcggcgagtggatcgagaccatgtgggactgcatggaggtggccggccagaccatgtgcctgaccgtgttcatgatggtgatggtgatcggcaacctggtggtgctgaacctgttcctggccctgctgctgagcagcttcagcagcgacaacctggccgccaccgacgacgacaacgagatgaacaacctgcagatcgccgtgggcagaatgcagaagggcatcgacttcgtgaagagaaagatcagagagttcatccagaaggccttcgtgagaaagcagaaggccctggacgagatcaagcccctggaggacctgaacaacaagaaggacagctgcatcagcaaccacaccaccatcgagatcggcaaggacctgaactacctgaaggacggcaacggcaccaccagcggcatcggcagcagcgtggagaagtacgtggtggacgagagcgactacatgagcttcatcaacaaccccagcctgaccgtgaccgtgcccatcgccgtgggcgagagcgacttcgagaacctgaacaccgaggagttcagcagcgagagcgacatggaggagagcaaggagaagctgaacgccaccagcagcagcgagggcagcaccgtggacatcggcgcccccgccgagggcgagcagcccgaggtggagcccgaggagagcctggagcccgaggcctgcttcaccgaggactgcgtgagaaagttcaagtgctgccagatcagcatcgaggagggcaagggcaagctgtggtggaacctgagaaagacctgctacaagatcgtggagcacaactggttcgagaccttcatcgtgttcatgatcctgctgagcagcggcgccctggccttcgaggacatctacatcgagcagagaaagaccatcaagaccatgctggagtacgccgacaaggtgttcacctacatcttcatcctggagatgctgctgaagtgggtggcctacggcttccaggtgtacttcaccaacgcctggtgctggctggacttcctgatcgtggacgtgagcctggtgagcctgaccgccaacgccctgggctacagcgagctgggcgccatcaagagcctgagaaccctgagagccctgagacccctgagagccctgagcagattcgagggcatgagagtggtggtgaacgccctgctgggcgccatccccagcatcatgaacgtgctgctggtgtgcctgatcttctggctgatcttcagcatcatgggcgtgaacctgttcgccggcaagttctaccactgcatcaactacaccaccggcgagatgttcgacgtgagcgtggtgaacaactacagcgagtgcaaggccctgatcgagagcaaccagaccgccagatggaagaacgtgaaggtgaacttcgacaacgtgggcctgggctacctgagcctgctgcaggtggccaccttcaagggctggatggacatcatgtacgccgccgtggacagcagaaacgtggagctgcagcccaagtacgaggacaacctgtacatgtacctgtacttcgtgatcttcatcatcttcggcagcttcttcaccctgaacctgttcatcggcgtgatcatcgacaacttcaaccagcagaagaagaagttcggcggccaggacatcttcatgaccgaggagcagaagaagtactacaacgccatgaagaagctgggcagcaagaagccccagaagcccatccccagacccgccaacaagttccagggcatggtgttcgacttcgtgaccaagcaggtgttcgacatcagcatcatgatcctgatctgcctgaacatggtgaccatgatggtggagaccgacgaccagagccaggagatgaccaacatcctgtactggatcaacctggtgttcatcgtgctgttcaccggcgagtgcgtgctgaagctgatcagcctgagatactactacttcaccatcggctggaacatcttcgacttcgtggtggtgatcctgagcatcgtgggcatgttcctggccgagctgatcgagaagtacttcgtgagccccaccctgttcagagtgatcagactggccagaatcggcagaatcctgagactgatcaagggcgccaagggcatcagaaccctgctgttcgccctgatgatgagcctgcccgccctgttcaacatcggcctgctgctgttcctggtgatgttcatctacgccatcttcggcatgagcaacttcgcctacgtgaagagagaggtgggcatcgacgacatgttcaacttcgagaccttcggcaacagcatgatctgcctgttccagatcaccaccagcgccggctgggacggcctgctggcccccatcctgaacagcggcccccccgactgcgaccccgacaaggaccaccccggcagcagcgtgaagggcgactgcggcaaccccagcgtgggcatcttcttcttcgtgagctacatcatcatcagcttcctggtggtggtgaacatgtacatcgccgtgatcctggagaacttcagcgtggccaccgaggagagcgccgagcccctgagcgaggacgacttcgagatgttctacgaggtgtgggagaagttcgaccccgacgccacccagttcatcgagttcgccaagctgagcgacttcgccgacgccctggacccccccctgctgatcgccaagcccaacaaggtgcagctgatcgccatggacctgcccatggtgagcggcgacagaatccactgcctggacatcctgttcgccttcaccaagagagtgctgggcgagagcggcgagatggacgccctgagaatccagatggaggagagattcatggccagcaaccccagcaaggtgagctacgagcccatcaccaccaccctgaagagaaagcaggaggaggtgagcgccatcatcatccagagagcctacagaagatacctgctgaagcagaaggtgaagaaggtgagcagcatctacaagaaggacaagggcaaggagtgcgacggcacccccatcaaggaggacaccctgatcgacaagctgaacgagaacagcacccccgagaagaccgacatgacccccagcaccaccagcccccccagctacgacagcgtgaccaagcccgagaaggagaagttcgagaaggacaagagcgagaaggaggacaagggcaaggacatcagagagagcaagaagtag

SEQ ID NO: 99289 - DNA, 6018 bp, synthetic construct; identical to SEQ ID NO: 99288
  misc_feature 1..6018: note = Description of Artificial Sequence: Synthetic coding sequence
  source 1..6018: mol_type = other DNA

SEQ ID NO: 99290 - DNA, 6018 bp, synthetic construct; identical to SEQ ID NO: 99287
  misc_feature 1..6018: note = Description of Artificial Sequence: Synthetic coding sequence
  source 1..6018: mol_type = other DNA

SEQ ID NO: 99291 - DNA, 1512 bp, synthetic construct
  misc_feature 1..1512: note = Description of Artificial Sequence: Synthetic coding sequence
  source 1..1512: mol_type = other DNA
atggcccagagcgtgctggtgccccccggccccgacagcttcagattcttcaccagagagagcctggccgccatcgagcagagaatcgccgaggagaaggccaagagacccaagcaggagagaaaggacgaggacgacgagaacggccccaagcccaacagcgacctggaggccggcaagagcctgcccttcatctacggcgacatcccccccgagatggtgagcgtgcccctggaggacctggacccctactacatcaacaagaagaccttcatcgtgctgaacaagggcaaggccatcagcagattcagcgccacccccgccctgtacatcctgacccccttcaaccccatcagaaagctggccatcaagatcctggtgcacagcctgttcaacatgctgatcatgtgcaccatcctgaccaactgcgtgttcatgaccatgagcaacccccccgactggaccaagaacgtggagtacaccttcaccggcatctacaccttcgagagcctgatcaagatcctggccagaggcttctgcctggaggacttcaccttcctgagagacccctggaactggctggacttcaccgtgatcaccttcgcctacgtgaccgagttcgtggacctgggcaacgtgagcgccctgagaaccttcagagtgctgagagccctgaagaccatcagcgtgatccccggcctgaagaccatcgtgggcgccctgatccagagcgtgaagaagctgagcgacgtgatgatcctgaccgtgttctgcctgagcgtgttcgccctgatcggcctgcagctgttcatgggcaacctgagaaacaagtgcctgcagtggccccccgacaacagcagcttcgagatcaacatcaccagcttcttcaacaacagcctggacggcaacggcaccaccttcaacagaaccgtgagcatcttcaactgggacgagtacatcgaggacaagagccacttctacttcctggagggccagaacgacgccctgctgtgcggcaacagcagcgacgccggccagtgccccgagggctacatctgcgtgaaggccggcagaaaccccaactacggctacaccagcttcgacaccttcagctgggccttcctgagcctgttcagactgatgacccaggacttctgggagaacctgtaccagctgaccctgagagccgccggcaagacctacatgatcttcttcgtgctggtgatcttcctgggcagcttctacctgatcaacctgatcctggccgtggtggccatggcctacgaggagcagaaccaggccaccctggaggaggccgagcagaaggaggccgagttccagcagatgctggagcagctgaagaagcagcaggaggaggcccaggccgccgccgccgccgccagcgccgagagcagagacttcagcggcgccggcggcatcggcgtgttcagcgagagcagcagcgtggccagcaagctgagcagcaagagcgagaaggagctgaagaactag

SEQ ID NO: 99292 - DNA, 648 bp, synthetic construct
  misc_feature 1..648: note = Description of Artificial Sequence: Synthetic coding sequence
  source 1..648: mol_type = other DNA
atgcacagagacgcctggctgcccagacccgccttcagcctgaccggcctgagcctgttcttcagcctggtgccccccggcagaagcatggaggtgaccgtgcccgccaccctgaacgtgctgaacggcagcgacgccagactgccctgcaccttcaacagctgctacaccgtgaaccacaagcagttcagcctgaactggacctaccaggagtgcaacaactgcagcgaggagatgttcctgcagttcagaatgaagatcatcaacctgaagctggagagattccaggacagagtggagttcagcggcaaccccagcaagtacgacgtgagcgtgatgctgagaaacgtgcagcccgaggacgagggcatctacaactgctacatcatgaacccccccgacagacacagaggccacggcaagatccacctgcaggtgctgatggaggagccccccgagagagacagcaccgtggccgtgatcgtgggcgccagcgtgggcggcttcctggccgtggtgatcctggtgctgatggtggtgaagtgcgtgagaagaaagaaggagcagaagctgagcaccgacgacctgaagaccgaggaggagggcaagaccgacggcgagggcaaccccgacgacggcgccaagtag

SEQ ID NO: 99293 - DNA, 6003 bp, synthetic construct
  misc_feature 1..6003: note = Description of Artificial Sequence: Synthetic coding sequence
  source 1..6003: mol_type = other DNA
atggcccaggccctgctggtgccccccggccccgagagcttcagactgttcaccagagagagcctggccgccatcgagaagagagccgccgaggagaaggccaagaagcccaagaaggagcaggacaacgacgacgagaacaagcccaagcccaacagcgacctggaggccggcaagaacctgcccttcatctacggcgacatcccccccgagatggtgagcgagcccctggaggacctggacccctactacatcaacaagaagaccttcatcgtgatgaacaagggcaaggccatcttcagattcagcgccaccagcgccctgtacatcctgacccccctgaaccccgtgagaaagatcgccatcaagatcctggtgcacagcctgttcagcatgctgatcatgtgcaccatcctgaccaactgcgtgttcatgaccctgagcaacccccccgactggaccaagaacgtggagtacaccttcaccggcatctacaccttcgagagcctgatcaagatcctggccagaggcttctgcctggaggacttcaccttcctgagagacccctggaactggctggacttcagcgtgatcgtgatggcctacgtgaccgagttcgtggacctgggcaacgtgagcgccctgagaaccttcagagtgctgagagccctgaagaccatcagcgtgatccccggcctgaagaccatcgtgggcgccctgatccagagcgtgaagaagctgagcgacgtgatgatcctgaccgtgttctgcctgagcgtgttcgccctgatcggcctgcagctgttcatgggcaacctgagaaacaagtgcctgcagtggccccccagcgacagcgccttcgagaccaacaccaccagctacttcaacggcaccatggacagcaacggcaccttcgtgaacgtgaccatgagcaccttcaactggaaggactacatcggcgacgacagccacttctacgtgctggacggccagaaggaccccctgctgtgcggcaacggcagcgacgccggccagtgccccgagggctacatctgcgtgaaggccggcagaaaccccaactacggctacaccagcttcgacaccttcagctgggccttcctgagcctgttcagactgatgacccaggactactgggagaacctgtaccagctgaccctgagagccgccggcaagacctacatgatcttcttcgtgctggtgatcttcctgggcagcttctacctggtgaacctgatcctggccgtggtggccatggcctacgaggagcagaaccaggccaccctggaggaggccgagcagaaggaggccgagttccagcagatgctggagcagctgaagaagcagcaggaggaggcccaggccgtggccgccgccagcgccgccagcagagacttcagcggcatcggcggcctgggcgagctgctggagagcagcagcgaggccagcaagctgagcagcaagagcgccaaggagtggagaaacagaagaaagaagagaagacagagagagcacctggagggcaacaacaagggcgagagagacagcttccccaagagcgagagcgaggacagcgtgaagagaagcagcttcctgttcagcatggacggcaacagactgaccagcgacaagaagttctgcagcccccaccagagcctgctgagcatcagaggcagcctgttcagccccagaagaaacagcaagaccagcatcttcagcttcagaggcagagccaaggacgtgggcagcgagaacgacttcgccgacgacgagcacagcaccttcgaggacagcgagagcagaagagacagcctgttcgtgccccacagacacggcgagagaagaaacagcaacgtgagccaggccagcatgagcagcagaatggtgcccggcctgcccgccaacggcaagatgcacagcaccgtggactgcaacggcgtggtgagcctggtgggcggccccagcgccctgaccagccccaccggccagctgccccccgagggcaccaccaccgagaccgaggtgagaaagagaagactgagcagctaccagatcagcatggagatgctggaggacagcagcggcagacagagagccgtgagcatcgccagcatcctgaccaacaccatggaggagctggaggagagcagacagaagtgccccccctgctggtacagattcgccaacgtgttcctgatctgggactgctgcgacgcctggctgaaggtgaagcacctggtgaacctgatcgtgatggaccccttcgtggacctggccatcaccatctgcatcgtgctgaacaccctgttcatggccatggagcactaccccatgaccgagcagttcagcagcgtgctgaccgtgggcaacctggtgttcaccggcatcttcaccgccgagatggtgctgaagatcatcgccatggacccctactactacttccaggagggctggaacatcttcgacggcatcatcgtgagcctgagcctgatggagctgggcctgagcaacgtggagggcctgagcgtgctgagaagcttcagactgctgagagtgttcaagctggccaagagctggcccaccctgaacatgctgatcaagatcatcggcaacagcgtgggcgccctgggcaacctgaccctggtgctggccatcatcgtgttcatcttcgccgtggtgggcatgcagctgttcggcaagagctacaaggagtgcgtgtgcaagatcaacgacgactgcaccctgcccagatggcacatgaacgacttcttccacagcttcctgatcgtgttcagagtgctgtgcggcgagtggatcgagaccatgtgggactgcatggaggtggccggccagaccatgtgcctgatcgtgttcatgctggtgatggtgatcggcaacctggtggtgctgaacctgttcctggccctgctgctgagcagcttcagcagcgacaacctggccgccaccgacgacgacaacgagatgaacaacctgcagatcgccgtgggcagaatgcagaagggcatcgactacgtgaagaacaagatgagagagtgcttccagaaggccttcttcagaaagcccaaggtgatcgagatccacgagggcaacaagatcgacagctgcatgagcaacaacaccggcatcgagatcagcaaggagctgaactacctgagagacggcaacggcaccaccagcggcgtgggcaccggcagcagcgtggagaagtacgtgatcgacgagaacgactacatgagcttcatcaacaaccccagcctgaccgtgaccgtgcccatcgccgtgggcgagagcgacttcgagaacctgaacaccgaggagttcagcagcgagagcgagctggaggagagcaaggagaagctgaacgccaccagcagcagcgagggcagcaccgtggacgtggtgctgcccagagagggcgagcaggccgagaccgagcccgaggaggacctgaagcccgaggcctgcttcaccgagggctgcatcaagaagttccccttctgccaggtgagcaccgaggagggcaagggcaagatctggtggaacctgagaaagacctgctacagcatcgtggagcacaactggttcgagaccttcatcgtgttcatgatcctgctgagcagcggcgccctggccttcgaggacatctacatcgagcagagaaagaccatcaagaccatgctggagtacgccgacaaggtgttcacctacatcttcatcctggagatgctgctgaagtgggtggcctacggcttccagacctacttcaccaacgcctggtgctggctggacttcctgatcgtggacgtgagcctggtgagcctggtggccaacgccctgggctacagcgagctgggcgccatcaagagcctgagaaccctgagagccctgagacccctgagagccctgagcagattcgagggcatgagagtggtggtgaacgccctggtgggcgccatccccagcatcatgaacgtgctgctggtgtgcctgatcttctggctgatcttcagcatcatgggcgtgaacctgttcgccggcaagttctaccactgcgtgaacatgaccaccggcaacatgttcgacatcagcgacgtgaacaacctgagcgactgccaggccctgggcaagcaggccagatggaagaacgtgaaggtgaacttcgacaacgtgggcgccggctacctggccctgctgcaggtggccaccttcaagggctggatggacatcatgtacgccgccgtggacagcagagacgtgaagctgcagcccgtgtacgaggagaacctgtacatgtacctgtacttcgtgatcttcatcatcttcggcagcttcttcaccctgaacctgttcatcggcgtgatcatcgacaacttcaaccagcagaagaagaagttcggcggccaggacatcttcatgaccgaggagcagaagaagtactacaacgccatgaagaagctgggcagcaagaagccccagaagcccatccccagacccgccaacaagttccagggcatggtgttcgacttcgtgaccagacaggtgttcgacatcagcatcatgatcctgatctgcctgaacatggtgaccatgatggtggagaccgacgaccagggcaagtacatgaccctggtgctgagcagaatcaacctggtgttcatcgtgctgttcaccggcgagttcgtgctgaagctggtgagcctgagacactactacttcaccatcggctggaacatcttcgacttcgtggtggtgatcctgagcatcgtgggcatgttcctggccgagatgatcgagaagtacttcgtgagccccaccctgttcagagtgatcagactggccagaatcggcagaatcctgagactgatcaagggcgccaagggcatcagaaccctgctgttcgccctgatgatgagcctgcccgccctgttcaacatcggcctgctgctgttcctggtgatgttcatctacgccatcttcggcatgagcaacttcgcctacgtgaagaaggaggccggcatcgacgacatgttcaacttcgagaccttcggcaacagcatgatctgcctgttccagatcaccaccagcgccggctgggacggcctgctggcccccatcctgaacagcgccccccccgactgcgaccccgacaccatccaccccggcagcagcgtgaagggcgactgcggcaaccccagcgtgggcatcttcttcttcgtgagctacatcatcatcagcttcctggtggtggtgaacatgtacatcgccgtgatcctggagaacttcagcgtggccaccgaggagagcgccgagcccctgagcgaggacgacttcgagatgttctacgaggtgtgggagaagttcgaccccgacgccacccagttcatcgagttcagcaagctgagcgacttcgccgccgccctggacccccccctgctgatcgccaagcccaacaaggtgcagctgatcgccatggacctgcccatggtgagcggcgacagaatccactgcctggacatcctgttcgccttcaccaagagagtgctgggcgagagcggcgagatggacgccctgagaatccagatggaggacagattcatggccagcaaccccagcaaggtgagctacgagcccatcaccaccaccctgaagagaaagcaggaggaggtgagcgccgccatcatccagagaaacttcagatgctacctgctgaagcagagactgaagaacatcagcagcaactacaacaaggaggccatcaagggcagaatcgacctgcccatcaagcaggacatgatcatcgacaagctgaacggcaacagcacccccgagaagaccgacggcagcagcagcaccaccagcccccccagctacgacagcgtgaccaagcccgacaaggagaagttcgagaaggacaagcccgagaaggagagcaagggcaaggaggtgagagagaaccagaagtag

SEQ ID NO: 99294 - DNA, 6003 bp, synthetic construct
  misc_feature 1..6003: note = Description of Artificial Sequence: Synthetic coding sequence
  source 1..6003: mol_type = other DNA
atggcccaggccctgctggtgccccccggccccgagagcttcagactgttcaccagagagagcctggccgccatcgagaagagagccgccgaggagaaggccaagaagcccaagaaggagcaggacaacgacgacgagaacaagcccaagcccaacagcgacctggaggccggcaagaacctgcccttcatctacggcgacatcccccccgagatggtgagcgagcccctggaggacctggacccctactacatcaacaagaagaccttcatcgtgatgaacaagggcaaggccatcttcagattcagcgccaccagcgccctgtacatcctgacccccctgaaccccgtgagaaagatcgccatcaagatcctggtgcacagcctgttcagcatgctgatcatgtgcaccatcctgaccaactgcgtgttcatgaccctgagcaacccccccgactggaccaagaacgtggagtacaccttcaccggcatctacaccttcgagagcctgatcaagatcctggccagaggcttctgcctggaggacttcaccttcctgagagacccctggaactggctggacttcagcgtgatcgtgatggcctacgtgaccgagttcgtgagcctgggcaacgtgagcgccctgagaaccttcagagtgctgagagccctgaagaccatcagcgtgatccccggcctgaagaccatcgtgggcgccctgatccagagcgtgaagaagctgagcgacgtgatgatcctgaccgtgttctgcctgagcgtgttcgccctgatcggcctgcagctgttcatgggcaacctgagaaacaagtgcctgcagtggccccccagcgacagcgccttcgagaccaacaccaccagctacttcaacggcaccatggacagcaacggcaccttcgtgaacgtgaccatgagcaccttcaactggaaggactacatcggcgacgacagccacttctacgtgctggacggccagaaggaccccctgctgtgcggcaacggcagcgacgccggccagtgccccgagggctacatctgcgtgaaggccggcagaaaccccaactacggctacaccagcttcgacaccttcagctgggccttcctgagcctgttcagactgatgacccaggactactgggagaacctgtaccagctgaccctgagagccgccggcaagacctacatgatcttcttcgtgctggtgatcttcctgggcagcttctacctggtgaacctgatcctggccgtggtggccatggcctacgaggagcagaaccaggccaccctggaggaggccgagcagaaggaggccgagttccagcagatgctggagcagctgaagaagcagcaggaggaggcccaggccgtggccgccgccagcgccgccagcagagacttcagcggcatcggcggcctgggcgagctgctggagagcagcagcgaggccagcaagctgagcagcaagagcgccaaggagtggagaaacagaagaaagaagagaagacagagagagcacctggagggcaacaacaagggcgagagagacagcttccccaagagcgagagcgaggacagcgtgaagagaagcagcttcctgttcagcatggacggcaacagactgaccagcgacaagaagttctgcagcccccaccagagcctgctgagcatcagaggcagcctgttcagccccagaagaaacagcaagaccagcatcttcagcttcagaggcagagccaaggacgtgggcagcgagaacgacttcgccgacgacgagcacagcaccttcgaggacagcgagagcagaagagacagcctgttcgtgccccacagacacggcgagagaagaaacagcaacgtgagccaggccagcatgagcagcagaatggtgcccggcctgcccgccaacggcaagatgcacagcaccgtggactgcaacggcgtggtgagcctggtgggcggccccagcgccctgaccagccccaccggccagctgccccccgagggcaccaccaccgagaccgaggtgagaaagagaagactgagcagctaccagatcagcatggagatgctggaggacagcagcggcagacagagagccgtgagcatcgccagcatcctgaccaacaccatggaggagctggaggagagcagacagaagtgccccccctgctggtacagattcgccaacgtgttcctgatctgggactgctgcgacgcctggctgaaggtgaagcacctggtgaacctgatcgtgatggaccccttcgtggacctggccatcaccatctgcatcgtgctgaacaccctgttcatggccatggagcactaccccatgaccgagcagttcagcagcgtgctgaccgtgggcaacctggtgttcaccggcatcttcaccgccgagatggtgctgaagatcatcgccatggacccctactactacttccaggagggctggaacatcttcgacggcatcatcgtgagcctgagcctgatggagctgggcctgagcaacgtggagggcctgagcgtgctgagaagcttcagactgctgagagtgttcaagctggccaagagctggcccaccctgaacatgctgatcaagatcatcggcaacagcgtgggcgccctgggcaacctgaccctggtgctggccatcatcgtgttcatcttcgccgtggtgggcatgcagctgttcggcaagagctacaaggagtgcgtgtgcaagatcaacgacgactgcaccctgcccagatggcacatgaacgacttcttccacagcttcctgatcgtgttcagagtgctgtgcggcgagtggatcgagaccatgtgggactgcatggaggtggccggccagaccatgtgcctgatcgtgttcatgctggtgatggtgatcggcaacctggtggtgctgaacctgttcctggccctgctgctgagcagcttcagcagcgacaacctggccgccaccgacgacgacaacgagatgaacaacctgcagatcgccgtgggcagaatgcagaagggcatcgactacgtgaagaacaagatgagagagtgcttccagaaggccttcttcagaaagcccaaggtgatcgagatccacgagggcaacaagatcgacagctgcatgagcaacaacaccggcatcgagatcagcaaggagctgaactacctgagagacggcaacggcaccaccagcggcgtgggcaccggcagcagcgtggagaagtacgtgatcgacgagaacgactacatgagcttcatcaacaaccccagcctgaccgtgaccgtgcccatcgccgtgggcgagagcgacttcgagaacctgaacaccgaggagttcagcagcgagagcgagctggaggagagcaaggagaagctgaacgccaccagcagcagcgagggcagcaccgtggacgtggtgctgcccagagagggcgagcaggccgagaccgagcccgaggaggacctgaagcccgaggcctgcttcaccgagggctgcatcaagaagttccccttctgccaggtgagcaccgaggagggcaagggcaagatctggtggaacctgagaaagacctgctacagcatcgtggagcacaactggttcgagaccttcatcgtgttcatgatcctgctgagcagcggcgccctggccttcgaggacatctacatcgagcagagaaagaccatcaagaccatgctggagtacgccgacaaggtgttcacctacatcttcatcctggagatgctgctgaagtgggtggcctacggcttccagacctacttcaccaacgcctggtgctggctggacttcctgatcgtggacgtgagcctggtgagcctggtggccaacgccctgggctacagcgagctgggcgccatcaagagcctgagaaccctgagagccctgagacccctgagagccctgagcagattcgagggcatgagagtggtggtgaacgccctggtgggcgccatccccagcatcatgaacgtgctgctggtgtgcctgatcttctggctgatcttcagcatcatgggcgtgaacctgttcgccggcaagttctaccactgcgtgaacatgaccaccggcaacatgttcgacatcagcgacgtgaacaacctgagcgactgccaggccctgggcaagcaggccagatggaagaacgtgaaggtgaacttcgacaacgtgggcgccggctacctggccctgctgcaggtggccaccttcaagggctggatggacatcatgtacgccgccgtggacagcagagacgtgaagctgcagcccgtgtacgaggagaacctgtacatgtacctgtacttcgtgatcttcatcatcttcggcagcttcttcaccctgaacctgttcatcggcgtgatcatcgacaacttcaaccagcagaagaagaagttcggcggccaggacatcttcatgaccgaggagcagaagaagtactacaacgccatgaagaagctgggcagcaagaagccccagaagcccatccccagacccgccaacaagttccagggcatggtgttcgacttcgtgaccagacaggtgttcgacatcagcatcatgatcctgatctgcctgaacatggtgaccatgatggtggagaccgacgaccagggcaagtacatgaccctggtgctgagcagaatcaacctggtgttcatcgtgctgttcaccggcgagttcgtgctgaagctggtgagcctgagacactactacttcaccatcggctggaacatcttcgacttcgtggtggtgatcctgagcatcgtgggcatgttcctggccgagatgatcgagaagtacttcgtgagccccaccctgttcagagtgatcagactggccagaatcggcagaatcctgagactgatcaagggcgccaagggcatcagaaccctgctgttcgccctgatgatgagcctgcccgccctgttcaacatcggcctgctgctgttcctggtgatgttcatctacgccatcttcggcatgagcaacttcgcctacgtgaagaaggaggccggcatcgacgacatgttcaacttcgagaccttcggcaacagcatgatctgcctgttccagatcaccaccagcgccggctgggacggcctgctggcccccatcctgaacagcgccccccccgactgcgaccccgacaccatccaccccggcagcagcgtgaagggcgactgcggcaaccccagcgtgggcatcttcttcttcgtgagctacatcatcatcagcttcctggtggtggtgaacatgtacatcgccgtgatcctggagaacttcagcgtggccaccgaggagagcgccgagcccctgagcgaggacgacttcgagatgttctacgaggtgtgggagaagttcgaccccgacgccacccagttcatcgagttcagcaagctgagcgacttcgccgccgccctggacccccccctgctgatcgccaagcccaacaaggtgcagctgatcgccatggacctgcccatggtgagcggcgacagaatccactgcctggacatcctgttcgccttcaccaagagagtgctgggcgagagcggcgagatggacgccctgagaatccagatggaggacagattcatggccagcaaccccagcaaggtgagctacgagcccatcaccaccaccctgaagagaaagcaggaggaggtgagcgccgccatcatccagagaaacttcagatgctacctgctgaagcagagactgaagaacatcagcagcaactacaacaaggaggccatcaagggcagaatcgacctgcccatcaagcaggacatgatcatcgacaagctgaacggcaacagcacccccgagaagaccgacggcagcagcagcaccaccagcccccccagctacgacagcgtgaccaagcccgacaaggagaagttcgagaaggacaagcccgagaaggagagcaagggcaaggaggtgagagagaaccagaagtag

SEQ ID NO: 99295 - DNA, 5856 bp, synthetic construct
  misc_feature 1..5856: note = Description of Artificial Sequence: Synthetic coding sequence
  source 1..5856: mol_type = other DNA
atggcccaggccctgctggtgccccccggccccgagagcttcagactgttcaccagagagagcctggccgccatcgagaagagagccgccgaggagaaggccaagaagcccaagaaggagcaggacaacgacgacgagaacaagcccaagcccaacagcgacctggaggccggcaagaacctgcccttcatctacggcgacatcccccccgagatggtgagcgagcccctggaggacctggacccctactacatcaacaagaagaccttcatcgtgatgaacaagggcaaggccatcttcagattcagcgccaccagcgccctgtacatcctgacccccctgaaccccgtgagaaagatcgccatcaagatcctggtgcacagcctgttcagcatgctgatcatgtgcaccatcctgaccaactgcgtgttcatgaccctgagcaacccccccgactggaccaagaacgtggagtacaccttcaccggcatctacaccttcgagagcctgatcaagatcctggccagaggcttctgcctggaggacttcaccttcctgagagacccctggaactggctggacttcagcgtgatcgtgatggcctacgtgaccgagttcgtgagcctgggcaacgtgagcgccctgagaaccttcagagtgctgagagccctgaagaccatcagcgtgatccccggcctgaagaccatcgtgggcgccctgatccagagcgtgaagaagctgagcgacgtgatgatcctgaccgtgttctgcctgagcgtgttcgccctgatcggcctgcagctgttcatgggcaacctgagaaacaagtgcctgcagtggccccccagcgacagcgccttcgagaccaacaccaccagctacttcaacggcaccatggacagcaacggcaccttcgtgaacgtgaccatgagcaccttcaactggaaggactacatcggcgacgacagccacttctacgtgctggacggccagaaggaccccctgctgtgcggcaacggcagcgacgccggccagtgccccgagggctacatctgcgtgaaggccggcagaaaccccaactacggctacaccagcttcgacaccttcagctgggccttcctgagcctgttcagactgatgacccaggactactgggagaacctgtaccagctgaccctgagagccgccggcaagacctacatgatcttcttcgtgctggtgatcttcctgggcagcttctacctggtgaacctgatcctggccgtggtggccatggcctacgaggagcagaaccaggccaccctggaggaggccgagcagaaggaggccgagttccagcagatgctggagcagctgaagaagcagcaggaggaggcccaggccgtggccgccgccagcgccgccagcagagacttcagcggcatcggcggcctgggcgagctgctggagagcagcagcgaggccagcaagctgagcagcaagagcgccaaggagtggagaaacagaagaaagaagagaagacagagagagcacctggagggcaacaacaagggcgagagagacagcttccccaagagcgagagcgaggacagcgtgaagagaagcagcttcctgttcagcatggacggcaacagactgaccagcgacaagaagttctgcagcccccaccagagcctgctgagcatcagaggcagcctgttcagccccagaagaaacagcaagaccagcatcttcagcttcagaggcagagccaaggacgtgggcagcgagaacgacttcgccgacgacgagcacagcaccttcgaggacagcgagagcagaagagacagcctgttcgtgccccacagacacggcgagagaagaaacagcaacggcaccaccaccgagaccgaggtgagaaagagaagactgagcagctaccagatcagcatggagatgctggaggacagcagcggcagacagagagccgtgagcatcgccagcatcctgaccaacaccatggaggagctggaggagagcagacagaagtgccccccctgctggtacagattcgccaacgtgttcctgatctgggactgctgcgacgcctggctgaaggtgaagcacctggtgaacctgatcgtgatggaccccttcgtggacctggccatcaccatctgcatcgtgctgaacaccctgttcatggccatggagcactaccccatgaccgagcagttcagcagcgtgctgaccgtgggcaacctggtgttcaccggcatcttcaccgccgagatggtgctgaagatcatcgccatggacccctactactacttccaggagggctggaacatcttcgacggcatcatcgtgagcctgagcctgatggagctgggcctgagcaacgtggagggcctgagcgtgctgagaagcttcagactgctgagagtgttcaagctggccaagagctggcccaccctgaacatgctgatcaagatcatcggcaacagcgtgggcgccctgggcaacctgaccctggtgctggccatcatcgtgttcatcttcgccgtggtgggcatgcagctgttcggcaagagctacaaggagtgcgtgtgcaagatcaacgacgactgcaccctgcccagatggcacatgaacgacttcttccacagcttcctgatcgtgttcagagtgctgtgcggcgagtggatcgagaccatgtgggactgcatggaggtggccggccagaccatgtgcctgatcgtgttcatgctggtgatggtgatcggcaacctggtggtgctgaacctgttcctggccctgctgctgagcagcttcagcagcgacaacctggccgccaccgacgacgacaacgagatgaacaacctgcagatcgccgtgggcagaatgcagaagggcatcgactacgtgaagaacaagatgagagagtgcttccagaaggccttcttcagaaagcccaaggtgatcgagatccacgagggcaacaagatcgacagctgcatgagcaacaacaccggcatcgagatcagcaaggagctgaactacctgagagacggcaacggcaccaccagcggcgtgggcaccggcagcagcgtggagaagtacgtgatcgacgagaacgactacatgagcttcatcaacaaccccagcctgaccgtgaccgtgcccatcgccgtgggcgagagcgacttcgagaacctgaacaccgaggagttcagcagcgagagcgagctggaggagagcaaggagaagctgaacgccaccagcagcagcgagggcagcaccgtggacgtggtgctgcccagagagggcgagcaggccgagaccgagcccgaggaggacctgaagcccgaggcctgcttcaccgagggctgcatcaagaagttccccttctgccaggtgagcaccgaggagggcaagggcaagatctggtggaacctgagaaagacctgctacagcatcgtggagcacaactggttcgagaccttcatcgtgttcatgatcctgctgagcagcggcgccctggccttcgaggacatctacatcgagcagagaaagaccatcaagaccatgctggagtacgccgacaaggtgttcacctacatcttcatcctggagatgctgctgaagtgggtggcctacggcttccagacctacttcaccaacgcctggtgctggctggacttcctgatcgtggacgtgagcctggtgagcctggtggccaacgccctgggctacagcgagctgggcgccatcaagagcctgagaaccctgagagccctgagacccctgagagccctgagcagattcgagggcatgagagtggtggtgaacgccctggtgggcgccatccccagcatcatgaacgtgctgctggtgtgcctgatcttctggctgatcttcagcatcatgggcgtgaacctgttcgccggcaagttctaccactgcgtgaacatgaccaccggcaacatgttcgacatcagcgacgtgaacaacctgagcgactgccaggccctgggcaagcaggccagatggaagaacgtgaaggtgaacttcgacaacgtgggcgccggctacctggccctgctgcaggtggccaccttcaagggctggatggacatcatgtacgccgccgtggacagcagagacgtgaagctgcagcccgtgtacgaggagaacctgtacatgtacctgtacttcgtgatcttcatcatcttcggcagcttcttcaccctgaacctgttcatcggcgtgatcatcgacaacttcaaccagcagaagaagaagttcggcggccaggacatcttcatgaccgaggagcagaagaagtactacaacgccatgaagaagctgggcagcaagaagccccagaagcccatccccagacccgccaacaagttccagggcatggtgttcgacttcgtgaccagacaggtgttcgacatcagcatcatgatcctgatctgcctgaacatggtgaccatgatggtggagaccgacgaccagggcaagtacatgaccctggtgctgagcagaatcaacctggtgttcatcgtgctgttcaccggcgagttcgtgctgaagctggtgagcctgagacactactacttcaccatcggctggaacatcttcgacttcgtggtggtgatcctgagcatcgtgggcatgttcctggccgagatgatcgagaagtacttcgtgagccccaccctgttcagagtgatcagactggccagaatcggcagaatcctgagactgatcaagggcgccaagggcatcagaaccctgctgttcgccctgatgatgagcctgcccgccctgttcaacatcggcctgctgctgttcctggtgatgttcatctacgccatcttcggcatgagcaacttcgcctacgtgaagaaggaggccggcatcgacgacatgttcaacttcgagaccttcggcaacagcatgatctgcctgttccagatcaccaccagcgccggctgggacggcctgctggcccccatcctgaacagcgccccccccgactgcgaccccgacaccatccaccccggcagcagcgtgaagggcgactgcggcaaccccagcgtgggcatcttcttcttcgtgagctacatcatcatcagcttcctggtggtggtgaacatgtacatcgccgtgatcctggagaacttcagcgtggccaccgaggagagcgccgagcccctgagcgaggacgacttcgagatgttctacgaggtgtgggagaagttcgaccccgacgccacccagttcatcgagttcagcaagctgagcgacttcgccgccgccctggacccccccctgctgatcgccaagcccaacaaggtgcagctgatcgccatggacctgcccatggtgagcggcgacagaatccactgcctggacatcctgttcgccttcaccaagagagtgctgggcgagagcggcgagatggacgccctgagaatccagatggaggacagattcatggccagcaaccccagcaaggtgagctacgagcccatcaccaccaccctgaagagaaagcaggaggaggtgagcgccgccatcatccagagaaacttcagatgctacctgctgaagcagagactgaagaacatcagcagcaactacaacaaggaggccatcaagggcagaatcgacctgcccatcaagcaggacatgatcatcgacaagctgaacggcaacagcacccccgagaagaccgacggcagcagcagcaccaccagcccccccagctacgacagcgtgaccaagcccgacaaggagaagttcgagaaggacaagcccgagaaggagagcaagggcaaggaggtgagagagaaccagaagtag

SEQ ID NO: 99296 - DNA, 4095 bp, synthetic construct
  misc_feature 1..4095: note = Description of Artificial Sequence: Synthetic coding sequence
  source 1..4095: mol_type = other DNA
atggcccaggccctgctggtgccccccggccccgagagcttcagactgttcaccagagagagcctggccgccatcgagaagagagccgccgaggagaaggccaagaagcccaagaaggagcaggacaacgacgacgagaacaagcccaagcccaacagcgacctggaggccggcaagaacctgcccttcatctacggcgacatcccccccgagatggtgagcgagcccctggaggacctggacccctactacatcaacaagaagaccttcatcgtgatgaacaagggcaaggccatcttcagattcagcgccaccagcgccctgtacatcctgacccccctgaaccccgtgagaaagatcgccatcaagatcctggtgcacagcctgttcagcatgctgatcatgtgcaccatcctgaccaactgcgtgttcatgaccctgagcaacccccccgactggaccaagaacgtggagtacaccttcaccggcatctacaccttcgagagcctgatcaagatcctggccagaggcttctgcctggaggacttcaccttcctgagagacccctggaactggctggacttcagcgtgatcgtgatggcctacgtgaccgagttcgtggacctgggcaacgtgagcgccctgagaaccttcagagtgctgagagccctgaagaccatcagcgtgatccccggcctgaagaccatcgtgggcgccctgatccagagcgtgaagaagctgagcgacgtgatgatcctgaccgtgttctgcctgagcgtgttcgccctgatcggcctgcagctgttcatgggcaacctgagaaacaagtgcctgcagtggccccccagcgacagcgccttcgagaccaacaccaccagctacttcaacggcaccatggacagcaacggcaccttcgtgaacgtgaccatgagcaccttcaactggaaggactacatcggcgacgacagccacttctacgtgctggacggccagaaggaccccctgctgtgcggcaacggcagcgacgccggccagtgccccgagggctacatctgcgtgaaggccggcagaaaccccaactacggctacaccagcttcgacaccttcagctgggccttcctgagcctgttcagactgatgacccaggactactgggagaacctgtaccagctgaccctgagagccgccggcaagacctacatgatcttcttcgtgctggtgatcttcctgggcagcttctacctggtgaacctgatcctggccgtggtggccatggcctacgaggagcagaaccaggccaccctggaggaggccgagcagaaggaggccgagttccagcagatgctggagcagctgaagaagcagcaggaggaggcccaggccgtggccgccgccagcgccgccagcagagacttcagcggcatcggcggcctgggcgagctgctggagagcagcagcgaggccagcaagctgagcagcaagagcgccaaggagtggagaaacagaagaaagaagagaagacagagagagcacctggagggcaacaacaagggcgagagagacagcttccccaagagcgagagcgaggacagcgtgaagagaagcagcttcctgttcagcatggacggcaacagactgaccagcgacaagaagttctgcagcccccaccagagcctgctgagcatcagaggcagcctgttcagccccagaagaaacagcaagaccagcatcttcagcttcagaggcagagccaaggacgtgggcagcgagaacgacttcgccgacgacgagcacagcaccttcgaggacagcgagagcagaagagacagcctgttcgtgccccacagacacggcgagagaagaaacagcaacggcaccaccaccgagaccgaggtgagaaagagaagactgagcagctaccagatcagcatggagatgctggaggacagcagcggcagacagagagccgtgagcatcgccagcatcctgaccaacaccatggaggagctggaggagagcagacagaagtgccccccctgctggtacagattcgccaacgtgttcctgatctgggactgctgcgacgcctggctgaaggtgaagcacctggtgaacctgatcgtgatggaccccttcgtggacctggccatcaccatctgcatcgtgctgaacaccctgttcatggccatggagcactaccccatgaccgagcagttcagcagcgtgctgaccgtgggcaacctggtgttcaccggcatcttcaccgccgagatggtgctgaagatcatcgccatggacccctactactacttccaggagggctggaacatcttcgacggcatcatcgtgagcctgagcctgatggagctgggcctgagcaacgtggagggcctgagcgtgctgagaagcttcagactgctgagagtgttcaagctggccaagagctggcccaccctgaacatgctgatcaagatcatcggcaacagcgtgggcgccctgggcaacctgaccctggtgctggccatcatcgtgttcatcttcgccgtggtgggcatgcagctgttcggcaagagctacaaggagtgcgtgtgcaagatcaacgacgactgcaccctgcccagatggcacatgaacgacttcttccacagcttcctgatcgtgttcagagtgctgtgcggcgagtggatcgagaccatgtgggactgcatggaggtggccggccagaccatgtgcctgatcgtgttcatgctggtgatggtgatcggcaacctggtggtgctgaacctgttcctggccctgctgctgagcagcttcagcagcgacaacctggccgccaccgacgacgacaacgagatgaacaacctgcagatcgccgtgggcagaatgcagaagggcatcgactacgtgaagaacaagatgagagagtgcttccagaaggccttcttcagaaagcccaaggtgatcgagatccacgagggcaacaagatcgacagctgcatgagcaacaacaccggcatcgagatcagcaaggagctgaactacctgagagacggcaacggcaccaccagcggcgtgggcaccggcagcagcgtggagaagtacgtgatcgacgagaacgactacatgagcttcatcaacaaccccagcctgaccgtgaccgtgcccatcgccgtgggcgagagcgacttcgagaacctgaacaccgaggagttcagcagcgagagcgagctggaggagagcaaggagaagctgaacgccaccagcagcagcgagggcagcaccgtggacgtggtgctgcccagagagggcgagcaggccgagaccgagcccgaggaggacctgaagcccgaggcctgcttcaccgagggctgcatcaagaagttccccttctgccaggtgagcaccgaggagggcaagggcaagatctggtggaacctgagaaagacctgctacagcatcgtggagcacaactggttcgagaccttcatcgtgttcatgatcctgctgagcagcggcgccctggccttcgaggacatctacatcgagcagagaaagaccatcaagaccatgctggagtacgccgacaaggtgttcacctacatcttcatcctggagatgctgctgaagtgggtggcctacggcttccagacctacttcaccaacgcctggtgctggctggacttcctgatcgtggacgtgagcctggtgagcctggtggccaacgccctgggctacagcgagctgggcgccatcaagagcctgagaaccctgagagccctgagacccctgagagccctgagcagattcgagggcatgagagtggtggtgaacgccctggtgggcgccatccccagcatcatgaacgtgctgctggtgtgcctgatcttctggctgatcttcagcatcatgggcgtgaacctgttcgccggcaagttctaccactgcgtgaacatgaccaccggcaacatgttcgacatcagcgacgtgaacaacctgagcgactgccaggccctgggcaagcaggccagatggaagaacgtgaaggtgaacttcgacaacgtgggcgccggctacctggccctgctgcaggtgtag

SEQ ID NO: 99297 - DNA, 603 bp, synthetic construct
  misc_feature 1..603: note = Description of Artificial Sequence: Synthetic coding sequence
  source 1..603: mol_type = other DNA
atggcccaggccctgctggtgccccccggccccgagagcttcagactgttcaccagagagagcctggccgccatcgagaagagagccgccgaggagaaggccaagaagcccaagaaggagcaggacaacgacgacgagaacaagcccaagcccaacagcgacctggaggccggcaagaacctgcccttcatctacggcgacatcccccccgagatggtgagcgagcccctggaggacctggacccctactacatcaacaagaagaccttcatcgtgatgaacaagggcaaggccatcttcagattcagcgccaccagcgccctgtacatcctgacccccctgaaccccgtgagaaagatcgccatcaagatcctggtgcacagcctgttcagcatgctgatcatgtgcaccatcctgaccaactgcgtgttcatgaccctgagcaacccccccgactggaccaagaacgtggagtacaccttcaccggcatctacaccttcgagagcctgatcaagatcctggccagaggcttctgcctggaggacttcaccttcctgagagacccctggaactggctggacttcagcgtgatcgtgatgtag

SEQ ID NO: 99298 - DNA, 1452 bp, synthetic construct
  misc_feature 1..1452: note = Description of Artificial Sequence: Synthetic coding sequence
  source 1..1452: mol_type = other DNA
atggtgttcgacttcgtgaccagacaggtgttcgacatcagcatcatgatcctgatctgcctgaacatggtgaccatgatggtggagaccgacgaccagggcaagtacatgaccctggtgctgagcagaatcaacctggtgttcatcgtgctgttcaccggcgagttcgtgctgaagctggtgagcctgagacactactacttcaccatcggctggaacatcttcgacttcgtggtggtgatcctgagcatcgtgggcatgttcctggccgagatgatcgagaagtacttcgtgagccccaccctgttcagagtgatcagactggccagaatcggcagaatcctgagactgatcaagggcgccaagggcatcagaaccctgctgttcgccctgatgatgagcctgcccgccctgttcaacatcggcctgctgctgttcctggtgatgttcatctacgccatcttcggcatgagcaacttcgcctacgtgaagaaggaggccggcatcgacgacatgttcaacttcgagaccttcggcaacagcatgatctgcctgttccagatcaccaccagcgccggctgggacggcctgctggcccccatcctgaacagcgccccccccgactgcgaccccgacaccatccaccccggcagcagcgtgaagggcgactgcggcaaccccagcgtgggcatcttcttcttcgtgagctacatcatcatcagcttcctggtggtggtgaacatgtacatcgccgtgatcctggagaacttcagcgtggccaccgaggagagcgccgagcccctgagcgaggacgacttcgagatgttctacgaggtgtgggagaagttcgaccccgacgccacccagttcatcgagttcagcaagctgagcgacttcgccgccgccctggacccccccctgctgatcgccaagcccaacaaggtgcagctgatcgccatggacctgcccatggtgagcggcgacagaatccactgcctggacatcctgttcgccttcaccaagagagtgctgggcgagagcggcgagatggacgccctgagaatccagatggaggacagattcatggccagcaaccccagcaaggtgagctacgagcccatcaccaccaccctgaagagaaagcaggaggaggtgagcgccgccatcatccagagaaacttcagatgctacctgctgaagcagagactgaagaacatcagcagcaactacaacaaggaggccatcaagggcagaatcgacctgcccatcaagcaggacatgatcatcgacaagctgaacggcaacagcacccccgagaagaccgacggcagcagcagcaccaccagcccccccagctacgacagcgtgaccaagcccgacaaggagaagttcgagaaggacaagcccgagaaggagagcaagggcaaggaggtgagagagaaccagaagtag

SEQ ID NO: 99299 - DNA, 648 bp, synthetic construct
  misc_feature 1..648: note = Description of Artificial Sequence: Synthetic coding sequence
  source 1..648: mol_type = other DNA
atgcccgccttcaacagactgttccccctggccagcctggtgctgatctactgggtgagcgtgtgcttccccgtgtgcgtggaggtgcccagcgagaccgaggccgtgcagggcaaccccatgaagctgagatgcatcagctgcatgaagagagaggaggtggaggccaccaccgtggtggagtggttctacagacccgagggcggcaaggacttcctgatctacgagtacagaaacggccaccaggaggtggagagccccttccagggcagactgcagtggaacggcagcaaggacctgcaggacgtgagcatcaccgtgctgaacgtgaccctgaacgacagcggcctgtacacctgcaacgtgagcagagagttcgagttcgaggcccacagacccttcgtgaagaccaccagactgatccccctgagagtgaccgaggaggccggcgaggacttcaccagcgtggtgagcgagatcatgatgtacatcctgctggtgttcctgaccctgtggctgctgatcgagatgatctactgctacagaaaggtgagcaaggccgaggaggccgcccaggagaacgccagcgactacctggccatccccagcgagaacaaggagaacagcgccgtgcccgtggaggagtag

SEQ ID NO: 99300 - DNA, 648 bp, synthetic construct; identical to SEQ ID NO: 99299
  misc_feature 1..648: note = Description of Artificial Sequence: Synthetic coding sequence
  source 1..648: mol_type = other DNA

SEQ ID NO: 99301 - DNA, 426 bp, synthetic construct
  misc_feature 1..426: note = Description of Artificial Sequence: Synthetic coding sequence
  source 1..426: mol_type = other DNA
atgcccgccttcaacagactgttccccctggccagcctggtgctgatctactgggtgagcgtgtgcttccccgtgtgcgtggaggtgcccagcgagaccgaggccgtgcagggcaaccccatgaagctgagatgcatcagctgcatgaagagagaggaggtggaggccaccaccgtggtggagtggttctacagacccgagggcggcaaggacttcctgatctacgagtacagaaacggccaccaggaggtggagagccccttccagggcagactgcagtggaacggcagcaaggacctgcaggacgtgagcatcaccgtgctgaacgtgaccctgaacgacagcggcctgtacacctgcaacgtgagcagagagttcgagttcgaggcccacagacccttcgtgaagaccaccagactgatctag

SEQ ID NO: 99302 - DNA, 648 bp, synthetic construct; identical to SEQ ID NO: 99299
  misc_feature 1..648: note = Description of Artificial Sequence: Synthetic coding sequence
  source 1..648: mol_type = other DNA

SEQ ID NO: 99303 - DNA, 5511 bp, synthetic construct
  misc_feature 1..5511: note = Description of Artificial Sequence: Synthetic coding sequence
  source 1..5511: mol_type = other DNA
atggccagacccagcctgtgcaccctggtgcccctgggccccgagtgcctgagacccttcaccagagagagcctggccgccatcgagcagagagccgtggaggaggaggccagactgcagagaaacaagcagatggagatcgaggagcccgagagaaagcccagaagcgacctggaggccggcaagaacctgcccatgatctacggcgaccccccccccgaggtgatcggcatccccctggaggacctggacccctactacagcaacaagaagaccttcatcgtgctgaacaagggcaaggccatcttcagattcagcgccacccccgccctgtacctgctgagccccttcagcgtggtgagaagaggcgccatcaaggtgctgatccacgccctgttcagcatgttcatcatgatcaccatcctgaccaactgcgtgttcatgaccatgagcgacccccccccctggagcaagaacgtggagtacaccttcaccggcatctacaccttcgagagcctgatcaagatcctggccagaggcttctgcgtggacgacttcaccttcctgagagacccctggaactggctggacttcagcgtgatcatgatggcctacctgaccgagttcgtggacctgggcaacatcagcgccctgagaaccttcagagtgctgagagccctgaagaccatcaccgtgatccccggcctgaagaccatcgtgggcgccctgatccagagcgtgaagaagctgagcgacgtgatgatcctgaccgtgttctgcctgagcgtgttcgccctggtgggcctgcagctgttcatgggcaacctgagacagaagtgcgtgagatggcccccccccttcaacgacaccaacaccacctggtacagcaacgacacctggtacggcaacgacacctggtacggcaacgagatgtggtacggcaacgacagctggtacgccaacgacacctggaacagccacgccagctgggccaccaacgacaccttcgactgggacgcctacatcagcgacgagggcaacttctacttcctggagggcagcaacgacgccctgctgtgcggcaacagcagcgacgccggccactgccccgagggctacgagtgcatcaagaccggcagaaaccccaactacggctacaccagctacgacaccttcagctgggccttcctggccctgttcagactgatgacccaggactactgggagaacctgttccagctgaccctgagagccgccggcaagacctacatgatcttcttcgtggtgatcatcttcctgggcagcttctacctgatcaacctgatcctggccgtggtggccatggcctacgccgagcagaacgaggccaccctggccgaggacaaggagaaggaggaggagttccagcagatgctggagaagttcaagaagcaccaggaggagctggagaaggccaaggccgcccaggccctggagggcggcgaggccgacggcgaccccgcccacggcaaggactgcaacggcagcctggacaccagccagggcgagaagggcgcccccagacagagcagcagcggcgacagcggcatcagcgacgccatggaggagctggaggaggcccaccagaagtgccccccctggtggtacaagtgcgcccacaaggtgctgatctggaactgctgcgccccctggctgaagttcaagaacatcatccacctgatcgtgatggaccccttcgtggacctgggcatcaccatctgcatcgtgctgaacaccctgttcatggccatggagcactaccccatgaccgagcacttcgacaacgtgctgaccgtgggcaacctggtgttcaccggcatcttcaccgccgagatggtgctgaagctgatcgccatggacccctacgagtacttccagcagggctggaacatcttcgacagcatcatcgtgaccctgagcctggtggagctgggcctggccaacgtgcagggcctgagcgtgctgagaagcttcagactgctgagagtgttcaagctggccaagagctggcccaccctgaacatgctgatcaagatcatcggcaacagcgtgggcgccctgggcaacctgaccctggtgctggccatcatcgtgttcatcttcgccgtggtgggcatgcagctgttcggcaagagctacaaggagtgcgtgtgcaagatcgccctggactgcaacctgcccagatggcacatgcacgacttcttccacagcttcctgatcgtgttcagaatcctgtgcggcgagtggatcgagaccatgtgggactgcatggaggtggccggccaggccatgtgcctgaccgtgttcctgatggtgatggtgatcggcaacctggtggtgctgaacctgttcctggccctgctgctgagcagcttcagcgccgacagcctggccgccagcgacgaggacggcgagatgaacaacctgcagatcgccatcggcagaatcaagctgggcatcggcttcgccaaggccttcctgctgggcctgctgcacggcaagatcctgagccccaaggacatcatgctgagcctgggcgaggccgacggcgccggcgaggccggcgaggccggcgagaccgcccccgaggacgagaagaaggagccccccgaggaggacctgaagaaggacaaccacatcctgaaccacatgggcctggccgacggcccccccagcagcctggagctggaccacctgaacttcatcaacaacccctacctgaccatccaggtgcccatcgccagcgaggagagcgacctggagatgcccaccgaggaggagaccgacaccttcagcgagcccgaggacagcaagaagcccccccagcccctgtacgacggcaacagcagcgtgtgcagcaccgccgactacaagccccccgaggaggaccccgaggagcaggccgaggagaaccccgagggcgagcagcccgaggagtgcttcaccgaggcctgcgtgcagagatggccctgcctgtacgtggacatcagccagggcagaggcaagaagtggtggaccctgagaagagcctgcttcaagatcgtggagcacaactggttcgagaccttcatcgtgttcatgatcctgctgagcagcggcgccctggccttcgaggacatctacatcgagcagagaagagtgatcagaaccatcctggagtacgccgacaaggtgttcacctacatcttcatcatggagatgctgctgaagtgggtggcctacggcttcaaggtgtacttcaccaacgcctggtgctggctggacttcctgatcgtggacgtgagcatcatcagcctggtggccaactggctgggctacagcgagctgggccccatcaagagcctgagaaccctgagagccctgagacccctgagagccctgagcagattcgagggcatgagagtggtggtgaacgccctgctgggcgccatccccagcatcatgaacgtgctgctggtgtgcctgatcttctggctgatcttcagcatcatgggcgtgaacctgttcgccggcaagttctactactgcatcaacaccaccaccagcgagagattcgacatcagcgaggtgaacaacaagagcgagtgcgagagcctgatgcacaccggccaggtgagatggctgaacgtgaaggtgaactacgacaacgtgggcctgggctacctgagcctgctgcaggtggccaccttcaagggctggatggacatcatgtacgccgccgtggacagcagagagaaggaggagcagccccagtacgaggtgaacctgtacatgtacctgtacttcgtgatcttcatcatcttcggcagcttcttcaccctgaacctgttcatcggcgtgatcatcgacaacttcaaccagcagaagaagaagctgggcggcaaggacatcttcatgaccgaggagcagaagaagtactacaacgccatgaagaagctgggcagcaagaagccccagaagcccatccccagaccccagaacaagatccagggcatggtgtacgacctggtgaccaagcaggccttcgacatcaccatcatgatcctgatctgcctgaacatggtgaccatgatggtggagaccgacaaccagagccagctgaaggtggacatcctgtacaacatcaacatgatcttcatcatcatcttcaccggcgagtgcgtgctgaagatgctggccctgagacagtactacttcaccgtgggctggaacatcttcgacttcgtggtggtgatcctgagcatcgtgggcctggccctgagcgacctgatccagaagtacttcgtgagccccaccctgttcagagtgatcagactggccagaatcggcagagtgctgagactgatcagaggcgccaagggcatcagaaccctgctgttcgccctgatgatgagcctgcccgccctgttcaacatcggcctgctgctgttcctggtgatgttcatctacagcatcttcggcatgagcaacttcgcctacgtgaagaaggagagcggcatcgacgacatgttcaacttcgagaccttcggcaacagcatcatctgcctgttcgagatcaccaccagcgccggctgggacggcctgctgaaccccatcctgaacagcggcccccccgactgcgaccccaacctggagaaccccggcaccagcgtgaagggcgactgcggcaaccccagcatcggcatctgcttcttctgcagctacatcatcatcagcttcctgatcgtggtgaacatgtacatcgccatcatcctggagaacttcaacgtggccaccgaggagagcagcgagcccctgggcgaggacgacttcgagatgttctacgagacctgggagaagttcgaccccgacgccacccagttcatcgcctacagcagactgagcgacttcgtggacaccctgcaggagcccctgagaatcgccaagcccaacaagatcaagctgatcaccctggacctgcccatggtgcccggcgacaagatccactgcctggacatcctgttcgccctgaccaaggaggtgctgggcgacagcggcgagatggacgccctgaagcagaccatggaggagaagttcatggccgccaaccccagcaaggtgagctacgagcccatcaccaccaccctgaagagaaagcacgaggaggtgtgcgccatcaagatccagagagcctacagaagacacctgctgcagagaagcatgaagcaggccagctacatgtacagacacagccacgacggcagcggcgacgacgcccccgagaaggagggcctgctggccaacaccatgagcaagatgtacggccacgagaacggcaacagcagcagccccagccccgaggagaagggcgaggccggcgacgccggccccaccatgggcctgatgcccatcagccccagcgacaccgcctggccccccgcccccccccccggccagaccgtgagacccggcgtgaaggagagcctggtgtag

SEQ ID NO: 99304 - DNA, 687 bp, synthetic construct
  misc_feature 1..687: note = Description of Artificial Sequence: Synthetic coding sequence
  source 1..687: mol_type = other DNA
atgcccggcgccggcgacggcggcaaggcccccgccagatggctgggcaccggcctgctgggcctgttcctgctgcccgtgaccctgagcctggaggtgagcgtgggcaaggccaccgacatctacgccgtgaacggcaccgagatcctgctgccctgcaccttcagcagctgcttcggcttcgaggacctgcacttcagatggacctacaacagcagcgacgccttcaagatcctgatcgagggcaccgtgaagaacgagaagagcgaccccaaggtgaccctgaaggacgacgacagaatcaccctggtgggcagcaccaaggagaagatgaacaacatcagcatcgtgctgagagacctggagttcagcgacaccggcaagtacacctgccacgtgaagaaccccaaggagaacaacctgcagcaccacgccaccatcttcctgcaggtggtggacagactggaggaggtggacaacaccgtgaccctgatcatcctggccgtggtgggcggcgtgatcggcctgctgatcctgatcctgctgatcaagaagctgatcatcttcatcctgaagaagaccagagagaagaagaaggagtgcctggtgagcagcagcggcaacgacaacaccgagaacggcctgcccggcagcaaggccgaggagaagccccccagcaaggtgtag

SEQ ID NO: 99305 - DNA, 285 bp, synthetic construct
  misc_feature 1..285: note = Description of Artificial Sequence: Synthetic coding sequence
  source 1..285: mol_type = other DNA
atgcccggcgccggcgacggcggcaaggcccccgccagatggctgggcaccggcctgctggtggaggaggtggacaacaccgtgaccctgatcatcctggccgtggtgggcggcgtgatcggcctgctgatcctgatcctgctgatcaagaagctgatcatcttcatcctgaagaagaccagagagaagaagaaggagtgcctggtgagcagcagcggcaacgacaacaccgagaacggcctgcccggcagcaaggccgaggagaagccccccagcaaggtgtag

SEQ ID NO: 99306 - DNA, 5970 bp, synthetic construct
  misc_feature 1..5970: note = Description of Artificial Sequence: Synthetic coding sequence
  source 1..5970: mol_type = other DNA
atggccatgctgcccccccccggcccccagagcttcgtgcacttcaccaagcagagcctggccctgatcgagcagagaatcgccgagagaaagagcaaggagcccaaggaggagaagaaggacgacgacgaggaggcccccaagcccagcagcgacctggaggccggcaagcagctgcccttcatctacggcgacatcccccccggcatggtgagcgagcccctggaggacctggacccctactacgccgacaagaagaccttcatcgtgctgaacaagggcaagaccatcttcagattcaacgccacccccgccctgtacatgctgagccccttcagccccctgagaagaatcagcatcaagatcctggtgcacagcaccctgttcagcatgctgatcatgtgcaccatcctgaccaactgcatcttcatgaccatgaacaacccccccgactggaccaagaacgtggagtacaccttcaccggcatctacaccttcgagagcctggtgaagatcctggccagaggcttctgcgtgggcgagttcaccttcctgagagacccctggaactggctggacttcgtggtgatcgtgttcgcctacctgaccgagttcgtgaacctgggcaacgtgagcgccctgagaaccttcagagtgctgagagccctgaagaccatcagcgtgatccccggcctgaagaccatcgtgggcgccctgatccagagcgtgaagaagctgagcgacgtgatgatcctgaccgtgttctgcctgagcgtgttcgccctgatcggcctgcagctgttcatgggcaacctgaagcacaagtgcttcagaaacagcctggagaacaacgagaccctggagagcatcatgaacaccctggagagcgaggaggacttcagaaagtacttctactacctggagggcagcaaggacgccctgctgtgcggcttcagcaccgacagcggccagtgccccgagggctacacctgcgtgaagatcggcagaaaccccgactacggctacaccagcttcgacaccttcagctgggccttcctggccctgttcagactgatgacccaggactactgggagaacctgtaccagcagaccctgagagccgccggcaagacctacatgatcttcttcgtggtggtgatcttcctgggcagcttctacctgatcaacctgatcctggccgtggtggccatggcctacgaggagcagaaccaggccaacatcgaggaggccaagcagaaggagctggagttccagcagatgctggacagactgaagaaggagcaggaggaggccgaggccatcgccgccgccgccgccgagtacaccagcatcagaagaagcagaatcatgggcctgagcgagagcagcagcgagaccagcaagctgagcagcaagagcgccaaggagagaagaaacagaagaaagaagaagaaccagaagaagctgagcagcggcgaggagaagggcgacgccgagaagctgagcaagagcgagagcgaggacagcatcagaagaaagagcttccacctgggcgtggagggccacagaagagcccacgagaagagactgagcacccccaaccagagccccctgagcatcagaggcagcctgttcagcgccagaagaagcagcagaaccagcctgttcagcttcaagggcagaggcagagacatcggcagcgagaccgagttcgccgacgacgagcacagcatcttcggcgacaacgagagcagaagaggcagcctgttcgtgccccacagaccccaggagagaagaagcagcaacatcagccaggccagcagaagcccccccatgctgcccgtgaacggcaagatgcacagcgccgtggactgcaacggcgtggtgagcctggtggacggcagaagcgccctgatgctgcccaacggccagctgctgcccgaggtgatcatcgacaaggccaccagcgacgacagcggcaccaccaaccagatccacaagaagagaagatgcagcagctacctgctgagcgaggacatgctgaacgaccccaacctgagacagagagccatgagcagagccagcatcctgaccaacaccgtggaggagctggaggagagcagacagaagtgccccccctggtggtacagattcgcccacaagttcctgatctggaactgcagcccctactggatcaagttcaagaagtgcatctacttcatcgtgatggaccccttcgtggacctggccatcaccatctgcatcgtgctgaacaccctgttcatggccatggagcaccaccccatgaccgaggagttcaagaacgtgctggccatcggcaacctggtgttcaccggcatcttcgccgccgagatggtgctgaagctgatcgccatggacccctacgagtacttccaggtgggctggaacatcttcgacagcctgatcgtgaccctgagcctggtggagctgttcctggccgacgtggagggcctgagcgtgctgagaagcttcagactgctgagagtgttcaagctggccaagagctggcccaccctgaacatgctgatcaagatcatcggcaacagcgtgggcgccctgggcaacctgaccctggtgctggccatcatcgtgttcatcttcgccgtggtgggcatgcagctgttcggcaagagctacaaggagtgcgtgtgcaagatcaacgacgactgcaccctgcccagatggcacatgaacgacttcttccacagcttcctgatcgtgttcagagtgctgtgcggcgagtggatcgagaccatgtgggactgcatggaggtggccggccaggccatgtgcctgatcgtgtacatgatggtgatggtgatcggcaacctggtggtgctgaacctgttcctggccctgctgctgagcagcttcagcagcgacaacctgaccgccatcgaggaggaccccgacgccaacaacctgcagatcgccgtgaccagaatcaagaagggcatcaactacgtgaagcagaccctgagagagttcatcctgaaggccttcagcaagaagcccaagatcagcagagagatcagacaggccgaggacctgaacaccaagaaggagaactacatcagcaaccacaccctggccgagatgagcaagggccacaacttcctgaaggagaaggacaagatcagcggcttcggcagcagcgtggacaagcacctgatggaggacagcgacggccagagcttcatccacaaccccagcctgaccgtgaccgtgcccatcgcccccggcgagagcgacctggagaacatgaacgccgaggagctgagcagcgacagcgacagcgagtacagcaaggtgagactgaacagaagcagcagcagcgagtgcagcaccgtggacaaccccctgcccggcgagggcgaggaggccgaggccgagcccatgaacagcgacgagcccgaggcctgcttcaccgacggctgcgtgtggagattcagctgctgccaggtgaacatcgagagcggcaagggcaagatctggtggaacatcagaaagacctgctacaagatcgtggagcacagctggttcgagagcttcatcgtgctgatgatcctgctgagcagcggcgccctggccttcgaggacatctacatcgagagaaagaagaccatcaagatcatcctggagtacgccgacaagatcttcacctacatcttcatcctggagatgctgctgaagtggatcgcctacggctacaagacctacttcaccaacgcctggtgctggctggacttcctgatcgtggacgtgagcctggtgaccctggtggccaacaccctgggctacagcgacctgggccccatcaagagcctgagaaccctgagagccctgagacccctgagagccctgagcagattcgagggcatgagagtggtggtgaacgccctgatcggcgccatccccagcatcatgaacgtgctgctggtgtgcctgatcttctggctgatcttcagcatcatgggcgtgaacctgttcgccggcaagttctacgagtgcatcaacaccaccgacggcagcagattccccgccagccaggtgcccaacagaagcgagtgcttcgccctgatgaacgtgagccagaacgtgagatggaagaacctgaaggtgaacttcgacaacgtgggcctgggctacctgagcctgctgcaggtggccaccttcaagggctggaccatcatcatgtacgccgccgtggacagcgtgaacgtggacaagcagcccaagtacgagtacagcctgtacatgtacatctacttcgtggtgttcatcatcttcggcagcttcttcaccctgaacctgttcatcggcgtgatcatcgacaacttcaaccagcagaagaagaagctgggcggccaggacatcttcatgaccgaggagcagaagaagtactacaacgccatgaagaagctgggcagcaagaagccccagaagcccatccccagacccggcaacaagatccagggctgcatcttcgacctggtgaccaaccaggccttcgacatcagcatcatggtgctgatctgcctgaacatggtgaccatgatggtggagaaggagggccagagccagcacatgaccgaggtgctgtactggatcaacgtggtgttcatcatcctgttcaccggcgagtgcgtgctgaagctgatcagcctgagacactactacttcaccgtgggctggaacatcttcgacttcgtggtggtgatcatcagcatcgtgggcatgttcctggccgacctgatcgagacctacttcgtgagccccaccctgttcagagtgatcagactggccagaatcggcagaatcctgagactggtgaagggcgccaagggcatcagaaccctgctgttcgccctgatgatgagcctgcccgccctgttcaacatcggcctgctgctgttcctggtgatgttcatctacgccatcttcggcatgagcaacttcgcctacgtgaagaaggaggacggcatcaacgacatgttcaacttcgagaccttcggcaacagcatgatctgcctgttccagatcaccaccagcgccggctgggacggcctgctggcccccatcctgaacagcaagccccccgactgcgaccccaagaaggtgcaccccggcagcagcgtggagggcgactgcggcaaccccagcgtgggcatcttctacttcgtgagctacatcatcatcagcttcctggtggtggtgaacatgtacatcgccgtgatcctggagaacttcagcgtggccaccgaggagagcaccgagcccctgagcgaggacgacttcgagatgttctacgaggtgtgggagaagttcgaccccgacgccacccagttcatcgagttcagcaagctgagcgacttcgccgccgccctggacccccccctgctgatcgccaagcccaacaaggtgcagctgatcgccatggacctgcccatggtgagcggcgacagaatccactgcctggacatcctgttcgccttcaccaagagagtgctgggcgagagcggcgagatggacagcctgagaagccagatggaggagagattcatgagcgccaaccccagcaaggtgagctacgagcccatcaccaccaccctgaagagaaagcaggaggacgtgagcgccaccgtgatccagagagcctacagaagatacagactgagacagaacgtgaagaacatcagcagcatctacatcaaggacggcgacagagacgacgacctgctgaacaagaaggacatggccttcgacaacgtgaacgagaacagcagccccgagaagaccgacgccaccagcagcaccaccagcccccccagctacgacagcgtgaccaagcccgacaaggagaagtacgagcaggacagaaccgagaaggaggacaagggcaaggacagcaaggagagcaagaagtag

SEQ ID NO: 99307 - DNA, 5970 bp, synthetic construct
  misc_feature 1..5970: note = Description of Artificial Sequence: Synthetic coding sequence
  source 1..5970: mol_type = other DNA
atggccatgctgcccccccccggcccccagagcttcgtgcacttcaccaagcagagcctggccctgatcgagcagagaatcgccgagagaaagagcaaggagcccaaggaggagaagaaggacgacgacgaggaggcccccaagcccagcagcgacctggaggccggcaagcagctgcccttcatctacggcgacatcccccccggcatggtgagcgagcccctggaggacctggacccctactacgccgacaagaagaccttcatcgtgctgaacaagggcaagaccatcttcagattcaacgccacccccgccctgtacatgctgagccccttcagccccctgagaagaatcagcatcaagatcctggtgcacagcaccctgttcagcatgctgatcatgtgcaccatcctgaccaactgcatcttcatgaccatgaacaacccccccgactggaccaagaacgtggagtacaccttcaccggcatctacaccttcgagagcctggtgaagatcctggccagaggcttctgcgtgggcgagttcaccttcctgagagacccctggaactggctggacttcgtggtgatcgtgttcgcctacgtgaccgagttcgtggacctgggcaacgtgagcgccctgagaaccttcagagtgctgagagccctgaagaccatcagcgtgatccccggcctgaagaccatcgtgggcgccctgatccagagcgtgaagaagctgagcgacgtgatgatcctgaccgtgttctgcctgagcgtgttcgccctgatcggcctgcagctgttcatgggcaacctgaagcacaagtgcttcagaaacagcctggagaacaacgagaccctggagagcatcatgaacaccctggagagcgaggaggacttcagaaagtacttctactacctggagggcagcaaggacgccctgctgtgcggcttcagcaccgacagcggccagtgccccgagggctacacctgcgtgaagatcggcagaaaccccgactacggctacaccagcttcgacaccttcagctgggccttcctggccctgttcagactgatgacccaggactactgggagaacctgtaccagcagaccctgagagccgccggcaagacctacatgatcttcttcgtggtggtgatcttcctgggcagcttctacctgatcaacctgatcctggccgtggtggccatggcctacgaggagcagaaccaggccaacatcgaggaggccaagcagaaggagctggagttccagcagatgctggacagactgaagaaggagcaggaggaggccgaggccatcgccgccgccgccgccgagtacaccagcatcagaagaagcagaatcatgggcctgagcgagagcagcagcgagaccagcaagctgagcagcaagagcgccaaggagagaagaaacagaagaaagaagaagaaccagaagaagctgagcagcggcgaggagaagggcgacgccgagaagctgagcaagagcgagagcgaggacagcatcagaagaaagagcttccacctgggcgtggagggccacagaagagcccacgagaagagactgagcacccccaaccagagccccctgagcatcagaggcagcctgttcagcgccagaagaagcagcagaaccagcctgttcagcttcaagggcagaggcagagacatcggcagcgagaccgagttcgccgacgacgagcacagcatcttcggcgacaacgagagcagaagaggcagcctgttcgtgccccacagaccccaggagagaagaagcagcaacatcagccaggccagcagaagcccccccatgctgcccgtgaacggcaagatgcacagcgccgtggactgcaacggcgtggtgagcctggtggacggcagaagcgccctgatgctgcccaacggccagctgctgcccgaggtgatcatcgacaaggccaccagcgacgacagcggcaccaccaaccagatccacaagaagagaagatgcagcagctacctgctgagcgaggacatgctgaacgaccccaacctgagacagagagccatgagcagagccagcatcctgaccaacaccgtggaggagctggaggagagcagacagaagtgccccccctggtggtacagattcgcccacaagttcctgatctggaactgcagcccctactggatcaagttcaagaagtgcatctacttcatcgtgatggaccccttcgtggacctggccatcaccatctgcatcgtgctgaacaccctgttcatggccatggagcaccaccccatgaccgaggagttcaagaacgtgctggccatcggcaacctggtgttcaccggcatcttcgccgccgagatggtgctgaagctgatcgccatggacccctacgagtacttccaggtgggctggaacatcttcgacagcctgatcgtgaccctgagcctggtggagctgttcctggccgacgtggagggcctgagcgtgctgagaagcttcagactgctgagagtgttcaagctggccaagagctggcccaccctgaacatgctgatcaagatcatcggcaacagcgtgggcgccctgggcaacctgaccctggtgctggccatcatcgtgttcatcttcgccgtggtgggcatgcagctgttcggcaagagctacaaggagtgcgtgtgcaagatcaacgacgactgcaccctgcccagatggcacatgaacgacttcttccacagcttcctgatcgtgttcagagtgctgtgcggcgagtggatcgagaccatgtgggactgcatggaggtggccggccaggccatgtgcctgatcgtgtacatgatggtgatggtgatcggcaacctggtggtgctgaacctgttcctggccctgctgctgagcagcttcagcagcgacaacctgaccgccatcgaggaggaccccgacgccaacaacctgcagatcgccgtgaccagaatcaagaagggcatcaactacgtgaagcagaccctgagagagttcatcctgaaggccttcagcaagaagcccaagatcagcagagagatcagacaggccgaggacctgaacaccaagaaggagaactacatcagcaaccacaccctggccgagatgagcaagggccacaacttcctgaaggagaaggacaagatcagcggcttcggcagcagcgtggacaagcacctgatggaggacagcgacggccagagcttcatccacaaccccagcctgaccgtgaccgtgcccatcgcccccggcgagagcgacctggagaacatgaacgccgaggagctgagcagcgacagcgacagcgagtacagcaaggtgagactgaacagaagcagcagcagcgagtgcagcaccgtggacaaccccctgcccggcgagggcgaggaggccgaggccgagcccatgaacagcgacgagcccgaggcctgcttcaccgacggctgcgtgtggagattcagctgctgccaggtgaacatcgagagcggcaagggcaagatctggtggaacatcagaaagacctgctacaagatcgtggagcacagctggttcgagagcttcatcgtgctgatgatcctgctgagcagcggcgccctggccttcgaggacatctacatcgagagaaagaagaccatcaagatcatcctggagtacgccgacaagatcttcacctacatcttcatcctggagatgctgctgaagtggatcgcctacggctacaagacctacttcaccaacgcctggtgctggctggacttcctgatcgtggacgtgagcctggtgaccctggtggccaacaccctgggctacagcgacctgggccccatcaagagcctgagaaccctgagagccctgagacccctgagagccctgagcagattcgagggcatgagagtggtggtgaacgccctgatcggcgccatccccagcatcatgaacgtgctgctggtgtgcctgatcttctggctgatcttcagcatcatgggcgtgaacctgttcgccggcaagttctacgagtgcatcaacaccaccgacggcagcagattccccgccagccaggtgcccaacagaagcgagtgcttcgccctgatgaacgtgagccagaacgtgagatggaagaacctgaaggtgaacttcgacaacgtgggcctgggctacctgagcctgctgcaggtggccaccttcaagggctggaccatcatcatgtacgccgccgtggacagcgtgaacgtggacaagcagcccaagtacgagtacagcctgtacatgtacatctacttcgtggtgttcatcatcttcggcagcttcttcaccctgaacctgttcatcggcgtgatcatcgacaacttcaaccagcagaagaagaagctgggcggccaggacatcttcatgaccgaggagcagaagaagtactacaacgccatgaagaagctgggcagcaagaagccccagaagcccatccccagacccggcaacaagatccagggctgcatcttcgacctggtgaccaaccaggccttcgacatcagcatcatggtgctgatctgcctgaacatggtgaccatgatggtggagaaggagggccagagccagcacatgaccgaggtgctgtactggatcaacgtggtgttcatcatcctgttcaccggcgagtgcgtgctgaagctgatcagcctgagacactactacttcaccgtgggctggaacatcttcgacttcgtggtggtgatcatcagcatcgtgggcatgttcctggccgacctgatcgagacctacttcgtgagccccaccctgttcagagtgatcagactggccagaatcggcagaatcctgagactggtgaagggcgccaagggcatcagaaccctgctgttcgccctgatgatgagcctgcccgccctgttcaacatcggcctgctgctgttcctggtgatgttcatctacgccatcttcggcatgagcaacttcgcctacgtgaagaaggaggacggcatcaacgacatgttcaacttcgagaccttcggcaacagcatgatctgcctgttccagatcaccaccagcgccggctgggacggcctgctggcccccatcctgaacagcaagccccccgactgcgaccccaagaaggtgcaccccggcagcagcgtggagggcgactgcggcaaccccagcgtgggcatcttctacttcgtgagctacatcatcatcagcttcctggtggtggtgaacatgtacatcgccgtgatcctggagaacttcagcgtggccaccgaggagagcaccgagcccctgagcgaggacgacttcgagatgttctacgaggtgtgggagaagttcgaccccgacgccacccagttcatcgagttcagcaagctgagcgacttcgccgccgccctggacccccccctgctgatcgccaagcccaacaaggtgcagctgatcgccatggacctgcccatggtgagcggcgacagaatccactgcctggacatcctgttcgccttcaccaagagagtgctgggcgagagcggcgagatggacagcctgagaagccagatggaggagagattcatgagcgccaaccccagcaaggtgagctacgagcccatcaccaccaccctgaagagaaagcaggaggacgtgagcgccaccgtgatccagagagcctacagaagatacagactgagacagaacgtgaagaacatcagcagcatctacatcaaggacggcgacagagacgacgacctgctgaacaagaaggacatggccttcgacaacgtgaacgagaacagcagccccgagaagaccgacgccaccagcagcaccaccagcccccccagctacgacagcgtgaccaagcccgacaaggagaagtacgagcaggacagaaccgagaaggaggacaagggcaaggacagcaaggagagcaagaagtag

SEQ ID NO: 99308 - DNA, 5967 bp, synthetic construct
  misc_feature 1..5967: note = Description of Artificial Sequence: Synthetic coding sequence
  source 1..5967: mol_type = other DNA
atggccatgctgcccccccccggcccccagagcttcgtgcacttcaccaagcagagcctggccctgatcgagcagagaatcgccgagagaaagagcaaggagcccaaggaggagaagaaggacgacgacgaggaggcccccaagcccagcagcgacctggaggccggcaagcagctgcccttcatctacggcgacatcccccccggcatggtgagcgagcccctggaggacctggacccctactacgccgacaagaagaccttcatcgtgctgaacaagggcaagaccatcttcagattcaacgccacccccgccctgtacatgctgagccccttcagccccctgagaagaatcagcatcaagatcctggtgcacagcctgttcagcatgctgatcatgtgcaccatcctgaccaactgcatcttcatgaccatgaacaacccccccgactggaccaagaacgtggagtacaccttcaccggcatctacaccttcgagagcctggtgaagatcctggccagaggcttctgcgtgggcgagttcaccttcctgagagacccctggaactggctggacttcgtggtgatcgtgttcgcctacctgaccgagttcgtgaacctgggcaacgtgagcgccctgagaaccttcagagtgctgagagccctgaagaccatcagcgtgatccccggcctgaagaccatcgtgggcgccctgatccagagcgtgaagaagctgagcgacgtgatgatcctgaccgtgttctgcctgagcgtgttcgccctgatcggcctgcagctgttcatgggcaacctgaagcacaagtgcttcagaaacagcctggagaacaacgagaccctggagagcatcatgaacaccctggagagcgaggaggacttcagaaagtacttctactacctggagggcagcaaggacgccctgctgtgcggcttcagcaccgacagcggccagtgccccgagggctacacctgcgtgaagatcggcagaaaccccgactacggctacaccagcttcgacaccttcagctgggccttcctggccctgttcagactgatgacccaggactactgggagaacctgtaccagcagaccctgagagccgccggcaagacctacatgatcttcttcgtggtggtgatcttcctgggcagcttctacctgatcaacctgatcctggccgtggtggccatggcctacgaggagcagaaccaggccaacatcgaggaggccaagcagaaggagctggagttccagcagatgctggacagactgaagaaggagcaggaggaggccgaggccatcgccgccgccgccgccgagtacaccagcatcagaagaagcagaatcatgggcctgagcgagagcagcagcgagaccagcaagctgagcagcaagagcgccaaggagagaagaaacagaagaaagaagaagaaccagaagaagctgagcagcggcgaggagaagggcgacgccgagaagctgagcaagagcgagagcgaggacagcatcagaagaaagagcttccacctgggcgtggagggccacagaagagcccacgagaagagactgagcacccccaaccagagccccctgagcatcagaggcagcctgttcagcgccagaagaagcagcagaaccagcctgttcagcttcaagggcagaggcagagacatcggcagcgagaccgagttcgccgacgacgagcacagcatcttcggcgacaacgagagcagaagaggcagcctgttcgtgccccacagaccccaggagagaagaagcagcaacatcagccaggccagcagaagcccccccatgctgcccgtgaacggcaagatgcacagcgccgtggactgcaacggcgtggtgagcctggtggacggcagaagcgccctgatgctgcccaacggccagctgctgcccgaggtgatcatcgacaaggccaccagcgacgacagcggcaccaccaaccagatccacaagaagagaagatgcagcagctacctgctgagcgaggacatgctgaacgaccccaacctgagacagagagccatgagcagagccagcatcctgaccaacaccgtggaggagctggaggagagcagacagaagtgccccccctggtggtacagattcgcccacaagttcctgatctggaactgcagcccctactggatcaagttcaagaagtgcatctacttcatcgtgatggaccccttcgtggacctggccatcaccatctgcatcgtgctgaacaccctgttcatggccatggagcaccaccccatgaccgaggagttcaagaacgtgctggccatcggcaacctggtgttcaccggcatcttcgccgccgagatggtgctgaagctgatcgccatggacccctacgagtacttccaggtgggctggaacatcttcgacagcctgatcgtgaccctgagcctggtggagctgttcctggccgacgtggagggcctgagcgtgctgagaagcttcagactgctgagagtgttcaagctggccaagagctggcccaccctgaacatgctgatcaagatcatcggcaacagcgtgggcgccctgggcaacctgaccctggtgctggccatcatcgtgttcatcttcgccgtggtgggcatgcagctgttcggcaagagctacaaggagtgcgtgtgcaagatcaacgacgactgcaccctgcccagatggcacatgaacgacttcttccacagcttcctgatcgtgttcagagtgctgtgcggcgagtggatcgagaccatgtgggactgcatggaggtggccggccaggccatgtgcctgatcgtgtacatgatggtgatggtgatcggcaacctggtggtgctgaacctgttcctggccctgctgctgagcagcttcagcagcgacaacctgaccgccatcgaggaggaccccgacgccaacaacctgcagatcgccgtgaccagaatcaagaagggcatcaactacgtgaagcagaccctgagagagttcatcctgaaggccttcagcaagaagcccaagatcagcagagagatcagacaggccgaggacctgaacaccaagaaggagaactacatcagcaaccacaccctggccgagatgagcaagggccacaacttcctgaaggagaaggacaagatcagcggcttcggcagcagcgtggacaagcacctgatggaggacagcgacggccagagcttcatccacaaccccagcctgaccgtgaccgtgcccatcgcccccggcgagagcgacctggagaacatgaacgccgaggagctgagcagcgacagcgacagcgagtacagcaaggtgagactgaacagaagcagcagcagcgagtgcagcaccgtggacaaccccctgcccggcgagggcgaggaggccgaggccgagcccatgaacagcgacgagcccgaggcctgcttcaccgacggctgcgtgtggagattcagctgctgccaggtgaacatcgagagcggcaagggcaagatctggtggaacatcagaaagacctgctacaagatcgtggagcacagctggttcgagagcttcatcgtgctgatgatcctgctgagcagcggcgccctggccttcgaggacatctacatcgagagaaagaagaccatcaagatcatcctggagtacgccgacaagatcttcacctacatcttcatcctggagatgctgctgaagtggatcgcctacggctacaagacctacttcaccaacgcctggtgctggctggacttcctgatcgtggacgtgagcctggtgaccctggtggccaacaccctgggctacagcgacctgggccccatcaagagcctgagaaccctgagagccctgagacccctgagagccctgagcagattcgagggcatgagagtggtggtgaacgccctgatcggcgccatccccagcatcatgaacgtgctgctggtgtgcctgatcttctggctgatcttcagcatcatgggcgtgaacctgttcgccggcaagttctacgagtgcatcaacaccaccgacggcagcagattccccgccagccaggtgcccaacagaagcgagtgcttcgccctgatgaacgtgagccagaacgtgagatggaagaacctgaaggtgaacttcgacaacgtgggcctgggctacctgagcctgctgcaggtggccaccttcaagggctggaccatcatcatgtacgccgccgtggacagcgtgaacgtggacaagcagcccaagtacgagtacagcctgtacatgtacatctacttcgtggtgttcatcatcttcggcagcttcttcaccctgaacctgttcatcggcgtgatcatcgacaacttcaaccagcagaagaagaagctgggcggccaggacatcttcatgaccgaggagcagaagaagtactacaacgccatgaagaagctgggcagcaagaagccccagaagcccatccccagacccggcaacaagatccagggctgcatcttcgacctggtgaccaaccaggccttcgacatcagcatcatggtgctgatctgcctgaacatggtgaccatgatggtggagaaggagggccagagccagcacatgaccgaggtgctgtactggatcaacgtggtgttcatcatcctgttcaccggcgagtgcgtgctgaagctgatcagcctgagacactactacttcaccgtgggctggaacatcttcgacttcgtggtggtgatcatcagcatcgtgggcatgttcctggccgacctgatcgagacctacttcgtgagccccaccctgttcagagtgatcagactggccagaatcggcagaatcctgagactggtgaagggcgccaagggcatcagaaccctgctgttcgccctgatgatgagcctgcccgccctgttcaacatcggcctgctgctgttcctggtgatgttcatctacgccatcttcggcatgagcaacttcgcctacgtgaagaaggaggacggcatcaacgacatgttcaacttcgagaccttcggcaacagcatgatctgcctgttccagatcaccaccagcgccggctgggacggcctgctggcccccatcctgaacagcaagccccccgactgcgaccccaagaaggtgcaccccggcagcagcgtggagggcgactgcggcaaccccagcgtgggcatcttctacttcgtgagctacatcatcatcagcttcctggtggtggtgaacatgtacatcgccgtgatcctggagaacttcagcgtggccaccgaggagagcaccgagcccctgagcgaggacgacttcgagatgttctacgaggtgtgggagaagttcgaccccgacgccacccagttcatcgagttcagcaagctgagcgacttcgccgccgccctggacccccccctgctgatcgccaagcccaacaaggtgcagctgatcgccatggacctgcccatggtgagcggcgacagaatccactgcctggacatcctgttcgccttcaccaagagagtgctgggcgagagcggcgagatggacagcctgagaagccagatggaggagagattcatgagcgccaaccccagcaaggtgagctacgagcccatcaccaccaccctgaagagaaagcaggaggacgtgagcgccaccgtgatccagagagcctacagaagatacagactgagacagaacgtgaagaacatcagcagcatctacatcaaggacggcgacagagacgacgacctgctgaacaagaaggacatggccttcgacaacgtgaacgagaacagcagccccgagaagaccgacgccaccagcagcaccaccagcccccccagctacgacagcgtgaccaagcccgacaaggagaagtacgagcaggacagaaccgagaaggaggacaagggcaaggacagcaaggagagcaagaagtag

SEQ ID NO: 99309 - DNA, 5934 bp, synthetic construct
  misc_feature 1..5934: note = Description of Artificial Sequence: Synthetic coding sequence
  source 1..5934: mol_type = other DNA
atggccatgctgcccccccccggcccccagagcttcgtgcacttcaccaagcagagcctggccctgatcgagcagagaatcgccgagagaaagagcaaggagcccaaggaggagaagaaggacgacgacgaggaggcccccaagcccagcagcgacctggaggccggcaagcagctgcccttcatctacggcgacatcccccccggcatggtgagcgagcccctggaggacctggacccctactacgccgacaagaagaccttcatcgtgctgaacaagggcaagaccatcttcagattcaacgccacccccgccctgtacatgctgagccccttcagccccctgagaagaatcagcatcaagatcctggtgcacagcctgttcagcatgctgatcatgtgcaccatcctgaccaactgcatcttcatgaccatgaacaacccccccgactggaccaagaacgtggagtacaccttcaccggcatctacaccttcgagagcctggtgaagatcctggccagaggcttctgcgtgggcgagttcaccttcctgagagacccctggaactggctggacttcgtggtgatcgtgttcgcctacctgaccgagttcgtgaacctgggcaacgtgagcgccctgagaaccttcagagtgctgagagccctgaagaccatcagcgtgatccccggcctgaagaccatcgtgggcgccctgatccagagcgtgaagaagctgagcgacgtgatgatcctgaccgtgttctgcctgagcgtgttcgccctgatcggcctgcagctgttcatgggcaacctgaagcacaagtgcttcagaaacagcctggagaacaacgagaccctggagagcatcatgaacaccctggagagcgaggaggacttcagaaagtacttctactacctggagggcagcaaggacgccctgctgtgcggcttcagcaccgacagcggccagtgccccgagggctacacctgcgtgaagatcggcagaaaccccgactacggctacaccagcttcgacaccttcagctgggccttcctggccctgttcagactgatgacccaggactactgggagaacctgtaccagcagaccctgagagccgccggcaagacctacatgatcttcttcgtggtggtgatcttcctgggcagcttctacctgatcaacctgatcctggccgtggtggccatggcctacgaggagcagaaccaggccaacatcgaggaggccaagcagaaggagctggagttccagcagatgctggacagactgaagaaggagcaggaggaggccgaggccatcgccgccgccgccgccgagtacaccagcatcagaagaagcagaatcatgggcctgagcgagagcagcagcgagaccagcaagctgagcagcaagagcgccaaggagagaagaaacagaagaaagaagaagaaccagaagaagctgagcagcggcgaggagaagggcgacgccgagaagctgagcaagagcgagagcgaggacagcatcagaagaaagagcttccacctgggcgtggagggccacagaagagcccacgagaagagactgagcacccccaaccagagccccctgagcatcagaggcagcctgttcagcgccagaagaagcagcagaaccagcctgttcagcttcaagggcagaggcagagacatcggcagcgagaccgagttcgccgacgacgagcacagcatcttcggcgacaacgagagcagaagaggcagcctgttcgtgccccacagaccccaggagagaagaagcagcaacatcagccaggccagcagaagcccccccatgctgcccgtgaacggcaagatgcacagcgccgtggactgcaacggcgtggtgagcctggtggacggcagaagcgccctgatgctgcccaacggccagctgctgcccgagggcaccaccaaccagatccacaagaagagaagatgcagcagctacctgctgagcgaggacatgctgaacgaccccaacctgagacagagagccatgagcagagccagcatcctgaccaacaccgtggaggagctggaggagagcagacagaagtgccccccctggtggtacagattcgcccacaagttcctgatctggaactgcagcccctactggatcaagttcaagaagtgcatctacttcatcgtgatggaccccttcgtggacctggccatcaccatctgcatcgtgctgaacaccctgttcatggccatggagcaccaccccatgaccgaggagttcaagaacgtgctggccatcggcaacctggtgttcaccggcatcttcgccgccgagatggtgctgaagctgatcgccatggacccctacgagtacttccaggtgggctggaacatcttcgacagcctgatcgtgaccctgagcctggtggagctgttcctggccgacgtggagggcctgagcgtgctgagaagcttcagactgctgagagtgttcaagctggccaagagctggcccaccctgaacatgctgatcaagatcatcggcaacagcgtgggcgccctgggcaacctgaccctggtgctggccatcatcgtgttcatcttcgccgtggtgggcatgcagctgttcggcaagagctacaaggagtgcgtgtgcaagatcaacgacgactgcaccctgcccagatggcacatgaacgacttcttccacagcttcctgatcgtgttcagagtgctgtgcggcgagtggatcgagaccatgtgggactgcatggaggtggccggccaggccatgtgcctgatcgtgtacatgatggtgatggtgatcggcaacctggtggtgctgaacctgttcctggccctgctgctgagcagcttcagcagcgacaacctgaccgccatcgaggaggaccccgacgccaacaacctgcagatcgccgtgaccagaatcaagaagggcatcaactacgtgaagcagaccctgagagagttcatcctgaaggccttcagcaagaagcccaagatcagcagagagatcagacaggccgaggacctgaacaccaagaaggagaactacatcagcaaccacaccctggccgagatgagcaagggccacaacttcctgaaggagaaggacaagatcagcggcttcggcagcagcgtggacaagcacctgatggaggacagcgacggccagagcttcatccacaaccccagcctgaccgtgaccgtgcccatcgcccccggcgagagcgacctggagaacatgaacgccgaggagctgagcagcgacagcgacagcgagtacagcaaggtgagactgaacagaagcagcagcagcgagtgcagcaccgtggacaaccccctgcccggcgagggcgaggaggccgaggccgagcccatgaacagcgacgagcccgaggcctgcttcaccgacggctgcgtgtggagattcagctgctgccaggtgaacatcgagagcggcaagggcaagatctggtggaacatcagaaagacctgctacaagatcgtggagcacagctggttcgagagcttcatcgtgctgatgatcctgctgagcagcggcgccctggccttcgaggacatctacatcgagagaaagaagaccatcaagatcatcctggagtacgccgacaagatcttcacctacatcttcatcctggagatgctgctgaagtggatcgcctacggctacaagacctacttcaccaacgcctggtgctggctggacttcctgatcgtggacgtgagcctggtgaccctggtggccaacaccctgggctacagcgacctgggccccatcaagagcctgagaaccctgagagccctgagacccctgagagccctgagcagattcgagggcatgagagtggtggtgaacgccctgatcggcgccatccccagcatcatgaacgtgctgctggtgtgcctgatcttctggctgatcttcagcatcatgggcgtgaacctgttcgccggcaagttctacgagtgcatcaacaccaccgacggcagcagattccccgccagccaggtgcccaacagaagcgagtgcttcgccctgatgaacgtgagccagaacgtgagatggaagaacctgaaggtgaacttcgacaacgtgggcctgggctacctgagcctgctgcaggtggccaccttcaagggctggaccatcatcatgtacgccgccgtggacagcgtgaacgtggacaagcagcccaagtacgagtacagcctgtacatgtacatctacttcgtggtgttcatcatcttcggcagcttcttcaccctgaacctgttcatcggcgtgatcatcgacaacttcaaccagcagaagaagaagctgggcggccaggacatcttcatgaccgaggagcagaagaagtactacaacgccatgaagaagctgggcagcaagaagccccagaagcccatccccagacccggcaacaagatccagggctgcatcttcgacctggtgaccaaccaggccttcgacatcagcatcatggtgctgatctgcctgaacatggtgaccatgatggtggagaaggagggccagagccagcacatgaccgaggtgctgtactggatcaacgtggtgttcatcatcctgttcaccggcgagtgcgtgctgaagctgatcagcctgagacactactacttcaccgtgggctggaacatcttcgacttcgtggtggtgatcatcagcatcgtgggcatgttcctggccgacctgatcgagacctacttcgtgagccccaccctgttcagagtgatcagactggccagaatcggcagaatcctgagactggtgaagggcgccaagggcatcagaaccctgctgttcgccctgatgatgagcctgcccgccctgttcaacatcggcctgctgctgttcctggtgatgttcatctacgccatcttcggcatgagcaacttcgcctacgtgaagaaggaggacggcatcaacgacatgttcaacttcgagaccttcggcaacagcatgatctgcctgttccagatcaccaccagcgccggctgggacggcctgctggcccccatcctgaacagcaagccccccgactgcgaccccaagaaggtgcaccccggcagcagcgtggagggcgactgcggcaaccccagcgtgggcatcttctacttcgtgagctacatcatcatcagcttcctggtggtggtgaacatgtacatcgccgtgatcctggagaacttcagcgtggccaccgaggagagcaccgagcccctgagcgaggacgacttcgagatgttctacgaggtgtgggagaagttcgaccccgacgccacccagttcatcgagttcagcaagctgagcgacttcgccgccgccctggacccccccctgctgatcgccaagcccaacaaggtgcagctgatcgccatggacctgcccatggtgagcggcgacagaatccactgcctggacatcctgttcgccttcaccaagagagtgctgggcgagagcggcgagatggacagcctgagaagccagatggaggagagattcatgagcgccaaccccagcaaggtgagctacgagcccatcaccaccaccctgaagagaaagcaggaggacgtgagcgccaccgtgatccagagagcctacagaagatacagactgagacagaacgtgaagaacatcagcagcatctacatcaaggacggcgacagagacgacgacctgctgaacaagaaggacatggccttcgacaacgtgaacgagaacagcagccccgagaagaccgacgccaccagcagcaccaccagcccccccagctacgacagcgtgaccaagcccgacaaggagaagtacgagcaggacagaaccgagaaggaggacaagggcaaggacagcaaggagagcaagaagtag

SEQ ID NO: 99310 - DNA, 1620 bp, synthetic construct
  misc_feature 1..1620: note = Description of Artificial Sequence: Synthetic coding sequence
  source 1..1620: mol_type = other DNA
atcctgaccaactgcatcttcatgaccatgaacaacccccccgactggaccaagaacgtggagtacaccttcaccggcatctacaccttcgagagcctggtgaagatcctggccagaggcttctgcgtgggcgagttcaccttcctgagagacccctggaactggctggacttcgtggtgatcgtgttcgcctacgtgaccgagttcgtggacctgggcaacgtgagcgccctgagaaccttcagagtgctgagagccctgaagaccatcagcgtgatccccggcctgaagaccatcgtgggcgccctgatccagagcgtgaagaagctgagcgacgtgatgatcctgaccgtgttctgcctgagcgtgttcgccctgatcggcctgcagctgttcatgggcaacctgaagcacaagtgcttcagaaacagcctggagaacaacgagaccctggagagcatcatgaacaccctggagagcgaggaggacttcagaaagtacttctactacctggagggcagcaaggacgccctgctgtgcggcttcagcaccgacagcggccagtgccccgagggctacacctgcgtgaagatcggcagaaaccccgactacggctacaccagcttcgacaccttcagctgggccttcctggccctgttcagactgatgacccaggactactgggagaacctgtaccagcagaccctgagagccgccggcaagacctacatgatcttcttcgtggtggtgatcttcctgggcagcttctacctgatcaacctgatcctggccgtggtggccatggcctacgaggagcagaaccaggccaacatcgaggaggccaagcagaaggagctggagttccagcagatgctggacagactgaagaaggagcaggaggaggccgaggccatcgccgccgccgccgccgagtacaccagcatcagaagaagcagaatcatgggcctgagcgagagcagcagcgagaccagcaagctgagcagcaagagcgccaaggagagaagaaacagaagaaagaagaagaaccagaagaagctgagcagcggcgaggagaagggcgacgccgagaagctgagcaagagcgagagcgaggacagcatcagaagaaagagcttccacctgggcgtggagggccacagaagagcccacgagaagagactgagcacccccaaccagagccccctgagcatcagaggcagcctgttcagcgccagaagaagcagcagaaccagcctgttcagcttcaagggcagaggcagagacatcggcagcgagaccgagttcgccgacgacgagcacagcatcttcggcgacaacgagagcagaagaggcagcctgttcgtgccccacagaccccaggagagaagaagcagcaacatcagccaggccagcagaagcccccccatgctgcccgtgaacggcaagatgcacagcgccgtggactgcaacggcgtggtgagcctggtggacggcagaagcgccctgatgctgcccaacggccagctgctgcccgaggtgatcatcgacaaggccaccagcgacgacagcggcaccaccaaccagatccacaagaagagaagatgcagcagctacctgtag

SEQ ID NO: 99311 - DNA, 198 bp, synthetic construct
  misc_feature 1..198: note = Description of Artificial Sequence: Synthetic coding sequence
  source 1..198: mol_type = other DNA
atggccaacttcctgctgcccagaggcaccagcagcttcagaagattcaccagagagagcctggccgccatcgagaagagaatggccgagaagcaggccagaggcagcaccaccctgcaggagagcagagagggcctgcccgaggaggaggcccccagaccccagctggacctgcaggccagcaagaagctgccctag

SEQ ID NO: 99312 - DNA, 6051 bp, synthetic construct
  misc_feature 1..6051: note = Description of Artificial Sequence: Synthetic coding sequence
  source 1..6051: mol_type = other DNA
atggccaacttcctgctgcccagaggcaccagcagcttcagaagattcaccagagagagcctggccgccatcgagaagagaatggccgagaagcaggccagaggcagcaccaccctgcaggagagcagagagggcctgcccgaggaggaggcccccagaccccagctggacctgcaggccagcaagaagctgcccgacctgtacggcaaccccccccaggagctgatcggcgagcccctggaggacctggaccccttctacagcacccagaagaccttcatcgtgctgaacaagggcaagaccatcttcagattcagcgccaccaacgccctgtacgtgctgagccccttccaccccatcagaagagccgccgtgaagatcctggtgcacagcctgttcaacatgctgatcatgtgcaccatcctgaccaactgcgtgttcatggcccagcacgacccccccccctggaccaagtacgtggagtacaccttcaccgccatctacaccttcgagagcctggtgaagatcctggccagaggcttctgcctgcacgccttcaccttcctgagagacccctggaactggctggacttcagcgtgatcatcatggcctacaccaccgagttcgtggacctgggcaacgtgagcgccctgagaaccttcagagtgctgagagccctgaagaccatcagcgtgatcagcggcctgaagaccatcgtgggcgccctgatccagagcgtgaagaagctggccgacgtgatggtgctgaccgtgttctgcctgagcgtgttcgccctgatcggcctgcagctgttcatgggcaacctgagacacaagtgcgtgagaaacttcaccgccctgaacggcaccaacggcagcgtggaggccgacggcctggtgtgggagagcctggacctgtacctgagcgaccccgagaactacctgctgaagaacggcaccagcgacgtgctgctgtgcggcaacagcagcgacgccggcacctgccccgagggctacagatgcctgaaggccggcgagaaccccgaccacggctacaccagcttcgacagcttcgcctgggccttcctggccctgttcagactgatgacccaggactgctgggagagactgtaccagcagaccctgagaagcgccggcaagatctacatgatcttcttcatgctggtgatcttcctgggcagcttctacctggtgaacctgatcctggccgtggtggccatggcctacgaggagcagaaccaggccaccatcgccgagaccgaggagaaggagaagagattccaggaggccatggagatgctgaagaaggagcacgaggccctgaccatcagaggcgtggacaccgtgagcagaagcagcctggagatgagccccctggcccccgtgaacagccacgagagaagaagcaagagaagaaagagaatgagcagcggcaccgaggagtgcggcgaggacagactgcccaagagcgacagcgaggacggccccagagccatgaaccacctgagcctgaccagaggcctgagcagaaccagcatgaagcccagaagcagcagaggcagcatcttcaccttcagaagaagagacctgggcagcgaggccgacttcgccgacgacgagaacagcaccgccggcgagagcgagagccaccacaccagcctgctggtgccctggcccctgagaagaaccagcgcccagggccagcccagccccggcaccagcgcccccggccacgccctgcacggcaagaagaacagcaccgtggactgcaacggcgtggtgagcctgctgggcgccggcgaccccgaggccaccagccccggcagccacctgctgagacccgtgatgctggagcacccccccgacaccaccacccccagcgaggagcccggcggcccccagatgctgaccagccaggccccctgcgtggacggcttcgaggagcccggcgccagacagagagccctgagcgccgtgagcgtgctgaccagcgccctggaggagctggaggagagcagacacaagtgccccccctgctggaacagactggcccagagatacctgatctgggagtgctgccccctgtggatgagcatcaagcagggcgtgaagctggtggtgatggaccccttcaccgacctgaccatcaccatgtgcatcgtgctgaacaccctgttcatggccctggagcactacaacatgaccagcgagttcgaggagatgctgcaggtgggcaacctggtgttcaccggcatcttcaccgccgagatgaccttcaagatcatcgccctggacccctactactacttccagcagggctggaacatcttcgacagcatcatcgtgatcctgagcctgatggagctgggcctgagcagaatgagcaacctgagcgtgctgagaagcttcagactgctgagagtgttcaagctggccaagagctggcccaccctgaacaccctgatcaagatcatcggcaacagcgtgggcgccctgggcaacctgaccctggtgctggccatcatcgtgttcatcttcgccgtggtgggcatgcagctgttcggcaagaactacagcgagctgagagacagcgacagcggcctgctgcccagatggcacatgatggacttcttccacgccttcctgatcatcttcagaatcctgtgcggcgagtggatcgagaccatgtgggactgcatggaggtgagcggccagagcctgtgcctgctggtgttcctgctggtgatggtgatcggcaacctggtggtgctgaacctgttcctggccctgctgctgagcagcttcagcgccgacaacctgaccgcccccgacgaggacagagagatgaacaacctgcagctggccctggccagaatccagagaggcctgagattcgtgaagagaaccacctgggacttctgctgcggcctgctgagacagagaccccagaagcccgccgccctggccgcccagggccagctgcccagctgcatcgccaccccctacagcccccccccccccgagaccgagaaggtgccccccaccagaaaggagaccagattcgaggagggcgagcagcccggccagggcacccccggcgaccccgagcccgtgtgcgtgcccatcgccgtggccgagagcgacaccgacgaccaggaggaggacgaggagaacagcctgggcaccgaggaggagagcagcaagcagcaggagagccagcccgtgagcggcggccccgaggccccccccgacagcagaacctggagccaggtgagcgccaccgccagcagcgaggccgaggccagcgccagccaggccgactggagacagcagtggaaggccgagccccaggcccccggctgcggcgagacccccgaggacagctgcagcgagggcagcaccgccgacatgaccaacaccgccgagctgctggagcagatccccgacctgggccaggacgtgaaggaccccgaggactgcttcaccgagggctgcgtgagaagatgcccctgctgcgccgtggacaccacccaggcccccggcaaggtgtggtggagactgagaaagacctgctaccacatcgtggagcacagctggttcgagaccttcatcatcttcatgatcctgctgagcagcggcgccctggccttcgaggacatctacctggaggagagaaagaccatcaaggtgctgctggagtacgccgacaagatgttcacctacgtgttcgtgctggagatgctgctgaagtgggtggcctacggcttcaagaagtacttcaccaacgcctggtgctggctggacttcctgatcgtggacgtgagcctggtgagcctggtggccaacaccctgggcttcgccgagatgggccccatcaagagcctgagaaccctgagagccctgagacccctgagagccctgagcagattcgagggcatgagagtggtggtgaacgccctggtgggcgccatccccagcatcatgaacgtgctgctggtgtgcctgatcttctggctgatcttcagcatcatgggcgtgaacctgttcgccggcaagttcggcagatgcatcaaccagaccgagggcgacctgcccctgaactacaccatcgtgaacaacaagagccagtgcgagagcctgaacctgaccggcgagctgtactggaccaaggtgaaggtgaacttcgacaacgtgggcgccggctacctggccctgctgcaggtggccaccttcaagggctggatggacatcatgtacgccgccgtggacagcagaggctacgaggagcagccccagtgggagtacaacctgtacatgtacatctacttcgtgatcttcatcatcttcggcagcttcttcaccctgaacctgttcatcggcgtgatcatcgacaacttcaaccagcagaagaagaagctgggcggccaggacatcttcatgaccgaggagcagaagaagtactacaacgccatgaagaagctgggcagcaagaagccccagaagcccatccccagacccctgaacaagtaccagggcttcatcttcgacatcgtgaccaagcaggccttcgacgtgaccatcatgttcctgatctgcctgaacatggtgaccatgatggtggagaccgacgaccagagccccgagaagatcaacatcctggccaagatcaacctgctgttcgtggccatcttcaccggcgagtgcatcgtgaagctggccgccctgagacactactacttcaccaacagctggaacatcttcgacttcgtggtggtgatcctgagcatcgtgggcaccgtgctgagcgacatcatccagaagtacttcttcagccccaccctgttcagagtgatcagactggccagaatcggcagaatcctgagactgatcagaggcgccaagggcatcagaaccctgctgttcgccctgatgatgagcctgcccgccctgttcaacatcggcctgctgctgttcctggtgatgttcatctacagcatcttcggcatggccaacttcgcctacgtgaagtgggaggccggcatcgacgacatgttcaacttccagaccttcgccaacagcatgctgtgcctgttccagatcaccaccagcgccggctgggacggcctgctgagccccatcctgaacaccggccccccctactgcgaccccaccctgcccaacagcaacggcagcagaggcgactgcggcagccccgccgtgggcatcctgttcttcaccacctacatcatcatcagcttcctgatcgtggtgaacatgtacatcgccatcatcctggagaacttcagcgtggccaccgaggagagcaccgagcccctgagcgaggacgacttcgacatgttctacgagatctgggagaagttcgaccccgaggccacccagttcatcgagtacagcgtgctgagcgacttcgccgacgccctgagcgagcccctgagaatcgccaagcccaaccagatcagcctgatcaacatggacctgcccatggtgagcggcgacagaatccactgcatggacatcctgttcgccttcaccaagagagtgctgggcgagagcggcgagatggacgccctgaagatccagatggaggagaagttcatggccgccaaccccagcaagatcagctacgagcccatcaccaccaccctgagaagaaagcacgaggaggtgagcgccatggtgatccagagagccttcagaagacacctgctgcagagaagcctgaagcacgccagcttcctgttcagacagcaggccggcagcggcctgagcgaggaggacgcccccgagagagagggcctgatcgcctacgtgatgagcgagaacttcagcagacccctgggcccccccagcagcagcagcatcagcagcaccagcttcccccccagctacgacagcgtgaccagagccaccagcgacaacctgcaggtgagaggcagcgactacagccacagcgaggacctggccgacttcccccccagccccgacagagacagagagagcatcgtgtag

SEQ ID NO: 99313 - DNA, 342 bp, synthetic construct
  misc_feature 1..342: note = Description of Artificial Sequence: Synthetic coding sequence
  source 1..342: mol_type = other DNA
atggcccagcacgacccccccccctggaccaagtacgtggagtacgtgagcgagaacatcaagctgggcaacctgagcgccctgagaaccttcagagtgctgagagccctgaagaccatcagcgtgatccccggcctgaagaccatcgtgggcgccctgatccagagcgtgaagaagctggccgacgtgatggtgctgaccgtgttctgcctgagcgtgttcgccctgatcggcctgcagctgttcatgggcaacctgagacacaagtgcgtgagaaacttcaccgccctgaacggcaccaacggcagcgtggaggccgacggcctggtgtgggagagctag

SEQ ID NO: 99314 - DNA, 6051 bp, synthetic construct
  misc_feature 1..6051: note = Description of Artificial Sequence: Synthetic coding sequence
  source 1..6051: mol_type = other DNA
atggccaacttcctgctgcccagaggcaccagcagcttcagaagattcaccagagagagcctggccgccatcgagaagagaatggccgagaagcaggccagaggcagcaccaccctgcaggagagcagagagggcctgcccgaggaggaggcccccagaccccagctggacctgcaggccagcaagaagctgcccgacctgtacggcaaccccccccaggagctgatcggcgagcccctggaggacctggaccccttctacagcacccagaagaccttcatcgtgctgaacaagggcaagaccatcttcagattcagcgccaccaacgccctgtacgtgctgagccccttccaccccatcagaagagccgccgtgaagatcctggtgcacagcctgttcaacatgctgatcatgtgcaccatcctgaccaactgcgtgttcatggcccagcacgacccccccccctggaccaagtacgtggagtacaccttcaccgccatctacaccttcgagagcctggtgaagatcctggccagaggcttctgcctgcacgccttcaccttcctgagagacccctggaactggctggacttcagcgtgatcatcatggcctacgtgagcgagaacatcaagctgggcaacctgagcgccctgagaaccttcagagtgctgagagccctgaagaccatcagcgtgatccccggcctgaagaccatcgtgggcgccctgatccagagcgtgaagaagctggccgacgtgatggtgctgaccgtgttctgcctgagcgtgttcgccctgatcggcctgcagctgttcatgggcaacctgagacacaagtgcgtgagaaacttcaccgccctgaacggcaccaacggcagcgtggaggccgacggcctggtgtgggagagcctggacctgtacctgagcgaccccgagaactacctgctgaagaacggcaccagcgacgtgctgctgtgcggcaacagcagcgacgccggcacctgccccgagggctacagatgcctgaaggccggcgagaaccccgaccacggctacaccagcttcgacagcttcgcctgggccttcctggccctgttcagactgatgacccaggactgctgggagagactgtaccagcagaccctgagaagcgccggcaagatctacatgatcttcttcatgctggtgatcttcctgggcagcttctacctggtgaacctgatcctggccgtggtggccatggcctacgaggagcagaaccaggccaccatcgccgagaccgaggagaaggagaagagattccaggaggccatggagatgctgaagaaggagcacgaggccctgaccatcagaggcgtggacaccgtgagcagaagcagcctggagatgagccccctggcccccgtgaacagccacgagagaagaagcaagagaagaaagagaatgagcagcggcaccgaggagtgcggcgaggacagactgcccaagagcgacagcgaggacggccccagagccatgaaccacctgagcctgaccagaggcctgagcagaaccagcatgaagcccagaagcagcagaggcagcatcttcaccttcagaagaagagacctgggcagcgaggccgacttcgccgacgacgagaacagcaccgccggcgagagcgagagccaccacaccagcctgctggtgccctggcccctgagaagaaccagcgcccagggccagcccagccccggcaccagcgcccccggccacgccctgcacggcaagaagaacagcaccgtggactgcaacggcgtggtgagcctgctgggcgccggcgaccccgaggccaccagccccggcagccacctgctgagacccgtgatgctggagcacccccccgacaccaccacccccagcgaggagcccggcggcccccagatgctgaccagccaggccccctgcgtggacggcttcgaggagcccggcgccagacagagagccctgagcgccgtgagcgtgctgaccagcgccctggaggagctggaggagagcagacacaagtgccccccctgctggaacagactggcccagagatacctgatctgggagtgctgccccctgtggatgagcatcaagcagggcgtgaagctggtggtgatggaccccttcaccgacctgaccatcaccatgtgcatcgtgctgaacaccctgttcatggccctggagcactacaacatgaccagcgagttcgaggagatgctgcaggtgggcaacctggtgttcaccggcatcttcaccgccgagatgaccttcaagatcatcgccctggacccctactactacttccagcagggctggaacatcttcgacagcatcatcgtgatcctgagcctgatggagctgggcctgagcagaatgagcaacctgagcgtgctgagaagcttcagactgctgagagtgttcaagctggccaagagctggcccaccctgaacaccctgatcaagatcatcggcaacagcgtgggcgccctgggcaacctgaccctggtgctggccatcatcgtgttcatcttcgccgtggtgggcatgcagctgttcggcaagaactacagcgagctgagagacagcgacagcggcctgctgcccagatggcacatgatggacttcttccacgccttcctgatcatcttcagaatcctgtgcggcgagtggatcgagaccatgtgggactgcatggaggtgagcggccagagcctgtgcctgctggtgttcctgctggtgatggtgatcggcaacctggtggtgctgaacctgttcctggccctgctgctgagcagcttcagcgccgacaacctgaccgcccccgacgaggacagagagatgaacaacctgcagctggccctggccagaatccagagaggcctgagattcgtgaagagaaccacctgggacttctgctgcggcctgctgagacagagaccccagaagcccgccgccctggccgcccagggccagctgcccagctgcatcgccaccccctacagcccccccccccccgagaccgagaaggtgccccccaccagaaaggagaccagattcgaggagggcgagcagcccggccagggcacccccggcgaccccgagcccgtgtgcgtgcccatcgccgtggccgagagcgacaccgacgaccaggaggaggacgaggagaacagcctgggcaccgaggaggagagcagcaagcagcaggagagccagcccgtgagcggcggccccgaggccccccccgacagcagaacctggagccaggtgagcgccaccgccagcagcgaggccgaggccagcgccagccaggccgactggagacagcagtggaaggccgagccccaggcccccggctgcggcgagacccccgaggacagctgcagcgagggcagcaccgccgacatgaccaacaccgccgagctgctggagcagatccccgacctgggccaggacgtgaaggaccccgaggactgcttcaccgagggctgcgtgagaagatgcccctgctgcgccgtggacaccacccaggcccccggcaaggtgtggtggagactgagaaagacctgctaccacatcgtggagcacagctggttcgagaccttcatcatcttcatgatcctgctgagcagcggcgccctggccttcgaggacatctacctggaggagagaaagaccatcaaggtgctgctggagtacgccgacaagatgttcacctacgtgttcgtgctggagatgctgctgaagtgggtggcctacggcttcaagaagtacttcaccaacgcctggtgctggctggacttcctgatcgtggacgtgagcctggtgagcctggtggccaacaccctgggcttcgccgagatgggccccatcaagagcctgagaaccctgagagccctgagacccctgagagccctgagcagattcgagggcatgagagtggtggtgaacgccctggtgggcgccatccccagcatcatgaacgtgctgctggtgtgcctgatcttctggctgatcttcagcatcatgggcgtgaacctgttcgccggcaagttcggcagatgcatcaaccagaccgagggcgacctgcccctgaactacaccatcgtgaacaacaagagccagtgcgagagcctgaacctgaccggcgagctgtactggaccaaggtgaaggtgaacttcgacaacgtgggcgccggctacctggccctgctgcaggtggccaccttcaagggctggatggacatcatgtacgccgccgtggacagcagaggctacgaggagcagccccagtgggagtacaacctgtacatgtacatctacttcgtgatcttcatcatcttcggcagcttcttcaccctgaacctgttcatcggcgtgatcatcgacaacttcaaccagcagaagaagaagctgggcggccaggacatcttcatgaccgaggagcagaagaagtactacaacgccatgaagaagctgggcagcaagaagccccagaagcccatccccagacccctgaacaagtaccagggcttcatcttcgacatcgtgaccaagcaggccttcgacgtgaccatcatgttcctgatctgcctgaacatggtgaccatgatggtggagaccgacgaccagagccccgagaagatcaacatcctggccaagatcaacctgctgttcgtggccatcttcaccggcgagtgcatcgtgaagctggccgccctgagacactactacttcaccaacagctggaacatcttcgacttcgtggtggtgatcctgagcatcgtgggcaccgtgctgagcgacatcatccagaagtacttcttcagccccaccctgttcagagtgatcagactggccagaatcggcagaatcctgagactgatcagaggcgccaagggcatcagaaccctgctgttcgccctgatgatgagcctgcccgccctgttcaacatcggcctgctgctgttcctggtgatgttcatctacagcatcttcggcatggccaacttcgcctacgtgaagtgggaggccggcatcgacgacatgttcaacttccagaccttcgccaacagcatgctgtgcctgttccagatcaccaccagcgccggctgggacggcctgctgagccccatcctgaacaccggccccccctactgcgaccccaccctgcccaacagcaacggcagcagaggcgactgcggcagccccgccgtgggcatcctgttcttcaccacctacatcatcatcagcttcctgatcgtggtgaacatgtacatcgccatcatcctggagaacttcagcgtggccaccgaggagagcaccgagcccctgagcgaggacgacttcgacatgttctacgagatctgggagaagttcgaccccgaggccacccagttcatcgagtacagcgtgctgagcgacttcgccgacgccctgagcgagcccctgagaatcgccaagcccaaccagatcagcctgatcaacatggacctgcccatggtgagcggcgacagaatccactgcatggacatcctgttcgccttcaccaagagagtgctgggcgagagcggcgagatggacgccctgaagatccagatggaggagaagttcatggccgccaaccccagcaagatcagctacgagcccatcaccaccaccctgagaagaaagcacgaggaggtgagcgccatggtgatccagagagccttcagaagacacctgctgcagagaagcctgaagcacgccagcttcctgttcagacagcaggccggcagcggcctgagcgaggaggacgcccccgagagagagggcctgatcgcctacgtgatgagcgagaacttcagcagacccctgggcccccccagcagcagcagcatcagcagcaccagcttcccccccagctacgacagcgtgaccagagccaccagcgacaacctgcaggtgagaggcagcgactacagccacagcgaggacctggccgacttcccccccagccccgacagagacagagagagcatcgtgtag

SEQ ID NO: 99315 - DNA, 5997 bp, synthetic construct
  misc_feature 1..5997: note = Description of Artificial Sequence: Synthetic coding sequence
  source 1..5997: mol_type = other DNA
atggccaacttcctgctgcccagaggcaccagcagcttcagaagattcaccagagagagcctggccgccatcgagaagagaatggccgagaagcaggccagaggcagcaccaccctgcaggagagcagagagggcctgcccgaggaggaggcccccagaccccagctggacctgcaggccagcaagaagctgcccgacctgtacggcaaccccccccaggagctgatcggcgagcccctggaggacctggaccccttctacagcacccagaagaccttcatcgtgctgaacaagggcaagaccatcttcagattcagcgccaccaacgccctgtacgtgctgagccccttccaccccatcagaagagccgccgtgaagatcctggtgcacagcctgttcaacatgctgatcatgtgcaccatcctgaccaactgcgtgttcatggcccagcacgacccccccccctggaccaagtacgtggagtacaccttcaccgccatctacaccttcgagagcctggtgaagatcctggccagaggcttctgcctgcacgccttcaccttcctgagagacccctggaactggctggacttcagcgtgatcatcatggcctacgtgagcgagaacatcaagctgggcaacctgagcgccctgagaaccttcagagtgctgagagccctgaagaccatcagcgtgatccccggcctgaagaccatcgtgggcgccctgatccagagcgtgaagaagctggccgacgtgatggtgctgaccgtgttctgcctgagcgtgttcgccctgatcggcctgcagctgttcatgggcaacctgagacacaagtgcgtgagaaacttcaccgccctgaacggcaccaacggcagcgtggaggccgacggcctggtgtgggagagcctggacctgtacctgagcgaccccgagaactacctgctgaagaacggcaccagcgacgtgctgctgtgcggcaacagcagcgacgccggcacctgccccgagggctacagatgcctgaaggccggcgagaaccccgaccacggctacaccagcttcgacagcttcgcctgggccttcctggccctgttcagactgatgacccaggactgctgggagagactgtaccagcagaccctgagaagcgccggcaagatctacatgatcttcttcatgctggtgatcttcctgggcagcttctacctggtgaacctgatcctggccgtggtggccatggcctacgaggagcagaaccaggccaccatcgccgagaccgaggagaaggagaagagattccaggaggccatggagatgctgaagaaggagcacgaggccctgaccatcagaggcgtggacaccgtgagcagaagcagcctggagatgagccccctggcccccgtgaacagccacgagagaagaagcaagagaagaaagagaatgagcagcggcaccgaggagtgcggcgaggacagactgcccaagagcgacagcgaggacggccccagagccatgaaccacctgagcctgaccagaggcctgagcagaaccagcatgaagcccagaagcagcagaggcagcatcttcaccttcagaagaagagacctgggcagcgaggccgacttcgccgacgacgagaacagcaccgccggcgagagcgagagccaccacaccagcctgctggtgccctggcccctgagaagaaccagcgcccagggccagcccagccccggcaccagcgcccccggccacgccctgcacggcaagaagaacagcaccgtggactgcaacggcgtggtgagcctgctgggcgccggcgaccccgaggccaccagccccggcagccacctgctgagacccgtgatgctggagcacccccccgacaccaccacccccagcgaggagcccggcggcccccagatgctgaccagccaggccccctgcgtggacggcttcgaggagcccggcgccagacagagagccctgagcgccgtgagcgtgctgaccagcgccctggaggagctggaggagagcagacacaagtgccccccctgctggaacagactggcccagagatacctgatctgggagtgctgccccctgtggatgagcatcaagcagggcgtgaagctggtggtgatggaccccttcaccgacctgaccatcaccatgtgcatcgtgctgaacaccctgttcatggccctggagcactacaacatgaccagcgagttcgaggagatgctgcaggtgggcaacctggtgttcaccggcatcttcaccgccgagatgaccttcaagatcatcgccctggacccctactactacttccagcagggctggaacatcttcgacagcatcatcgtgatcctgagcctgatggagctgggcctgagcagaatgagcaacctgagcgtgctgagaagcttcagactgctgagagtgttcaagctggccaagagctggcccaccctgaacaccctgatcaagatcatcggcaacagcgtgggcgccctgggcaacctgaccctggtgctggccatcatcgtgttcatcttcgccgtggtgggcatgcagctgttcggcaagaactacagcgagctgagagacagcgacagcggcctgctgcccagatggcacatgatggacttcttccacgccttcctgatcatcttcagaatcctgtgcggcgagtggatcgagaccatgtgggactgcatggaggtgagcggccagagcctgtgcctgctggtgttcctgctggtgatggtgatcggcaacctggtggtgctgaacctgttcctggccctgctgctgagcagcttcagcgccgacaacctgaccgcccccgacgaggacagagagatgaacaacctgcagctggccctggccagaatccagagaggcctgagattcgtgaagagaaccacctgggacttctgctgcggcctgctgagacagagaccccagaagcccgccgccctggccgcccagggccagctgcccagctgcatcgccaccccctacagcccccccccccccgagaccgagaaggtgccccccaccagaaaggagaccagattcgaggagggcgagcagcccggccagggcacccccggcgaccccgagcccgtgtgcgtgcccatcgccgtggccgagagcgacaccgacgaccaggaggaggacgaggagaacagcctgggcaccgaggaggagagcagcaagcagcaggagagccagcccgtgagcggcggccccgaggccccccccgacagcagaacctggagccaggtgagcgccaccgccagcagcgaggccgaggccagcgccagccaggccgactggagacagcagtggaaggccgagccccaggcccccggctgcggcgagacccccgaggacagctgcagcgagggcagcaccgccgacatgaccaacaccgccgagctgctggagcagatccccgacctgggccaggacgtgaaggaccccgaggactgcttcaccgagggctgcgtgagaagatgcccctgctgcgccgtggacaccacccaggcccccggcaaggtgtggtggagactgagaaagacctgctaccacatcgtggagcacagctggttcgagaccttcatcatcttcatgatcctgctgagcagcggcgccctggccttcgaggacatctacctggaggagagaaagaccatcaaggtgctgctggagtacgccgacaagatgttcacctacgtgttcgtgctggagatgctgctgaagtgggtggcctacggcttcaagaagtacttcaccaacgcctggtgctggctggacttcctgatcgtggacgtgagcctggtgagcctggtggccaacaccctgggcttcgccgagatgggccccatcaagagcctgagaaccctgagagccctgagacccctgagagccctgagcagattcgagggcatgagagtggtggtgaacgccctggtgggcgccatccccagcatcatgaacgtgctgctggtgtgcctgatcttctggctgatcttcagcatcatgggcgtgaacctgttcgccggcaagttcggcagatgcatcaaccagaccgagggcgacctgcccctgaactacaccatcgtgaacaacaagagccagtgcgagagcctgaacctgaccggcgagctgtactggaccaaggtgaaggtgaacttcgacaacgtgggcgccggctacctggccctgctgcaggtgtacgaggagcagccccagtgggagtacaacctgtacatgtacatctacttcgtgatcttcatcatcttcggcagcttcttcaccctgaacctgttcatcggcgtgatcatcgacaacttcaaccagcagaagaagaagctgggcggccaggacatcttcatgaccgaggagcagaagaagtactacaacgccatgaagaagctgggcagcaagaagccccagaagcccatccccagacccctgaacaagtaccagggcttcatcttcgacatcgtgaccaagcaggccttcgacgtgaccatcatgttcctgatctgcctgaacatggtgaccatgatggtggagaccgacgaccagagccccgagaagatcaacatcctggccaagatcaacctgctgttcgtggccatcttcaccggcgagtgcatcgtgaagctggccgccctgagacactactacttcaccaacagctggaacatcttcgacttcgtggtggtgatcctgagcatcgtgggcaccgtgctgagcgacatcatccagaagtacttcttcagccccaccctgttcagagtgatcagactggccagaatcggcagaatcctgagactgatcagaggcgccaagggcatcagaaccctgctgttcgccctgatgatgagcctgcccgccctgttcaacatcggcctgctgctgttcctggtgatgttcatctacagcatcttcggcatggccaacttcgcctacgtgaagtgggaggccggcatcgacgacatgttcaacttccagaccttcgccaacagcatgctgtgcctgttccagatcaccaccagcgccggctgggacggcctgctgagccccatcctgaacaccggccccccctactgcgaccccaccctgcccaacagcaacggcagcagaggcgactgcggcagccccgccgtgggcatcctgttcttcaccacctacatcatcatcagcttcctgatcgtggtgaacatgtacatcgccatcatcctggagaacttcagcgtggccaccgaggagagcaccgagcccctgagcgaggacgacttcgacatgttctacgagatctgggagaagttcgaccccgaggccacccagttcatcgagtacagcgtgctgagcgacttcgccgacgccctgagcgagcccctgagaatcgccaagcccaaccagatcagcctgatcaacatggacctgcccatggtgagcggcgacagaatccactgcatggacatcctgttcgccttcaccaagagagtgctgggcgagagcggcgagatggacgccctgaagatccagatggaggagaagttcatggccgccaaccccagcaagatcagctacgagcccatcaccaccaccctgagaagaaagcacgaggaggtgagcgccatggtgatccagagagccttcagaagacacctgctgcagagaagcctgaagcacgccagcttcctgttcagacagcaggccggcagcggcctgagcgaggaggacgcccccgagagagagggcctgatcgcctacgtgatgagcgagaacttcagcagacccctgggcccccccagcagcagcagcatcagcagcaccagcttcccccccagctacgacagcgtgaccagagccaccagcgacaacctgcaggtgagaggcagcgactacagccacagcgaggacctggccgacttcccccccagccccgacagagacagagagagcatcgtgtag

SEQ ID NO: 99316 - DNA, 6048 bp, synthetic construct
  misc_feature 1..6048: note = Description of Artificial Sequence: Synthetic coding sequence
  source 1..6048: mol_type = other DNA
atggccaacttcctgctgcccagaggcaccagcagcttcagaagattcaccagagagagcctggccgccatcgagaagagaatggccgagaagcaggccagaggcagcaccaccctgcaggagagcagagagggcctgcccgaggaggaggcccccagaccccagctggacctgcaggccagcaagaagctgcccgacctgtacggcaaccccccccaggagctgatcggcgagcccctggaggacctggaccccttctacagcacccagaagaccttcatcgtgctgaacaagggcaagaccatcttcagattcagcgccaccaacgccctgtacgtgctgagccccttccaccccatcagaagagccgccgtgaagatcctggtgcacagcctgttcaacatgctgatcatgtgcaccatcctgaccaactgcgtgttcatggcccagcacgacccccccccctggaccaagtacgtggagtacaccttcaccgccatctacaccttcgagagcctggtgaagatcctggccagaggcttctgcctgcacgccttcaccttcctgagagacccctggaactggctggacttcagcgtgatcatcatggcctacaccaccgagttcgtggacctgggcaacgtgagcgccctgagaaccttcagagtgctgagagccctgaagaccatcagcgtgatcagcggcctgaagaccatcgtgggcgccctgatccagagcgtgaagaagctggccgacgtgatggtgctgaccgtgttctgcctgagcgtgttcgccctgatcggcctgcagctgttcatgggcaacctgagacacaagtgcgtgagaaacttcaccgccctgaacggcaccaacggcagcgtggaggccgacggcctggtgtgggagagcctggacctgtacctgagcgaccccgagaactacctgctgaagaacggcaccagcgacgtgctgctgtgcggcaacagcagcgacgccggcacctgccccgagggctacagatgcctgaaggccggcgagaaccccgaccacggctacaccagcttcgacagcttcgcctgggccttcctggccctgttcagactgatgacccaggactgctgggagagactgtaccagcagaccctgagaagcgccggcaagatctacatgatcttcttcatgctggtgatcttcctgggcagcttctacctggtgaacctgatcctggccgtggtggccatggcctacgaggagcagaaccaggccaccatcgccgagaccgaggagaaggagaagagattccaggaggccatggagatgctgaagaaggagcacgaggccctgaccatcagaggcgtggacaccgtgagcagaagcagcctggagatgagccccctggcccccgtgaacagccacgagagaagaagcaagagaagaaagagaatgagcagcggcaccgaggagtgcggcgaggacagactgcccaagagcgacagcgaggacggccccagagccatgaaccacctgagcctgaccagaggcctgagcagaaccagcatgaagcccagaagcagcagaggcagcatcttcaccttcagaagaagagacctgggcagcgaggccgacttcgccgacgacgagaacagcaccgccggcgagagcgagagccaccacaccagcctgctggtgccctggcccctgagaagaaccagcgcccagggccagcccagccccggcaccagcgcccccggccacgccctgcacggcaagaagaacagcaccgtggactgcaacggcgtggtgagcctgctgggcgccggcgaccccgaggccaccagccccggcagccacctgctgagacccgtgatgctggagcacccccccgacaccaccacccccagcgaggagcccggcggcccccagatgctgaccagccaggccccctgcgtggacggcttcgaggagcccggcgccagacagagagccctgagcgccgtgagcgtgctgaccagcgccctggaggagctggaggagagcagacacaagtgccccccctgctggaacagactggcccagagatacctgatctgggagtgctgccccctgtggatgagcatcaagcagggcgtgaagctggtggtgatggaccccttcaccgacctgaccatcaccatgtgcatcgtgctgaacaccctgttcatggccctggagcactacaacatgaccagcgagttcgaggagatgctgcaggtgggcaacctggtgttcaccggcatcttcaccgccgagatgaccttcaagatcatcgccctggacccctactactacttccagcagggctggaacatcttcgacagcatcatcgtgatcctgagcctgatggagctgggcctgagcagaatgagcaacctgagcgtgctgagaagcttcagactgctgagagtgttcaagctggccaagagctggcccaccctgaacaccctgatcaagatcatcggcaacagcgtgggcgccctgggcaacctgaccctggtgctggccatcatcgtgttcatcttcgccgtggtgggcatgcagctgttcggcaagaactacagcgagctgagagacagcgacagcggcctgctgcccagatggcacatgatggacttcttccacgccttcctgatcatcttcagaatcctgtgcggcgagtggatcgagaccatgtgggactgcatggaggtgagcggccagagcctgtgcctgctggtgttcctgctggtgatggtgatcggcaacctggtggtgctgaacctgttcctggccctgctgctgagcagcttcagcgccgacaacctgaccgcccccgacgaggacagagagatgaacaacctgcagctggccctggccagaatccagagaggcctgagattcgtgaagagaaccacctgggacttctgctgcggcctgctgagacagagaccccagaagcccgccgccctggccgcccagggccagctgcccagctgcatcgccaccccctacagcccccccccccccgagaccgagaaggtgccccccaccagaaaggagaccagattcgaggagggcgagcagcccggccagggcacccccggcgaccccgagcccgtgtgcgtgcccatcgccgtggccgagagcgacaccgacgaccaggaggaggacgaggagaacagcctgggcaccgaggaggagagcagcaagcaggagagccagcccgtgagcggcggccccgaggccccccccgacagcagaacctggagccaggtgagcgccaccgccagcagcgaggccgaggccagcgccagccaggccgactggagacagcagtggaaggccgagccccaggcccccggctgcggcgagacccccgaggacagctgcagcgagggcagcaccgccgacatgaccaacaccgccgagctgctggagcagatccccgacctgggccaggacgtgaaggaccccgaggactgcttcaccgagggctgcgtgagaagatgcccctgctgcgccgtggacaccacccaggcccccggcaaggtgtggtggagactgagaaagacctgctaccacatcgtggagcacagctggttcgagaccttcatcatcttcatgatcctgctgagcagcggcgccctggccttcgaggacatctacctggaggagagaaagaccatcaaggtgctgctggagtacgccgacaagatgttcacctacgtgttcgtgctggagatgctgctgaagtgggtggcctacggcttcaagaagtacttcaccaacgcctggtgctggctggacttcctgatcgtggacgtgagcctggtgagcctggtggccaacaccctgggcttcgccgagatgggccccatcaagagcctgagaaccctgagagccctgagacccctgagagccctgagcagattcgagggcatgagagtggtggtgaacgccctggtgggcgccatccccagcatcatgaacgtgctgctggtgtgcctgatcttctggctgatcttcagcatcatgggcgtgaacctgttcgccggcaagttcggcagatgcatcaaccagaccgagggcgacctgcccctgaactacaccatcgtgaacaacaagagccagtgcgagagcctgaacctgaccggcgagctgtactggaccaaggtgaaggtgaacttcgacaacgtgggcgccggctacctggccctgctgcaggtggccaccttcaagggctggatggacatcatgtacgccgccgtggacagcagaggctacgaggagcagccccagtgggagtacaacctgtacatgtacatctacttcgtgatcttcatcatcttcggcagcttcttcaccctgaacctgttcatcggcgtgatcatcgacaacttcaaccagcagaagaagaagctgggcggccaggacatcttcatgaccgaggagcagaagaagtactacaacgccatgaagaagctgggcagcaagaagccccagaagcccatccccagacccctgaacaagtaccagggcttcatcttcgacatcgtgaccaagcaggccttcgacgtgaccatcatgttcctgatctgcctgaacatggtgaccatgatggtggagaccgacgaccagagccccgagaagatcaacatcctggccaagatcaacctgctgttcgtggccatcttcaccggcgagtgcatcgtgaagctggccgccctgagacactactacttcaccaacagctggaacatcttcgacttcgtggtggtgatcctgagcatcgtgggcaccgtgctgagcgacatcatccagaagtacttcttcagccccaccctgttcagagtgatcagactggccagaatcggcagaatcctgagactgatcagaggcgccaagggcatcagaaccctgctgttcgccctgatgatgagcctgcccgccctgttcaacatcggcctgctgctgttcctggtgatgttcatctacagcatcttcggcatggccaacttcgcctacgtgaagtgggaggccggcatcgacgacatgttcaacttccagaccttcgccaacagcatgctgtgcctgttccagatcaccaccagcgccggctgggacggcctgctgagccccatcctgaacaccggccccccctactgcgaccccaccctgcccaacagcaacggcagcagaggcgactgcggcagccccgccgtgggcatcctgttcttcaccacctacatcatcatcagcttcctgatcgtggtgaacatgtacatcgccatcatcctggagaacttcagcgtggccaccgaggagagcaccgagcccctgagcgaggacgacttcgacatgttctacgagatctgggagaagttcgaccccgaggccacccagttcatcgagtacagcgtgctgagcgacttcgccgacgccctgagcgagcccctgagaatcgccaagcccaaccagatcagcctgatcaacatggacctgcccatggtgagcggcgacagaatccactgcatggacatcctgttcgccttcaccaagagagtgctgggcgagagcggcgagatggacgccctgaagatccagatggaggagaagttcatggccgccaaccccagcaagatcagctacgagcccatcaccaccaccctgagaagaaagcacgaggaggtgagcgccatggtgatccagagagccttcagaagacacctgctgcagagaagcctgaagcacgccagcttcctgttcagacagcaggccggcagcggcctgagcgaggaggacgcccccgagagagagggcctgatcgcctacgtgatgagcgagaacttcagcagacccctgggcccccccagcagcagcagcatcagcagcaccagcttcccccccagctacgacagcgtgaccagagccaccagcgacaacctgcaggtgagaggcagcgactacagccacagcgaggacctggccgacttcccccccagccccgacagagacagagagagcatcgtgtag

SEQ ID NO: 99317 - DNA, 5997 bp, synthetic construct; identical to SEQ ID NO: 99315
  misc_feature 1..5997: note = Description of Artificial Sequence: Synthetic coding sequence
  source 1..5997: mol_type = other DNA

SEQ ID NO: 99318 - DNA, 6048 bp, synthetic construct; identical to SEQ ID NO: 99316
  misc_feature 1..6048: note = Description of Artificial Sequence: Synthetic coding sequence
  source 1..6048: mol_type = other DNA

SEQ ID NO: 99319 - DNA, 5889 bp, synthetic construct
  misc_feature 1..5889: note = Description of Artificial Sequence: Synthetic coding sequence
  source 1..5889: mol_type = other DNA
atggccaacttcctgctgcccagaggcaccagcagcttcagaagattcaccagagagagcctggccgccatcgagaagagaatggccgagaagcaggccagaggcagcaccaccctgcaggagagcagagagggcctgcccgaggaggaggcccccagaccccagctggacctgcaggccagcaagaagctgcccgacctgtacggcaaccccccccaggagctgatcggcgagcccctggaggacctggaccccttctacagcacccagaagaccttcatcgtgctgaacaagggcaagaccatcttcagattcagcgccaccaacgccctgtacgtgctgagccccttccaccccatcagaagagccgccgtgaagatcctggtgcacagcctgttcaacatgctgatcatgtgcaccatcctgaccaactgcgtgttcatggcccagcacgacccccccccctggaccaagtacgtggagtacaccttcaccgccatctacaccttcgagagcctggtgaagatcctggccagaggcttctgcctgcacgccttcaccttcctgagagacccctggaactggctggacttcagcgtgatcatcatggcctacaccaccgagttcgtggacctgggcaacgtgagcgccctgagaaccttcagagtgctgagagccctgaagaccatcagcgtgatcagcggcctgaagaccatcgtgggcgccctgatccagagcgtgaagaagctggccgacgtgatggtgctgaccgtgttctgcctgagcgtgttcgccctgatcggcctgcagctgttcatgggcaacctgagacacaagtgcgtgagaaacttcaccgccctgaacggcaccaacggcagcgtggaggccgacggcctggtgtgggagagcctggacctgtacctgagcgaccccgagaactacctgctgaagaacggcaccagcgacgtgctgctgtgcggcaacagcagcgacgccggcacctgccccgagggctacagatgcctgaaggccggcgagaaccccgaccacggctacaccagcttcgacagcttcgcctgggccttcctggccctgttcagactgatgacccaggactgctgggagagactgtaccagcagaccctgagaagcgccggcaagatctacatgatcttcttcatgctggtgatcttcctgggcagcttctacctggtgaacctgatcctggccgtggtggccatggcctacgaggagcagaaccaggccaccatcgccgagaccgaggagaaggagaagagattccaggaggccatggagatgctgaagaaggagcacgaggccctgaccatcagaggcgtggacaccgtgagcagaagcagcctggagatgagccccctggcccccgtgaacagccacgagagaagaagcaagagaagaaagagaatgagcagcggcaccgaggagtgcggcgaggacagactgcccaagagcgacagcgaggacggccccagagccatgaaccacctgagcctgaccagaggcctgagcagaaccagcatgaagcccagaagcagcagaggcagcatcttcaccttcagaagaagagacctgggcagcgaggccgacttcgccgacgacgagaacagcaccgccggcgagagcgagagccaccacaccagcctgctggtgccctggcccctgagaagaaccagcgcccagggccagcccagccccggcaccagcgcccccggccacgccctgcacggcaagaagaacagcaccgtggactgcaacggcgtggtgagcctgctgggcgccggcgaccccgaggccaccagccccggcagccacctgctgagacccgtgatgctggagcacccccccgacaccaccacccccagcgaggagcccggcggcccccagatgctgaccagccaggccccctgcgtggacggcttcgaggagcccggcgccagacagagagccctgagcgccgtgagcgtgctgaccagcgccctggaggagctggaggagagcagacacaagtgccccccctgctggaacagactggcccagagatacctgatctgggagtgctgccccctgtggatgagcatcaagcagggcgtgaagctggtggtgatggaccccttcaccgacctgaccatcaccatgtgcatcgtgctgaacaccctgttcatggccctggagcactacaacatgaccagcgagttcgaggagatgctgcaggtgggcaacctggtgttcaccggcatcttcaccgccgagatgaccttcaagatcatcgccctggacccctactactacttccagcagggctggaacatcttcgacagcatcatcgtgatcctgagcctgatggagctgggcctgagcagaatgagcaacctgagcgtgctgagaagcttcagactgctgagagtgttcaagctggccaagagctggcccaccctgaacaccctgatcaagatcatcggcaacagcgtgggcgccctgggcaacctgaccctggtgctggccatcatcgtgttcatcttcgccgtggtgggcatgcagctgttcggcaagaactacagcgagctgagagacagcgacagcggcctgctgcccagatggcacatgatggacttcttccacgccttcctgatcatcttcagaatcctgtgcggcgagtggatcgagaccatgtgggactgcatggaggtgagcggccagagcctgtgcctgctggtgttcctgctggtgatggtgatcggcaacctggtggtgctgaacctgttcctggccctgctgctgagcagcttcagcgccgacaacctgaccgcccccgacgaggacagagagatgaacaacctgcagctggccctggccagaatccagagaggcctgagattcgtgaagagaaccacctgggacttctgctgcggcctgctgagacagagaccccagaagcccgccgccctggccgcccagggccagctgcccagctgcatcgccaccccctacagcccccccccccccgagaccgagaaggtgccccccaccagaaaggagaccagattcgaggagggcgagcagcccggccagggcacccccggcgaccccgagcccgtgtgcgtgcccatcgccgtggccgagagcgacaccgacgaccaggaggaggacgaggagaacagcctgggcaccgaggaggagagcagcaagcagacccccgaggacagctgcagcgagggcagcaccgccgacatgaccaacaccgccgagctgctggagcagatccccgacctgggccaggacgtgaaggaccccgaggactgcttcaccgagggctgcgtgagaagatgcccctgctgcgccgtggacaccacccaggcccccggcaaggtgtggtggagactgagaaagacctgctaccacatcgtggagcacagctggttcgagaccttcatcatcttcatgatcctgctgagcagcggcgccctggccttcgaggacatctacctggaggagagaaagaccatcaaggtgctgctggagtacgccgacaagatgttcacctacgtgttcgtgctggagatgctgctgaagtgggtggcctacggcttcaagaagtacttcaccaacgcctggtgctggctggacttcctgatcgtggacgtgagcctggtgagcctggtggccaacaccctgggcttcgccgagatgggccccatcaagagcctgagaaccctgagagccctgagacccctgagagccctgagcagattcgagggcatgagagtggtggtgaacgccctggtgggcgccatccccagcatcatgaacgtgctgctggtgtgcctgatcttctggctgatcttcagcatcatgggcgtgaacctgttcgccggcaagttcggcagatgcatcaaccagaccgagggcgacctgcccctgaactacaccatcgtgaacaacaagagccagtgcgagagcctgaacctgaccggcgagctgtactggaccaaggtgaaggtgaacttcgacaacgtgggcgccggctacctggccctgctgcaggtggccaccttcaagggctggatggacatcatgtacgccgccgtggacagcagaggctacgaggagcagccccagtgggagtacaacctgtacatgtacatctacttcgtgatcttcatcatcttcggcagcttcttcaccctgaacctgttcatcggcgtgatcatcgacaacttcaaccagcagaagaagaagctgggcggccaggacatcttcatgaccgaggagcagaagaagtactacaacgccatgaagaagctgggcagcaagaagccccagaagcccatccccagacccctgaacaagtaccagggcttcatcttcgacatcgtgaccaagcaggccttcgacgtgaccatcatgttcctgatctgcctgaacatggtgaccatgatggtggagaccgacgaccagagccccgagaagatcaacatcctggccaagatcaacctgctgttcgtggccatcttcaccggcgagtgcatcgtgaagctggccgccctgagacactactacttcaccaacagctggaacatcttcgacttcgtggtggtgatcctgagcatcgtgggcaccgtgctgagcgacatcatccagaagtacttcttcagccccaccctgttcagagtgatcagactggccagaatcggcagaatcctgagactgatcagaggcgccaagggcatcagaaccctgctgttcgccctgatgatgagcctgcccgccctgttcaacatcggcctgctgctgttcctggtgatgttcatctacagcatcttcggcatggccaacttcgcctacgtgaagtgggaggccggcatcgacgacatgttcaacttccagaccttcgccaacagcatgctgtgcctgttccagatcaccaccagcgccggctgggacggcctgctgagccccatcctgaacaccggccccccctactgcgaccccaccctgcccaacagcaacggcagcagaggcgactgcggcagccccgccgtgggcatcctgttcttcaccacctacatcatcatcagcttcctgatcgtggtgaacatgtacatcgccatcatcctggagaacttcagcgtggccaccgaggagagcaccgagcccctgagcgaggacgacttcgacatgttctacgagatctgggagaagttcgaccccgaggccacccagttcatcgagtacagcgtgctgagcgacttcgccgacgccctgagcgagcccctgagaatcgccaagcccaaccagatcagcctgatcaacatggacctgcccatggtgagcggcgacagaatccactgcatggacatcctgttcgccttcaccaagagagtgctgggcgagagcggcgagatggacgccctgaagatccagatggaggagaagttcatggccgccaaccccagcaagatcagctacgagcccatcaccaccaccctgagaagaaagcacgaggaggtgagcgccatggtgatccagagagccttcagaagacacctgctgcagagaagcctgaagcacgccagcttcctgttcagacagcaggccggcagcggcctgagcgaggaggacgcccccgagagagagggcctgatcgcctacgtgatgagcgagaacttcagcagacccctgggcccccccagcagcagcagcatcagcagcaccagcttcccccccagctacgacagcgtgaccagagccaccagcgacaacctgcaggtgagaggcagcgactacagccacagcgaggacctggccgacttcccccccagccccgacagagacagagagagcatcgtgtag

SEQ ID NO: 99320 - DNA, 5889 bp, synthetic construct
  misc_feature 1..5889: note = Description of Artificial Sequence: Synthetic coding sequence
  source 1..5889: mol_type = other DNA
atggccaacttcctgctgcccagaggcaccagcagcttcagaagattcaccagagagagcctggccgccatcgagaagagaatggccgagaagcaggccagaggcagcaccaccctgcaggagagcagagagggcctgcccgaggaggaggcccccagaccccagctggacctgcaggccagcaagaagctgcccgacctgtacggcaaccccccccaggagctgatcggcgagcccctggaggacctggaccccttctacagcacccagaagaccttcatcgtgctgaacaagggcaagaccatcttcagattcagcgccaccaacgccctgtacgtgctgagccccttccaccccatcagaagagccgccgtgaagatcctggtgcacagcctgttcaacatgctgatcatgtgcaccatcctgaccaactgcgtgttcatggcccagcacgacccccccccctggaccaagtacgtggagtacaccttcaccgccatctacaccttcgagagcctggtgaagatcctggccagaggcttctgcctgcacgccttcaccttcctgagagacccctggaactggctggacttcagcgtgatcatcatggcctacgtgagcgagaacatcaagctgggcaacctgagcgccctgagaaccttcagagtgctgagagccctgaagaccatcagcgtgatccccggcctgaagaccatcgtgggcgccctgatccagagcgtgaagaagctggccgacgtgatggtgctgaccgtgttctgcctgagcgtgttcgccctgatcggcctgcagctgttcatgggcaacctgagacacaagtgcgtgagaaacttcaccgccctgaacggcaccaacggcagcgtggaggccgacggcctggtgtgggagagcctggacctgtacctgagcgaccccgagaactacctgctgaagaacggcaccagcgacgtgctgctgtgcggcaacagcagcgacgccggcacctgccccgagggctacagatgcctgaaggccggcgagaaccccgaccacggctacaccagcttcgacagcttcgcctgggccttcctggccctgttcagactgatgacccaggactgctgggagagactgtaccagcagaccctgagaagcgccggcaagatctacatgatcttcttcatgctggtgatcttcctgggcagcttctacctggtgaacctgatcctggccgtggtggccatggcctacgaggagcagaaccaggccaccatcgccgagaccgaggagaaggagaagagattccaggaggccatggagatgctgaagaaggagcacgaggccctgaccatcagaggcgtggacaccgtgagcagaagcagcctggagatgagccccctggcccccgtgaacagccacgagagaagaagcaagagaagaaagagaatgagcagcggcaccgaggagtgcggcgaggacagactgcccaagagcgacagcgaggacggccccagagccatgaaccacctgagcctgaccagaggcctgagcagaaccagcatgaagcccagaagcagcagaggcagcatcttcaccttcagaagaagagacctgggcagcgaggccgacttcgccgacgacgagaacagcaccgccggcgagagcgagagccaccacaccagcctgctggtgccctggcccctgagaagaaccagcgcccagggccagcccagccccggcaccagcgcccccggccacgccctgcacggcaagaagaacagcaccgtggactgcaacggcgtggtgagcctgctgggcgccggcgaccccgaggccaccagccccggcagccacctgctgagacccgtgatgctggagcacccccccgacaccaccacccccagcgaggagcccggcggcccccagatgctgaccagccaggccccctgcgtggacggcttcgaggagcccggcgccagacagagagccctgagcgccgtgagcgtgctgaccagcgccctggaggagctggaggagagcagacacaagtgccccccctgctggaacagactggcccagagatacctgatctgggagtgctgccccctgtggatgagcatcaagcagggcgtgaagctggtggtgatggaccccttcaccgacctgaccatcaccatgtgcatcgtgctgaacaccctgttcatggccctggagcactacaacatgaccagcgagttcgaggagatgctgcaggtgggcaacctggtgttcaccggcatcttcaccgccgagatgaccttcaagatcatcgccctggacccctactactacttccagcagggctggaacatcttcgacagcatcatcgtgatcctgagcctgatggagctgggcctgagcagaatgagcaacctgagcgtgctgagaagcttcagactgctgagagtgttcaagctggccaagagctggcccaccctgaacaccctgatcaagatcatcggcaacagcgtgggcgccctgggcaacctgaccctggtgctggccatcatcgtgttcatcttcgccgtggtgggcatgcagctgttcggcaagaactacagcgagctgagagacagcgacagcggcctgctgcccagatggcacatgatggacttcttccacgccttcctgatcatcttcagaatcctgtgcggcgagtggatcgagaccatgtgggactgcatggaggtgagcggccagagcctgtgcctgctggtgttcctgctggtgatggtgatcggcaacctggtggtgctgaacctgttcctggccctgctgctgagcagcttcagcgccgacaacctgaccgcccccgacgaggacagagagatgaacaacctgcagctggccctggccagaatccagagaggcctgagattcgtgaagagaaccacctgggacttctgctgcggcctgctgagacagagaccccagaagcccgccgccctggccgcccagggccagctgcccagctgcatcgccaccccctacagcccccccccccccgagaccgagaaggtgccccccaccagaaaggagaccagattcgaggagggcgagcagcccggccagggcacccccggcgaccccgagcccgtgtgcgtgcccatcgccgtggccgagagcgacaccgacgaccaggaggaggacgaggagaacagcctgggcaccgaggaggagagcagcaagcagacccccgaggacagctgcagcgagggcagcaccgccgacatgaccaacaccgccgagctgctggagcagatccccgacctgggccaggacgtgaaggaccccgaggactgcttcaccgagggctgcgtgagaagatgcccctgctgcgccgtggacaccacccaggcccccggcaaggtgtggtggagactgagaaagacctgctaccacatcgtggagcacagctggttcgagaccttcatcatcttcatgatcctgctgagcagcggcgccctggccttcgaggacatctacctggaggagagaaagaccatcaaggtgctgctggagtacgccgacaagatgttcacctacgtgttcgtgctggagatgctgctgaagtgggtggcctacggcttcaagaagtacttcaccaacgcctggtgctggctggacttcctgatcgtggacgtgagcctggtgagcctggtggccaacaccctgggcttcgccgagatgggccccatcaagagcctgagaaccctgagagccctgagacccctgagagccctgagcagattcgagggcatgagagtggtggtgaacgccctggtgggcgccatccccagcatcatgaacgtgctgctggtgtgcctgatcttctggctgatcttcagcatcatgggcgtgaacctgttcgccggcaagttcggcagatgcatcaaccagaccgagggcgacctgcccctgaactacaccatcgtgaacaacaagagccagtgcgagagcctgaacctgaccggcgagctgtactggaccaaggtgaaggtgaacttcgacaacgtgggcgccggctacctggccctgctgcaggtggccaccttcaagggctggatggacatcatgtacgccgccgtggacagcagaggctacgaggagcagccccagtgggagtacaacctgtacatgtacatctacttcgtgatcttcatcatcttcggcagcttcttcaccctgaacctgttcatcggcgtgatcatcgacaacttcaaccagcagaagaagaagctgggcggccaggacatcttcatgaccgaggagcagaagaagtactacaacgccatgaagaagctgggcagcaagaagccccagaagcccatccccagacccctgaacaagtaccagggcttcatcttcgacatcgtgaccaagcaggccttcgacgtgaccatcatgttcctgatctgcctgaacatggtgaccatgatggtggagaccgacgaccagagccccgagaagatcaacatcctggccaagatcaacctgctgttcgtggccatcttcaccggcgagtgcatcgtgaagctggccgccctgagacactactacttcaccaacagctggaacatcttcgacttcgtggtggtgatcctgagcatcgtgggcaccgtgctgagcgacatcatccagaagtacttcttcagccccaccctgttcagagtgatcagactggccagaatcggcagaatcctgagactgatcagaggcgccaagggcatcagaaccctgctgttcgccctgatgatgagcctgcccgccctgttcaacatcggcctgctgctgttcctggtgatgttcatctacagcatcttcggcatggccaacttcgcctacgtgaagtgggaggccggcatcgacgacatgttcaacttccagaccttcgccaacagcatgctgtgcctgttccagatcaccaccagcgccggctgggacggcctgctgagccccatcctgaacaccggccccccctactgcgaccccaccctgcccaacagcaacggcagcagaggcgactgcggcagccccgccgtgggcatcctgttcttcaccacctacatcatcatcagcttcctgatcgtggtgaacatgtacatcgccatcatcctggagaacttcagcgtggccaccgaggagagcaccgagcccctgagcgaggacgacttcgacatgttctacgagatctgggagaagttcgaccccgaggccacccagttcatcgagtacagcgtgctgagcgacttcgccgacgccctgagcgagcccctgagaatcgccaagcccaaccagatcagcctgatcaacatggacctgcccatggtgagcggcgacagaatccactgcatggacatcctgttcgccttcaccaagagagtgctgggcgagagcggcgagatggacgccctgaagatccagatggaggagaagttcatggccgccaaccccagcaagatcagctacgagcccatcaccaccaccctgagaagaaagcacgaggaggtgagcgccatggtgatccagagagccttcagaagacacctgctgcagagaagcctgaagcacgccagcttcctgttcagacagcaggccggcagcggcctgagcgaggaggacgcccccgagagagagggcctgatcgcctacgtgatgagcgagaacttcagcagacccctgggcccccccagcagcagcagcatcagcagcaccagcttcccccccagctacgacagcgtgaccagagccaccagcgacaacctgcaggtgagaggcagcgactacagccacagcgaggacctggccgacttcccccccagccccgacagagacagagagagcatcgtgtag

SEQ ID NO: 99321 - DNA, 5889 bp, synthetic construct; identical to SEQ ID NO: 99320
  misc_feature 1..5889: note = Description of Artificial Sequence: Synthetic coding sequence
  source 1..5889: mol_type = other DNA

SEQ ID NO: 99322 - DNA, 5952 bp, synthetic construct
  misc_feature 1..5952: note = Description of Artificial Sequence: Synthetic coding sequence
  source 1..5952: mol_type = other DNA
atggccaacttcctgctgcccagaggcaccagcagcttcagaagattcaccagagagagcctggccgccatcgagaagagaatggccgagaagcaggccagaggcagcaccaccctgcaggagagcagagagggcctgcccgaggaggaggcccccagaccccagctggacctgcaggccagcaagaagctgcccgacctgtacggcaaccccccccaggagctgatcggcgagcccctggaggacctggaccccttctacagcacccagaagaccttcatcgtgctgaacaagggcaagaccatcttcagattcagcgccaccaacgccctgtacgtgctgagccccttccaccccatcagaagagccgccgtgaagatcctggtgcacagcctgttcaacatgctgatcatgtgcaccatcctgaccaactgcgtgttcatggcccagcacgacccccccccctggaccaagtacgtggagtacaccttcaccgccatctacaccttcgagagcctggtgaagatcctggccagaggcttctgcctgcacgccttcaccttcctgagagacccctggaactggctggacttcagcgtgatcatcatggcctacgtgagcgagaacatcaagctgggcaacctgagcgccctgagaaccttcagagtgctgagagccctgaagaccatcagcgtgatccccggcctgaagaccatcgtgggcgccctgatccagagcgtgaagaagctggccgacgtgatggtgctgaccgtgttctgcctgagcgtgttcgccctgatcggcctgcagctgttcatgggcaacctgagacacaagtgcgtgagaaacttcaccgccctgaacggcaccaacggcagcgtggaggccgacggcctggtgtgggagagcctggacctgtacctgagcgaccccgagaactacctgctgaagaacggcaccagcgacgtgctgctgtgcggcaacagcagcgacgccggcacctgccccgagggctacagatgcctgaaggccggcgagaaccccgaccacggctacaccagcttcgacagcttcgcctgggccttcctggccctgttcagactgatgacccaggactgctgggagagactgtaccagcagaccctgagaagcgccggcaagatctacatgatcttcttcatgctggtgatcttcctgggcagcttctacctggtgaacctgatcctggccgtggtggccatggcctacgaggagcagaaccaggccaccatcgccgagaccgaggagaaggagaagagattccaggaggccatggagatgctgaagaaggagcacgaggccctgaccatcagaggcgtggacaccgtgagcagaagcagcctggagatgagccccctggcccccgtgaacagccacgagagaagaagcaagagaagaaagagaatgagcagcggcaccgaggagtgcggcgaggacagactgcccaagagcgacagcgaggacggccccagagccatgaaccacctgagcctgaccagaggcctgagcagaaccagcatgaagcccagaagcagcagaggcagcatcttcaccttcagaagaagagacctgggcagcgaggccgacttcgccgacgacgagaacagcaccgccggcgagagcgagagccaccacaccagcctgctggtgccctggcccctgagaagaaccagcgcccagggccagcccagccccggcaccagcgcccccggccacgccctgcacggcaagaagaacagcaccgtggactgcaacggcgtggtgagcctgctgggcgccggcgaccccgaggccaccagccccggcagccacctgctgagacccgtgatgctggagcacccccccgacaccaccacccccagcgaggagcccggcggcccccagatgctgaccagccaggccccctgcgtggacggcttcgaggagcccggcgccagacagagagccctgagcgccgtgagcgtgctgaccagcgccctggaggagctggaggagagcagacacaagtgccccccctgctggaacagactggcccagagatacctgatctgggagtgctgccccctgtggatgagcatcaagcagggcgtgaagctggtggtgatggaccccttcaccgacctgaccatcaccatgtgcatcgtgctgaacaccctgttcatggccctggagcactacaacatgaccagcgagttcgaggagatgctgcaggtgggcaacctggtgttcaccggcatcttcaccgccgagatgaccttcaagatcatcgccctggacccctactactacttccagcagggctggaacatcttcgacagcatcatcgtgatcctgagcctgatggagctgggcctgagcagaatgagcaacctgagcgtgctgagaagcttcagactgctgagagtgttcaagctggccaagagctggcccaccctgaacaccctgatcaagatcatcggcaacagcgtgggcgccctgggcaacctgaccctggtgctggccatcatcgtgttcatcttcgccgtggtgggcatgcagctgttcggcaagaactacagcgagctgagagacagcgacagcggcctgctgcccagatggcacatgatggacttcttccacgccttcctgatcatcttcagaatcctgtgcggcgagtggatcgagaccatgtgggactgcatggaggtgagcggccagagcctgtgcctgctggtgttcctgctggtgatggtgatcggcaacctggtggtgctgaacctgttcctggccctgctgctgagcagcttcagcgccgacaacctgaccgcccccgacgaggacagagagatgaacaacctgcagctggccctggccagaatccagagaggcctgagattcgtgaagagaaccacctgggacttctgctgcggcctgctgagacagagaccccagaagcccgccgccctggccgcccagggccagctgcccagctgcatcgccaccccctacagcccccccccccccgagaccgagaaggtgccccccaccagaaaggagaccagattcgaggagggcgagcagcccggccagggcacccccggcgaccccgagcccgtgtgcgtgcccatcgccgtggccgagagcgacaccgacgaccaggaggaggacgaggagaacagcctgggcaccgaggaggagagcagcaagcaggagagccagcccgtgagcggcggccccgaggccccccccgacagcagaacctggagccaggtgagcgccaccgccagcagcgaggccgaggccagcgccagccaggccgactggagacagcagtggaaggccgagccccaggcccccggctgcggcgagacccccgaggacagctgcagcgagggcagcaccgccgacatgaccaacaccgccgagctgctggagcagatccccgacctgggccaggacgtgaaggaccccgaggactgcttcaccgagggctgcgtgagaagatgcccctgctgcgccgtggacaccacccaggcccccggcaaggtgtggtggagactgagaaagacctgctaccacatcgtggagcacagctggttcgagaccttcatcatcttcatgatcctgctgagcagcggcgccctggccttcgaggacatctacctggaggagagaaagaccatcaaggtgctgctggagtacgccgacaagatgttcacctacgtgttcgtgctggagatgctgctgaagtgggtggcctacggcttcaagaagtacttcaccaacgcctggtgctggctggacttcctgatcgtggacgtgagcctggtgagcctggtggccaacaccctgggcttcgccgagatgggccccatcaagagcctgagaaccctgagagccctgagacccctgagagccctgagcagattcgagggcatgagagtggtggtgaacgccctggtgggcgccatccccagcatcatgaacgtgctgctggtgtgcctgatcttctggctgatcttcagcatcatgggcgtgaacctgttcgccggcaagttcggcagatgcatcaaccagaccgagggcgacctgcccctgaactacaccatcgtgaacaacaagagccagtgcgagagcctgaacctgaccggcgagctgtactggaccaaggtgaaggtgaacttcgacaacgtgggcgccggctacctggccctgctgcaggtggccaccttcaagggctggatggacatcatgtacgccgccgtggacagcagaggctacgaggagcagccccagtgggagtacaacctgtacatgtacatctacttcgtgatcttcatcatcttcggcagcttcttcaccctgaacctgttcatcggcgtgatcatcgacaacttcaaccagcagaagaagaagctgggcggccaggacatcttcatgaccgaggagcagaagaagtactacaacgccatgaagaagctgggcagcaagaagccccagaagcccatccccagacccctgaacaagtaccagggcttcatcttcgacatcgtgaccaagcaggccttcgacgtgaccatcatgttcctgatctgcctgaacatggtgaccatgatggtggagaccgacgaccagagccccgagaagatcaacatcctggccaagatcaacctgctgttcgtggccatcttcaccggcaccgtgctgagcgacatcatccagaagtacttcttcagccccaccctgttcagagtgatcagactggccagaatcggcagaatcctgagactgatcagaggcgccaagggcatcagaaccctgctgttcgccctgatgatgagcctgcccgccctgttcaacatcggcctgctgctgttcctggtgatgttcatctacagcatcttcggcatggccaacttcgcctacgtgaagtgggaggccggcatcgacgacatgttcaacttccagaccttcgccaacagcatgctgtgcctgttccagatcaccaccagcgccggctgggacggcctgctgagccccatcctgaacaccggccccccctactgcgaccccaccctgcccaacagcaacggcagcagaggcgactgcggcagccccgccgtgggcatcctgttcttcaccacctacatcatcatcagcttcctgatcgtggtgaacatgtacatcgccatcatcctggagaacttcagcgtggccaccgaggagagcaccgagcccctgagcgaggacgacttcgacatgttctacgagatctgggagaagttcgaccccgaggccacccagttcatcgagtacagcgtgctgagcgacttcgccgacgccctgagcgagcccctgagaatcgccaagcccaaccagatcagcctgatcaacatggacctgcccatggtgagcggcgacagaatccactgcatggacatcctgttcgccttcaccaagagagtgctgggcgagagcggcgagatggacgccctgaagatccagatggaggagaagttcatggccgccaaccccagcaagatcagctacgagcccatcaccaccaccctgagaagaaagcacgaggaggtgagcgccatggtgatccagagagccttcagaagacacctgctgcagagaagcctgaagcacgccagcttcctgttcagacagcaggccggcagcggcctgagcgaggaggacgcccccgagagagagggcctgatcgcctacgtgatgagcgagaacttcagcagacccctgggcccccccagcagcagcagcatcagcagcaccagcttcccccccagctacgacagcgtgaccagagccaccagcgacaacctgcaggtgagaggcagcgactacagccacagcgaggacctggccgacttcccccccagccccgacagagacagagagagcatcgtgtag

SEQ ID NO: 99323 - DNA, 5049 bp, synthetic construct
  misc_feature 1..5049: note = Description of Artificial Sequence: Synthetic coding sequence
  source 1..5049: mol_type = other DNA
atgctggccagccccgagcccaagggcctggtgcccttcaccaaggagagcttcgagctgatcaagcagcacatcgccaagacccacaacgaggaccacgaggaggaggacctgaagcccacccccgacctggaggtgggcaagaagctgcccttcatctacggcaacctgagccagggcatggtgagcgagcccctggaggacgtggacccctactactacaagaagaagaacaccttcatcgtgctgaacaagaacagaaccatcttcagattcaacgccgccagcatcctgtgcaccctgagccccttcaactgcatcagaagaaccaccatcaaggtgctggtgcaccccttcttccagctgttcatcctgatcagcgtgctgatcgactgcgtgttcatgagcctgaccaacctgcccaagtggagacccgtgctggagaacaccctgctgggcatctacaccttcgagatcctggtgaagctgttcgccagaggcgtgtgggccggcagcttcagcttcctgggcgacccctggaactggctggacttcagcgtgaccgtgttcgaggtgatcatcagatacagccccctggacttcatccccaccctgcagaccgccagaaccctgagaatcctgaagatcatccccctgaaccagggcctgaagagcctggtgggcgtgctgatccactgcctgaagcagctgatcggcgtgatcatcctgaccctgttcttcctgagcatcttcagcctgatcggcatgggcctgttcatgggcaacctgaagcacaagtgcttcagatggccccaggagaacgagaacgagaccctgcacaacagaaccggcaacccctactacatcagagagaccgagaacttctactacctggagggcgagagatacgccctgctgtgcggcaacagaaccgacgccggccagtgccccgagggctacgtgtgcgtgaaggccggcatcaaccccgaccagggcttcaccaacttcgacagcttcggctgggccctgttcgccctgttcagactgatggcccaggactaccccgaggtgctgtaccaccagatcctgtacgccagcggcaaggtgtacatgatcttcttcgtggtggtgagcttcctgttcagcttctacatggccagcctgttcctgggcatcctggccatggcctacgaggaggagaagcagagagtgggcgagatcagcaagaagatcgagcccaagttccagcagaccggcaaggagctgcaggagggcaacgagaccgacgaggccaagaccatccagatcgagatgaagaagagaagccccatcagcaccgacaccagcctggacgtgctggaggacgccaccctgagacacaaggaggagctggagaagagcaagaagatctgccccctgtactggtacaagttcgccaagaccttcctgatctggaactgcagcccctgctggctgaagctgaaggagttcgtgcacagaatcatcatggcccccttcaccgacctgttcctgatcatctgcatcatcctgaacgtgtgcttcctgaccctggagcactaccccatgagcaagcagaccaacaccctgctgaacatcggcaacctggtgttcatcggcatcttcaccgccgagatgatcttcaagatcatcgccatgcacccctacggctacttccaggtgggctggaacatcttcgacagcatgatcgtgttccacggcctgatcgagctgtgcctggccaacgtggccggcatggccctgctgagactgttcagaatgctgagaatcttcaagctgggcaagtactggcccaccttccagatcctgatgtggagcctgagcaacagctgggtggccctgaaggacctggtgctgctgctgttcaccttcatcttcttcagcgccgccttcggcatgaagctgttcggcaagaactacgaggagttcgtgtgccacatcgacaaggactgccagctgcccagatggcacatgcacgacttcttccacagcttcctgaacgtgttcagaatcctgtgcggcgagtgggtggagaccctgtgggactgcatggaggtggccggccagagctggtgcatccccttctacctgatggtgatcctgatcggcaacctgctggtgctgtacctgttcctggccctggtgagcagcttcagcagctgcaaggacgtgaccgccgaggagaacaacgaggccaagaacctgcagctggccgtggccagaatcaagaagggcatcaactacgtgctgctgaagatcctgtgcaagacccagaacgtgcccaaggacaccatggaccacgtgaacgaggtgtacgtgaaggaggacatcagcgaccacaccctgagcgagctgagcaacacccaggacttcctgaaggacaaggagaagagcagcggcaccgagaagaacgccaccgagaacgagagccagagcctgatccccagccccagcgtgagcgagaccgtgcccatcgccagcggcgagagcgacatcgagaacctggacaacaaggagatccagagcaagagcggcgacggcggcagcaaggagaagatcaagcagagcagcagcagcgagtgcagcaccgtggacatcgccatcagcgaggaggaggagatgttctacggcggcgagagaagcaagcacctgaagaacggctgcagaagaggcagcagcctgggccagatcagcggcgccagcaagaagggcaagatctggcagaacatcagaaagacctgctgcaagatcgtggagaacaactggttcaagtgcttcatcggcctggtgaccctgctgagcaccggcaccctggccttcgaggacatctacatggaccagagaaagaccatcaagatcctgctggagtacgccgacatgatcttcacctacatcttcatcctggagatgctgctgaagtggatggcctacggcttcaaggcctacttcagcaacggctggtacagactggacttcgtggtggtgatcgtgttctgcctgagcctgatcggcaagaccagagaggagctgaagcccctgatcagcatgaagttcctgagacccctgagagtgctgagccagttcgagagaatgaaggtggtggtgagagccctgatcaagaccaccctgcccaccctgaacgtgttcctggtgtgcctgatgatctggctgatcttcagcatcatgggcgtggacctgttcgccggcagattctacgagtgcatcgaccccaccagcggcgagagattccccagcagcgaggtgatgaacaagagcagatgcgagagcctgctgttcaacgagagcatgctgtgggagaacgccaagatgaacttcgacaacgtgggcaacggcttcctgagcctgctgcaggtggccaccttcaacggctggatcaccatcatgaacagcgccatcgacagcgtggccgtgaacatccagccccacttcgaggtgaacatctacatgtactgctacttcatcaacttcatcatcttcggcgtgttcctgcccctgagcatgctgatcaccgtgatcatcgacaacttcaacaagcacaagatcaagctgggcggcagcaacatcttcatcaccgtgaagcagagaaagcagtacagaagactgaagaagctgatgtacgaggacagccagagacccgtgcccagacccctgaacaagctgcagggcttcatcttcgacgtggtgaccagccaggccttcaacgtgatcgtgatggtgctgatctgcttccaggccatcgccatgatgatcgacaccgacgtgcagagcctgcagatgagcatcgccctgtactggatcaacagcatcttcgtgatgctgtacaccatggagtgcatcctgaagctgatcgccttcagatgcttctacttcaccatcgcctggaacatcttcgacttcatggtggtgatcttcagcatcaccggcctgtgcctgcccatgaccgtgggcagctacctggtgccccccagcctggtgcagctgatcctgctgagcagaatcatccacatgctgagactgggcaagggccccaaggtgttccacaacctgatgctgcccctgatgctgagcctgcccgccctgctgaacatcatcctgctgatcttcctggtgatgttcatctacgccgtgttcggcatgtacaacttcgcctacgtgaagaaggaggccggcatcaacgacgtgagcaacttcgagaccttcggcaacagcatgctgtgcctgttccaggtggccatcttcgccggctgggacggcatgctggacgccatcttcaacagcaagtggagcgactgcgaccccgacaagatcaaccccggcacccaggtgagaggcgactgcggcaaccccagcgtgggcatcttctacttcgtgagctacatcctgatcagctggctgatcatcgtgaacatgtacatcgtggtggtgatggagttcctgaacatcgccagcaagaagaagaacaagaccctgagcgaggacgacttcagaaagttcttccaggtgtggaagagattcgaccccgacagaacccagtacatcgacagcagcaagctgagcgacttcgccgccgccctggacccccccctgttcatggccaagcccaacaagggccagctgatcgccctggacctgcccatggccgtgggcgacagaatccactgcctggacatcctgctggccttcaccaagagagtgatgggccaggacgtgagaatggagaaggtggtgagcgagatcgagagcggcttcctgctggccaaccccttcaagatcacctgcgagcccatcaccaccaccctgaagagaaagcaggaggccgtgagcgccaccatcatccagagagcctacaagaactacagactgagaagaaacgacaagaacaccagcgacatccacatgatcgacggcgacagagacgtgcacgccaccaaggagggcgcctacttcgacaaggccaaggagaagagccccatccagagccagatctag

SEQ ID NO: 99324 - DNA, 5049 bp, synthetic construct; identical to SEQ ID NO: 99323
  misc_feature 1..5049: note = Description of Artificial Sequence: Synthetic coding sequence
  source 1..5049: mol_type = other DNA

SEQ ID NO: 99325 - DNA, 2592 bp, synthetic construct
  misc_feature 1..2592: note = Description of Artificial Sequence: Synthetic coding sequence
  source 1..2592: mol_type = other DNA
atgctggccagccccgagcccaagggcctggtgcccttcaccaaggagagcttcgagctgatcaagcagcacatcgccaagacccacaacgaggaccacgaggaggaggacctgaagcccacccccgacctggaggtgggcaagaagctgcccttcatctacggcaacctgagccagggcatggtgagcgagcccctggaggacgtggacccctactactacaagaagaagaacaccttcatcgtgctgaacaagaacagaaccatcttcagattcaacgccgccagcatcctgtgcaccctgagccccttcaactgcatcagaagaaccaccatcaaggtgctggtgcaccccttcttccagctgttcatcctgatcagcgtgctgatcgactgcgtgttcatgagcctgaccaacctgcccaagtggagacccgtgctggagaacaccctgctgggcatctacaccttcgagatcctggtgaagctgttcgccagaggcgtgtgggccggcagcttcagcttcctgggcgacccctggaactggctggacttcagcgtgaccgtgttcgaggtgatcatcagatacagccccctggacttcatccccaccctgcagaccgccagaaccctgagaatcctgaagatcatccccctgaaccagggcctgaagagcctggtgggcgtgctgatccactgcctgaagcagctgatcggcgtgatcatcctgaccctgttcttcctgagcatcttcagcctgatcggcatgggcctgttcatgggcaacctgaagcacaagtgcttcagatggccccaggagaacgagaacgagaccctgcacaacagaaccggcaacccctactacatcagagagaccgagaacttctactacctggagggcgagagatacgccctgctgtgcggcaacagaaccgacgccggccagtgccccgagggctacgtgtgcgtgaaggccggcatcaaccccgaccagggcttcaccaacttcgacagcttcggctgggccctgttcgccctgttcagactgatggcccaggactaccccgaggtgctgtaccaccagatcctgtacgccagcggcaaggtgtacatgatcttcttcgtggtggtgagcttcctgttcagcttctacatggccagcctgttcctgggcatcctggccatggcctacgaggaggagaagcagagagtgggcgagatcagcaagaagatcgagcccaagttccagcagaccggcaaggagctgcaggagggcaacgagaccgacgaggccaagaccatccagatcgagatgaagaagagaagccccatcagcaccgacaccagcctggacgtgctggaggacgccaccctgagacacaaggaggagctggagaagagcaagaagatctgccccctgtactggtacaagttcgccaagaccttcctgatctggaactgcagcccctgctggctgaagctgaaggagttcgtgcacagaatcatcatggcccccttcaccgacctgttcctgatcatctgcatcatcctgaacgtgtgcttcctgaccctggagcactaccccatgagcaagcagaccaacaccctgctgaacatcggcaacctggtgttcatcggcatcttcaccgccgagatgatcttcaagatcatcgccatgcacccctacggctacttccaggtgggctggaacatcttcgacagcatgatcgtgttccacggcctgatcgagctgtgcctggccaacgtggccggcatggccctgctgagactgttcagaatgctgagaatcttcaagctgggcaagtactggcccaccttccagatcctgatgtggagcctgagcaacagctgggtggccctgaaggacctggtgctgctgctgttcaccttcatcttcttcagcgccgccttcggcatgaagctgttcggcaagaactacgaggagttcgtgtgccacatcgacaaggactgccagctgcccagatggcacatgcacgacttcttccacagcttcctgaacgtgttcagaatcctgtgcggcgagtgggtggagaccctgtgggactgcatggaggtggccggccagagctggtgcatccccttctacctgatggtgatcctgatcggcaacctgctggtgctgtacctgttcctggccctggtgagcagcttcagcagctgcaaggacgtgaccgccgaggagaacaacgaggccaagaacctgcagctggccgtggccagaatcaagaagggcatcaactacgtgctgctgaagatcctgtgcaagacccagaacgtgcccaaggacaccatggaccacgtgaacgaggtgtacgtgaaggaggacatcagcgaccacaccctgagcgagctgagcaacacccaggacttcctgaaggacaaggagaagagcagcggcaccgagaagaacgccaccgagaacgagagccagagcctgatccccagccccagcgtgagcgagaccgtgcccatcgccagcggcgagagcgacatcgagaacctggacaacaaggagatccagagcaagagcggcgacggcggcagcaagtag

SEQ ID NO: 99326 - DNA, 1209 bp, synthetic construct
  misc_feature 1..1209: note = Description of Artificial Sequence: Synthetic coding sequence
  source 1..1209: mol_type = other DNA
atgctggccagccccgagcccaagggcctggtgcccttcaccaaggagagcttcgagctgatcaagcagcacatcgccaagacccacaacgaggaccacgaggaggaggacctgaagcccacccccgacctggaggtgggcaagaagctgcccttcatctacggcaacctgagccagggcatggtgagcgagcccctggaggacgtggacccctactactacaagaagaagaacaccttcatcgtgctgaacaagaacagaaccatcttcagattcaacgccgccagcatcctgtgcaccctgagccccttcaactgcatcagaagaaccaccatcaaggtgctggtgcaccccttcttccagctgttcatcctgatcagcgtgctgatcgactgcgtgttcatgagcctgaccaacctgcccaagtggagacccgtgctggagaacaccctgctgggcatctacaccttcgagatcctggtgaagctgttcgccagaggcgtgtgggccggcagcttcagcttcctgggcgacccctggaactggctggacttcagcgtgaccgtgttcgaggtgatcatcagatacagccccctggacttcatccccaccctgcagaccgccagaaccctgagaatcctgaagatcatccccctgaaccagggcctgaagagcctggtgggcgtgctgatccactgcctgaagcagctgatcggcgtgatcatcctgaccctgttcttcctgagcatcttcagcctgatcggcatgggcctgttcatgggcaacctgaagcacaagtgcttcagatggccccaggagaacgagaacgagaccctgcacaacagaaccggcaacccctactacatcagagagaccgagaacttctactacctggagggcgagagatacgccctgctgtgcggcaacagaaccgacgccggccagtgccccgagggctacgtgtgcgtgaaggccggcatcaaccccgaccagggcttcaccaacttcgacagcttcggctgggccctgttcgccctgttcagactgatggcccaggactaccccgaggtgctgtaccaccagatcctgtacgccagcggcaaggtgtacatgatcttcttcgtggtggtgagcttcctgttcagcttctacatggccagcctgttcctgggcatcctggccatggcctacgaggaggagaagcagtag

SEQ ID NO: 99327 - DNA, 5871 bp, synthetic construct
  misc_feature 1..5871: note = Description of Artificial Sequence: Synthetic coding sequence
  source 1..5871: mol_type = other DNA
atggagttccccatcggcagcctggagaccaacaacttcagaagattcacccccgagagcctggtggagatcgagaagcagatcgccgccaagcagggcaccaagaaggccagagagaagcacagagagcagaaggaccaggaggagaagcccagaccccagctggacctgaaggcctgcaaccagctgcccaagttctacggcgagctgcccgccgagctgatcggcgagcccctggaggacctggaccccttctacagcacccacagaaccttcatggtgctgaacaagggcagaaccatcagcagattcagcgccaccagagccctgtggctgttcagccccttcaacctgatcagaagaaccgccatcaaggtgagcgtgcacagctggttcagcctgttcatcaccgtgaccatcctggtgaactgcgtgtgcatgaccagaaccgacctgcccgagaagatcgagtacgtgttcaccgtgatctacaccttcgaggccctgatcaagatcctggccagaggcttctgcctgaacgagttcacctacctgagagacccctggaactggctggacttcagcgtgatcaccctggcctacgtgggcaccgccatcgacctgagaggcatcagcggcctgagaaccttcagagtgctgagagccctgaagaccgtgagcgtgatccccggcctgaaggtgatcgtgggcgccctgatccacagcgtgaagaagctggccgacgtgaccatcctgaccatcttctgcctgagcgtgttcgccctggtgggcctgcagctgttcaagggcaacctgaagaacaagtgcgtgaagaacgacatggccgtgaacgagaccaccaactacagcagccacagaaagcccgacatctacatcaacaagagaggcaccagcgaccccctgctgtgcggcaacggcagcgacagcggccactgccccgacggctacatctgcctgaagaccagcgacaaccccgacttcaactacaccagcttcgacagcttcgcctgggccttcctgagcctgttcagactgatgacccaggacagctgggagagactgtaccagcagaccctgagaaccagcggcaagatctacatgatcttcttcgtgctggtgatcttcctgggcagcttctacctggtgaacctgatcctggccgtggtgaccatggcctacgaggagcagaaccaggccaccaccgacgagatcgaggccaaggagaagaagttccaggaggccctggagatgctgagaaaggagcaggaggtgctggccgccctgggcatcgacaccaccagcctgcacagccacaacggcagccccctgaccagcaagaacgccagcgagagaagacacagaatcaagcccagagtgagcgagggcagcaccgaggacaacaagagccccagaagcgacccctacaaccagagaagaatgagcttcctgggcctggccagcggcaagagaagagccagccacggcagcgtgttccacttcagaagccccggcagagacatcagcctgcccgagggcgtgaccgacgacggcgtgttccccggcgaccacgagagccacagaggcagcctgctgctgggcggcggcgccggccagcagggccccctgcccagaagccccctgccccagcccagcaaccccgacagcagacacggcgaggacgagcaccagcccccccccaccagcgagctggcccccggcgccgtggacgtgagcgccttcgacgccggccagaagaagaccttcctgagcgccgagtacctggacgagcccttcagagcccagagagccatgagcgtggtgagcatcatcaccagcgtgctggaggagctggaggagagcgagcagaagtgccccccctgcctgaccagcctgagccagaagtacctgatctgggactgctgccccatgtgggtgaagctgaagaccatcctgttcggcctggtgaccgaccccttcgccgagctgaccatcaccctgtgcatcgtggtgaacaccatcttcatggccatggagcaccacggcatgagccccaccttcgaggccatgctgcagatcggcaacatcgtgttcaccatcttcttcaccgccgagatggtgttcaagatcatcgccttcgacccctactactacttccagaagaagtggaacatcttcgactgcatcatcgtgaccgtgagcctgctggagctgggcgtggccaagaagggcagcctgagcgtgctgagaagcttcagactgctgagagtgttcaagctggccaagagctggcccaccctgaacaccctgatcaagatcatcggcaacagcgtgggcgccctgggcaacctgaccatcatcctggccatcatcgtgttcgtgttcgccctggtgggcaagcagctgctgggcgagaactacagaaacaacagaaagaacatcagcgccccccacgaggactggcccagatggcacatgcacgacttcttccacagcttcctgatcgtgttcagaatcctgtgcggcgagtggatcgagaacatgtgggcctgcatggaggtgggccagaagagcatctgcctgatcctgttcctgaccgtgatggtgctgggcaacctggtggtgctgaacctgttcatcgccctgctgctgaacagcttcagcgccgacaacctgaccgcccccgaggacgacggcgaggtgaacaacctgcaggtggccctggccagaatccaggtgttcggccacagaaccaagcaggccctgtgcagcttcttcagcagaagctgccccttcccccagcccaaggccgagcccgagctggtggtgaagctgcccctgagcagcagcaaggccgagaaccacatcgccgccaacaccgccagaggcagcagcggcggcctgcaggcccccagaggccccagagacgagcacagcgacttcatcgccaaccccaccgtgtgggtgagcgtgcccatcgccgagggcgagagcgacctggacgacctggaggacgacggcggcgaggacgcccagagcttccagcaggaggtgatccccaagggccagcaggagcagctgcagcaggtggagagatgcggcgaccacctgacccccagaagccccggcaccggcaccagcagcgaggacctggcccccagcctgggcgagacctggaaggacgagagcgtgccccaggtgcccgccgagggcgtggacgacaccagcagcagcgagggcagcaccgtggactgcctggaccccgaggagatcctgagaaagatccccgagctggccgacgacctggaggagcccgacgactgcttcaccgagggctgcatcagacactgcccctgctgcaagctggacaccaccaagagcccctgggacgtgggctggcaggtgagaaagacctgctacagaatcgtggagcacagctggttcgagagcttcatcatcttcatgatcctgctgagcagcggcagcctggccttcgaggactactacctggaccagaagcccaccgtgaaggccctgctggagtacaccgacagagtgttcaccttcatcttcgtgttcgagatgctgctgaagtgggtggcctacggcttcaagaagtacttcaccaacgcctggtgctggctggacttcctgatcgtgaacatcagcctgatcagcctgaccgccaagatcctggagtacagcgaggtggcccccatcaaggccctgagaaccctgagagccctgagacccctgagagccctgagcagattcgagggcatgagagtggtggtggacgccctggtgggcgccatccccagcatcatgaacgtgctgctggtgtgcctgatcttctggctgatcttcagcatcatgggcgtgaacctgttcgccggcaagttctggagatgcatcaactacaccgacggcgagttcagcctggtgcccctgagcatcgtgaacaacaagagcgactgcaagatccagaacagcaccggcagcttcttctgggtgaacgtgaaggtgaacttcgacaacgtggccatgggctacctggccctgctgcaggtggccaccttcaagggctggatggacatcatgtacgccgccgtggacagcagagaggtgaacatgcagcccaagtgggaggacaacgtgtacatgtacctgtacttcgtgatcttcatcatcttcggcggcttcttcaccctgaacctgttcgtgggcgtgatcatcgacaacttcaaccagcagaagaagaagctgggcggccaggacatcttcatgaccgaggagcagaagaagtactacaacgccatgaagaagctgggcagcaagaagccccagaagcccatccccagacccctgaacaagttccagggcttcgtgttcgacatcgtgaccagacaggccttcgacatcaccatcatggtgctgatctgcctgaacatgatcaccatgatggtggagaccgacgaccagagcgaggagaagaccaagatcctgggcaagatcaaccagttcttcgtggccgtgttcaccggcgagtgcgtgatgaagatgttcgccctgagacagtactacttcaccaacggctggaacgtgttcgacttcatcgtggtggtgctgagcatcgccagcctgatcttcagcgccatcctgaagagcctgcagagctacttcagccccaccctgttcagagtgatcagactggccagaatcggcagaatcctgagactgatcagagccgccaagggcatcagaaccctgctgttcgccctgatgatgagcctgcccgccctgttcaacatcggcctgctgctgttcctggtgatgttcatctacagcatcttcggcatgagcagcttcccccacgtgagatgggaggccggcatcgacgacatgttcaacttccagaccttcgccaacagcatgctgtgcctgttccagatcaccaccagcgccggctgggacggcctgctgagccccatcctgaacaccggccccccctactgcgaccccaacctgcccaacagcaacggcaccagaggcgactgcggcagccccgccgtgggcatcatcttcttcaccacctacatcatcatcagcttcctgatcatggtgaacatgtacatcgccgtgatcctggagaacttcaacgtggccaccgaggagagcaccgagcccctgagcgaggacgacttcgacatgttctacgagacctgggagaagttcgaccccgaggccacccagttcatcaccttcagcgccctgagcgacttcgccgacaccctgagcggccccctgagaatccccaagcccaacagaaacatcctgatccagatggacctgcccctggtgcccggcgacaagatccactgcctggacatcctgttcgccttcaccaagaacgtgctgggcgagagcggcgagctggacagcctgaaggccaacatggaggagaagttcatggccaccaacctgagcaagagcagctacgagcccatcgccaccaccctgagatggaagcaggaggacatcagcgccaccgtgatccagaaggcctacagaagctacgtgctgcacagaagcatggccctgagcaacaccccctgcgtgcccagagccgaggaggaggccgccagcctgcccgacgagggcttcgtggccttcaccgccaacgagaactgcgtgctgcccgacaagagcgagaccgccagcgccaccagcttcccccccagctacgagagcgtgaccagaggcctgagcgacagagtgaacatgagaaccagcagcagcatccagaacgaggacgaggccaccagcatggagctgatcgcccccggcccctag

SEQ ID NO: 99328 - DNA, 5376 bp, synthetic construct
  misc_feature 1..5376: note = Description of Artificial Sequence: Synthetic coding sequence
  source 1..5376: mol_type = other DNA
atggacgacagatgctaccccgtgatcttccccgacgagagaaacttcagacccttcaccagcgacagcctggccgccatcgagaagagaatcgccatccagaaggagaagaagaagagcaaggaccagaccggcgaggtgccccagcccagaccccagctggacctgaaggccagcagaaagctgcccaagctgtacggcgacatccccagagagctgatcggcaagcccctggaggacctggaccccttctacagaaaccacaagaccttcatggtgctgaacagaaagagaaccatctacagattcagcgccaagcacgccctgttcatcttcggccccttcaacagcatcagaagcctggccatcagagtgagcgtgcacagcctgttcagcatgttcatcatcggcaccgtgatcatcaactgcgtgttcatggccaccggccccgccaagaacagcaacagcaacaacaccgacatcgccgagtgcgtgttcaccggcatctacatcttcgaggccctgatcaagatcctggccagaggcttcatcctggacgagttcagcttcctgagagacccctggaactggctggacagcatcgtgatcggcatcgccatcgtgagctacatccccggcatcaccatcaagctgctgcccctgagaaccttcagagtgttcagagccctgaaggccatcagcgtggtgagcagactgaaggtgatcgtgggcgccctgctgagaagcgtgaagaagctggtgaacgtgatcatcctgaccttcttctgcctgagcatcttcgccctggtgggccagcagctgttcatgggcagcctgaacctgaagtgcatcagcagagactgcaagaacatcagcaaccccgaggcctacgaccactgcttcgagaagaaggagaacagccccgagttcaagatgtgcggcatctggatgggcaacagcgcctgcagcatccagtacgagtgcaagcacaccaagatcaaccccgactacaactacaccaacttcgacaacttcggctggagcttcctggccatgttcagactgatgacccaggacagctgggagaagctgtaccagcagaccctgagaaccaccggcctgtacagcgtgttcttcttcatcgtggtgatcttcctgggcagcttctacctgatcaacctgaccctggccgtggtgaccatggcctacgaggagcagaacaagaacgtggccgccgagatcgaggccaaggagaagatgttccaggaggcccagcagctgctgaaggaggagaaggaggccctggtggccatgggcatcgacagaagcagcctgaccagcctggagaccagctacttcacccccaagaagagaaagctgttcggcaacaagaagagaaagagcttcttcctgagagagagcggcaaggaccagccccccggcagcgacagcgacgaggactgccagaagaagccccagctgctggagcagaccaagagactgagccagaacctgagcctggaccacttcgacgagcacggcgaccccctgcagagacagagagccctgagcgccgtgagcatcctgaccatcaccatgaaggagcaggagaagagccaggagccctgcctgccctgcggcgagaacctggccagcaagtacctggtgtggaactgctgcccccagtggctgtgcgtgaagaaggtgctgagaaccgtgatgaccgaccccttcaccgagctggccatcaccatctgcatcatcatcaacaccgtgttcctggccatggagcaccacaagatggaggccagcttcgagaagatgctgaacatcggcaacctggtgttcaccagcatcttcatcgccgagatgtgcctgaagatcatcgccctggacccctaccactacttcagaagaggctggaacatcttcgacagcatcgtggccctgctgagcttcgccgacgtgatgaactgcgtgctgcagaagagaagctggcccttcctgagaagcttcagagtgctgagagtgttcaagctggccaagagctggcccaccctgaacaccctgatcaagatcatcggcaacagcgtgggcgccctgggcagcctgaccgtggtgctggtgatcgtgatcttcatcttcagcgtggtgggcatgcagctgttcggcagaagcttcaacagccagaagagccccaagctgtgcaaccccaccggccccaccgtgagctgcctgagacactggcacatgggcgacttctggcacagcttcctggtggtgttcagaatcctgtgcggcgagtggatcgagaacatgtgggagtgcatgcaggaggccaacgccagcagcagcctgtgcgtgatcgtgttcatcctgatcaccgtgatcggcaagctggtggtgctgaacctgttcatcgccctgctgctgaacagcttcagcaacgaggagagaaacggcaacctggagggcgaggccagaaagaccaaggtgcagctggccctggacagattcagaagagccttctgcttcgtgagacacaccctggagcacttctgccacaagtggtgcagaaagcagaacctgccccagcagaaggaggtggccggcggctgcgccgcccagagcaaggacatcatccccctggtgatggagatgaagagaggcagcgagacccaggaggagctgggcatcctgaccagcgtgcccaagaccctgggcgtgagacacgactggacctggctggcccccctggccgaggaggaggacgacgtggagttcagcggcgaggacaacgcccagagaatcacccagcccgagcccgagcagcaggcctacgagctgcaccaggagaacaagaagcccaccagccagagagtgcagagcgtggagatcgacatgttcagcgaggacgagccccacctgaccatccaggaccccagaaagaagagcgacgtgaccagcatcctgagcgagtgcagcaccatcgacctgcaggacggcttcggctggctgcccgagatggtgcccaagaagcagcccgagagatgcctgcccaagggcttcggctgctgcttcccctgctgcagcgtggacaagagaaagcccccctgggtgatctggtggaacctgagaaagacctgctaccagatcgtgaagcacagctggttcgagagcttcatcatcttcgtgatcctgctgagcagcggcgccctgatcttcgaggacgtgcacctggagaaccagcccaagatccaggagctgctgaactgcaccgacatcatcttcacccacatcttcatcctggagatggtgctgaagtgggtggccttcggcttcggcaagtacttcaccagcgcctggtgctgcctggacttcatcatcgtgatcgtgagcgtgaccaccctgatcaacctgatggagctgaagagcttcagaaccctgagagccctgagacccctgagagccctgagccagttcgagggcatgaaggtggtggtgaacgccctgatcggcgccatccccgccatcctgaacgtgctgctggtgtgcctgatcttctggctggtgttctgcatcctgggcgtgtacttcttcagcggcaagttcggcaagtgcatcaacggcaccgacagcgtgatcaactacaccatcatcaccaacaagagccagtgcgagagcggcaacttcagctggatcaaccagaaggtgaacttcgacaacgtgggcaacgcctacctggccctgctgcaggtggccaccttcaagggctggatggacatcatctacgccgccgtggacagcaccgagaaggagcagcagcccgagttcgagagcaacagcctgggctacatctacttcgtggtgttcatcatcttcggcagcttcttcaccctgaacctgttcatcggcgtgatcatcgacaacttcaaccagcagcagaagaagctgggcggccaggacatcttcatgaccgaggagcagaagaagtactacaacgccatgaagaagctgggcagcaagaagccccagaagcccatccccagacccctgaacaagtgccagggcctggtgttcgacatcgtgaccagccagatcttcgacatcatcatcatcagcctgatcatcctgaacatgatcagcatgatggccgagagctacaaccagcccaaggccatgaagagcatcctggaccacctgaactgggtgttcgtggtgatcttcaccctggagtgcctgatcaagatcttcgccctgagacagtactacttcaccaacggctggaacctgttcgactgcgtggtggtgctgctgagcatcgtgagcaccatgatcagcaccctggagaaccaggagcacatccccttcccccccaccctgttcagaatcgtgagactggccagaatcggcagaatcctgagactggtgagagccgccagaggcatcagaaccctgctgttcgccctgatgatgagcctgcccagcctgttcaacatcggcctgctgctgttcctgatcatgttcatctacgccatcctgggcatgaactggttcagcaaggtgaaccccgagagcggcatcgacgacatcttcaacttcaagaccttcgccagcagcatgctgtgcctgttccagatcagcaccagcgccggctgggacagcctgctgagccccatgctgagaagcaaggagagctgcaacagcagcagcgagaactgccacctgcccggcatcgccaccagctacttcgtgagctacatcatcatcagcttcctgatcgtggtgaacatgtacatcgccgtgatcctggagaacttcaacaccgccaccgaggagagcgaggaccccctgggcgaggacgacttcgacatcttctacgaggtgtgggagaagttcgaccccgaggccacccagttcatcaagtacagcgccctgagcgacttcgccgacgccctgcccgagcccctgagagtggccaagcccaacaagtaccagttcctggtgatggacctgcccatggtgagcgaggacagactgcactgcatggacatcctgttcgccttcaccgccagagtgctgggcggcagcgacggcctggacagcatgaaggccatgatggaggagaagttcatggaggccaaccccctgaagaagctgtacgagcccatcgtgaccaccaccaagagaaaggaggaggagagaggcgccgccatcatccagaaggccttcagaaagtacatgatgaaggtgaccaagggcgaccagggcgaccagaacgacctggagaacggcccccacagccccctgcagaccctgtgcaacggcgacctgagcagcttcggcgtggccaagggcaaggtgcactgcgactag

SEQ ID NO: 99329 - DNA, 4335 bp, synthetic construct
  misc_feature 1..4335: note = Description of Artificial Sequence: Synthetic coding sequence
  source 1..4335: mol_type = other DNA
atggacgacagatgctaccccgtgatcttccccgacgagagaaacttcagacccttcaccagcgacagcctggccgccatcgagaagagaatcgccatccagaaggagaagaagaagagcaaggaccagaccggcgaggtgccccagcccagaccccagctggacctgaaggccagcagaaagctgcccaagctgtacggcgacatccccagagagctgatcggcaagcccctggaggacctggaccccttctacagaaaccacaagaccttcatggtgctgaacagaaagagaaccatctacagattcagcgccaagcacgccctgttcatcttcggccccttcaacagcatcagaagcctggccatcagagtgagcgtgcacagcctgttcagcatgttcatcatcggcaccgtgatcatcaactgcgtgttcatggccaccggccccgccaagaacagcaacagcaacaacaccgacatcgccgagtgcgtgttcaccggcatctacatcttcgaggccctgatcaagatcctggccagaggcttcatcctggacgagttcagcttcctgagagacccctggaactggctggacagcatcgtgatcggcatcgccatcgtgagctacatccccggcatcaccatcaagctgctgcccctgagaaccttcagagtgttcagagccctgaaggccatcagcgtggtgagcagactgaaggtgatcgtgggcgccctgctgagaagcgtgaagaagctggtgaacgtgatcatcctgaccttcttctgcctgagcatcttcgccctggtgggccagcagctgttcatgggcagcctgaacctgaagtgcatcagcagagactgcaagaacatcagcaaccccgaggcctacgaccactgcttcgagaagaaggagaacagccccgagttcaagatgtgcggcatctggatgggcaacagcgcctgcagcatccagtacgagtgcaagcacaccaagatcaaccccgactacaactacaccaacttcgacaacttcggctggagcttcctggccatgttcagactgatgacccaggacagctgggagaagctgtaccagcagaccctgagaaccaccggcctgtacagcgtgttcttcttcatcgtggtgatcttcctgggcagcttctacctgatcaacctgaccctggccgtggtgaccatggcctacgaggagcagaacaagaacgtggccgccgagatcgaggccaaggagaagatgttccaggaggcccagcagctgctgaaggaggagaaggaggccctggtggccatgggcatcgacagaagcagcctgaccagcctggagaccagctacttcacccccaagaagagaaagctgttcggcaacaagaagagaaagagcttcttcctgagagagagcggcaaggaccagccccccggcagcgacagcgacgaggactgccagaagaagccccagctgctggagcagaccaagagactgagccagaacctgagcctggaccacttcgacgagcacggcgaccccctgcagagacagagagccctgagcgccgtgagcatcctgaccatcaccatgaaggagcaggagaagagccaggagccctgcctgccctgcggcgagaacctggccagcaagtacctggtgtggaactgctgcccccagtggctgtgcgtgaagaaggtgctgagaaccgtgatgaccgaccccttcaccgagctggccatcaccatctgcatcatcatcaacaccgtgttcctggccatggagcaccacaagatggaggccagcttcgagaagatgctgaacatcggcaacctggtgttcaccagcatcttcatcgccgagatgtgcctgaagatcatcgccctggacccctaccactacttcagaagaggctggaacatcttcgacagcatcgtggccctgctgagcttcgccgacgtgatgaactgcgtgctgcagaagagaagctggcccttcctgagaagcttcagagtgctgagagtgttcaagctggccaagagctggcccaccctgaacaccctgatcaagatcatcggcaacagcgtgggcgccctgggcagcctgaccgtggtgctggtgatcgtgatcttcatcttcagcgtggtgggcatgcagctgttcggcagaagcttcaacagccagaagagccccaagctgtgcaaccccaccggccccaccgtgagctgcctgagacactggcacatgggcgacttctggcacagcttcctggtggtgttcagaatcctgtgcggcgagtggatcgagaacatgtgggagtgcatgcaggaggccaacgccagcagcagcctgtgcgtgatcgtgttcatcctgatcaccgtgatcggcaagctggtggtgctgaacctgttcatcgccctgctgctgaacagcttcagcaacgaggagagaaacggcaacctggagggcgaggccagaaagaccaaggtgcagctggccctggacagattcagaagagccttctgcttcgtgagacacaccctggagcacttctgccacaagtggtgcagaaagcagaacctgccccagcagaaggaggtggccggcggctgcgccgcccagagcaaggacatcatccccctggtgatggagatgaagagaggcagcgagacccaggaggagctgggcatcctgaccagcgtgcccaagaccctgggcgtgagacacgactggacctggctggcccccctggccgaggaggaggacgacgtggagttcagcggcgaggacaacgcccagagaatcacccagcccgagcccgagcagcaggcctacgagctgcaccaggagaacaagaagcccaccagccagagagtgcagagcgtggagatcgacatgttcagcgaggacgagccccacctgaccatccaggaccccagaaagaagagcgacgtgaccagcatcctgagcgagtgcagcaccatcgacctgcaggacggcttcggctggctgcccgagatggtgcccaagaagcagcccgagagatgcctgcccaagggcttcggctgctgcttcccctgctgcagcgtggacaagagaaagcccccctgggtgatctggtggaacctgagaaagacctgctaccagatcgtgaagcacagctggttcgagagcttcatcatcttcgtgatcctgctgagcagcggcgccctgatcttcgaggacgtgcacctggagaaccagcccaagatccaggagctgctgaactgcaccgacatcatcttcacccacatcttcatcctggagatggtgctgaagtgggtggccttcggcttcggcaagtacttcaccagcgcctggtgctgcctggacttcatcatcgtgatcgtgagcgtgaccaccctgatcaacctgatggagctgaagagcttcagaaccctgagagccctgagacccctgagagccctgagccagttcgagggcatgaaggtggtggtgaacgccctgatcggcgccatccccgccatcctgaacgtgctgctggtgtgcctgatcttctggctggtgttctgcatcctgggcgtgtacttcttcagcggcaagttcggcaagtgcatcaacggcaccgacagcgtgatcaactacaccatcatcaccaacaagagccagtgcgagagcggcaacttcagctggatcaaccagaaggtgaacttcgacaacgtgggcaacgcctacctggccctgctgcaggtggccaccttcaagggctggatggacatcatctacgccgccgtggacagcaccgagaaggagcagcagcccgagttcgagagcaacagcctgggctacatctacttcgtggtgttcatcatcttcggcagcttcttcaccctgaacctgttcatcggcgtgatcatcgacaacttcaaccagcagcagaagaagctgggcggccaggacatcttcatgaccgaggagcagaagaagtactacaacgccatgaagaagctgggcagcaagaagccccagaagcccatccccagacccctgaacaagtgccagggcctggtgttcgacatcgtgaccagccagatcttcgacatcatcatcatcagcctgatcatcctgaacatgatcagcatgatggccgagagctacaaccagcccaaggccatgaagagcatcctggaccacctgaactgggtgttcgtggtgatcttcaccctggagtgcctgatcaagatcttcgccctgagacagtactacttcaccaacggctggaacctgttcgactgcgtggtggtgctgctgagcatcgtgagcaagtag

SEQ ID NO: 99330 - DNA, 5376 bp, synthetic construct; identical to SEQ ID NO: 99328
  misc_feature 1..5376: note = Description of Artificial Sequence: Synthetic coding sequence
  source 1..5376: mol_type = other DNA

SEQ ID NO: 99331 - DNA, 5217 bp, synthetic construct
  misc_feature 1..5217: note = Description of Artificial Sequence: Synthetic coding sequence
  source 1..5217: mol_type = other DNA
atgctgaagagaaagcagagcagcagagtggaggcccagcccgtgaccgacttcggccccgacgagagcctgagcgacaacgccgacatcctgtggatcaacaagccctgggtgcacagcctgctgagaatctgcgccatcatcagcgtgatcagcgtgtgcatgaacacccccatgaccttcgagcactacccccccctgcagtacgtgaccttcaccctggacaccctgctgatgttcctgtacaccgccgagatgatcgccaagatgcacatcagaggcatcgtgaagggcgacagcagctacgtgaaggacagatggtgcgtgttcgacggcttcatggtgttctgcctgtgggtgagcctggtgctgcaggtgttcgagatcgccgacatcgtggaccagatgagcccctggggcatgctgagaatccccagacccctgatcatgatcagagccttcagaatctacttcagattcgagctgcccagaaccagaatcaccaacatcctgaagagaagcggcgagcagatctggagcgtgagcatcttcctgctgttcttcctgctgctgtacggcatcctgggcgtgcagatgttcggcaccttcacctaccactgcgtggtgaacgacaccaagcccggcaacgtgacctggaacagcctggccatccccgacacccactgcagccccgagctggaggagggctaccagtgcccccccggcttcaagtgcatggacctggaggacctgggcctgagcagacaggagctgggctacagcggcttcaacgagatcggcaccagcatcttcaccgtgtacgaggccgccagccaggagggctgggtgttcctgatgtacagagccatcgacagcttccccagatggagaagctacttctacttcatcaccctgatcttcttcctggcctggctggtgaagaacgtgttcatcgccgtgatcatcgagaccttcgccgagatcagagtgcagttccagcagatgtggggcagcagaagcagcaccaccagcaccgccaccacccagatgttccacgaggacgccgccggcggctggcagctggtggccgtggacgtgaacaagccccagggcagagcccccgcctgcctgcagaagatgatgagaagcagcgtgttccacatgttcatcctgagcatggtgaccgtggacgtgatcgtggccgccagcaactactacaagggcgagaacttcagaagacagtacgacgagttctacctggccgaggtggccttcaccgtgctgttcgacctggaggccctgctgaagatctggtgcctgggcttcaccggctacatcagcagcagcctgcacaagttcgagctgctgctggtgatcggcaccaccctgcacgtgtaccccgacctgtaccacagccagttcacctacttccaggtgctgagagtggtgagactgatcaagatcagccccgccctggaggacttcgtgtacaagatcttcggccccggcaagaagctgggcagcctggtggtgttcaccgccagcctgctgatcgtgatgagcgccatcagcctgcagatgttctgcttcgtggaggagctggacagattcaccaccttccccagagccttcatgagcatgttccagatcctgacccaggagggctgggtggacgtgatggaccagaccctgaacgccgtgggccacatgtgggcccccgtggtggccatctacttcatcctgtaccacctgttcgccaccctgatcctgctgagcctgttcgtggccgtgatcctggacaacctggagctggacgaggacctgaagaagctgaagcagctgaagcagagcgaggccaacgccgacaccaaggagaagctgcccctgagactgagaatcttcgagaagttccccaacagaccccagatggtgaagatcagcaagctgcccagcgacttcaccgtgcccaagatcagagagagcttcatgaagcagttcatcgacagacagcagcaggacacctgctgcctgctgagaagcctgcccaccaccagcagcagcagctgcgaccacagcaagagaagcgccatcgaggacaacaagtacatcgaccagaagctgagaaagagcgtgttcagcatcagagccagaaacctgctggagaaggagaccgccgtgaccaagatcctgagagcctgcaccagacagagaatgctgagcggcagcttcgagggccagcccgccaaggagagaagcatcctgagcgtgcagcaccacatcagacaggagagaagaagcctgagacacggcagcaacagccagagaatcagcagaggcaagagcctggagaccctgacccaggaccacagcaacaccgtgagatacagaaacgcccagagagaggacagcgagatcaagatgatccaggagaagaaggagcaggccgagatgaagagaaaggtgcaggaggaggagctgagagagaaccacccctacttcgacaagcccctgttcatcgtgggcagagagcacagattcagaaacttctgcagagtggtggtgagagccagattcaacgccagcaagaccgaccccgtgaccggcgccgtgaagaacaccaagtaccaccagctgtacgacctgctgggcctggtgacctacctggactgggtgatgatcatcgtgaccatctgcagctgcatcagcatgatgttcgagagccccttcagaagagtgatgcacgcccccaccctgcagatcgccgagtacgtgttcgtgatcttcatgagcatcgagctgaacctgaagatcatggccgacggcctgttcttcacccccaccgccgtgatcagagacttcggcggcgtgatggacatcttcatctacctggtgagcctgatcttcctgtgctggatgccccagaacgtgcccgccgagagcggcgcccagctgctgatggtgctgagatgcctgagacccctgagaatcttcaagctggtgccccagatgagaaaggtggtgagagagctgttcagcggcttcaaggagatcttcctggtgagcatcctgctgctgaccctgatgctggtgttcgccagcttcggcgtgcagctgttcgccggcaagctggccaagtgcaacgaccccaacatcatcagaagagaggactgcaacggcatcttcagaatcaacgtgagcgtgagcaagaacctgaacctgaagctgagacccggcgagaagaagcccggcttctgggtgcccagagtgtgggccaaccccagaaacttcaacttcgacaacgtgggcaacgccatgctggccctgttcgaggtgctgagcctgaagggctgggtggaggtgagagacgtgatcatccacagagtgggccccatccacggcatctacatccacgtgttcgtgttcctgggctgcatgatcggcctgaccctgttcgtgggcgtggtgatcgccaacttcaacgagaacaagggcaccgccctgctgaccgtggaccagagaagatgggaggacctgaagagcagactgaagatcgcccagcccctgcacctgccccccagacccgacaacgacggcttcagagccaagatgtacgacatcacccagcaccccttcttcaagagaaccatcgccctgctggtgctggcccagagcgtgctgctgagcgtgaagtgggacgtggaggaccccgtgaccgtgcccctggccaccatgagcgtggtgttcaccttcatcttcgtgctggaggtgaccatgaagatcatcgccatgagccccgccggcttctggcagagcagaagaaacagatacgacctgctggtgaccagcctgggcgtggtgtgggtggtgctgcacttcgccctgctgaacgcctacacctacatgatgggcgcctgcgtgatcgtgttcagattcttcagcatctgcggcaagcacgtgaccctgaagatgctgctgctgaccgtggtggtgagcatgtacaagagcttcttcatcatcgtgggcatgttcctgctgctgctgtgctacgccttcgccggcgtggtgctgttcggcaccgtgaagtacggcgagaacatcaacagacacgccaacttcagcagcgccggcaaggccatcaccgtgctgttcagaatcgtgaccggcgaggactggaacaagatcatgcacgactgcatggtgcagccccccttctgcacccccgacgagttcacctactgggccaccgactgcggcaactacgccggcgccctgatgtacttctgcagcttctacgtgatcatcgcctacatcatgctgaacctgctggtggccatcatcgtggagaacttcagcctgttctacagcaccgaggaggaccagctgctgagctacaacgacctgagacacttccagatcatctggaacatggtggacgacaagagagagggcgtgatccccaccttcagagtgaagttcctgctgagactgctgagaggcagactggaggtggacctggacaaggacaagctgctgttcaagcacatgtgctacgagatggagagactgcacaacggcggcgacgtgaccttccacgacgtgctgagcatgctgagctacagaagcgtggacatcagaaagagcctgcagctggaggagctgctggccagagagcagctggagtacaccatcgaggaggaggtggccaagcagaccatcagaatgtggctgaagaagtgcctgaagagaatcagagccaagcagcagcagagctgcagcatcatccacagcctgagagagagccagcagcaggagctgagcagattcctgaacccccccagcatcgagaccacccagcccagcgaggacaccaacgccaacagccaggacaacagcatgcagcccgagaccagcagccagcagcagctgctgagccccaccctgagcgacagaggcggcagcagacaggacgccgccgacgccggcaagccccagagaaagttcggccagtggagactgcccagcgcccccaagcccatcagccacagcgtgagcagcgtgaacctgagattcggcggcagaaccaccatgaagagcgtggtgtgcaagatgaaccccatgaccgacgccgccagctgcggcagcgaggtgaagaagtggtggaccagacagctgaccgtggagagcgacgagagcggcgacgacctgctggacatctag

SEQ ID NO: 99332 - DNA, 2007 bp, synthetic construct
  misc_feature 1..2007: note = Description of Artificial Sequence: Synthetic coding sequence
  source 1..2007: mol_type = other DNA
atgctgaagagaaagcagagcagcagagtggaggcccagcccgtgaccgacttcggccccgacgagagcctgagcgacaacgccgacatcctgtggatcaacaagccctgggtgcacagcctgctgagaatctgcgccatcatcagcgtgatcagcgtgtgcatgaacacccccatgaccttcgagcactacccccccctgcagtacgtgaccttcaccctggacaccctgctgatgttcctgtacaccgccgagatgatcgccaagatgcacatcagaggcatcgtgaagggcgacagcagctacgtgaaggacagatggtgcgtgttcgacggcttcatggtgttctgcctgtgggtgagcctggtgctgcaggtgttcgagatcgccgacatcgtggaccagatgagcccctggggcatgctgagaatccccagacccctgatcatgatcagagccttcagaatctacttcagattcgagctgcccagaaccagaatcaccaacatcctgaagagaagcggcgagcagatctggagcgtgagcatcttcctgctgttcttcctgctgctgtacggcatcctgggcgtgcagatgttcggcaccttcacctaccactgcgtggtgaacgacaccaagcccggcaacgtgacctggaacagcctggccatccccgacacccactgcagccccgagctggaggagggctaccagtgcccccccggcttcaagtgcatggacctggaggacctgggcctgagcagacaggagctgggctacagcggcttcaacgagatcggcaccagcatcttcaccgtgtacgaggccgccagccaggagggctgggtgttcctgatgtacagagccatcgacagcttccccagatggagaagctacttctacttcatcaccctgatcttcttcctggcctggctggtgaagaacgtgttcatcgccgtgatcatcgagaccttcgccgagatcagagtgcagttccagcagatgtggggcagcagaagcagcaccaccagcaccgccaccacccagatgttccacgaggacgccgccggcggctggcagctggtggccgtggacgtgaacaagccccagggcagagcccccgcctgcctgcagaagatgatgagaagcagcgtgttccacatgttcatcctgagcatggtgaccgtggacgtgatcgtggccgccagcaactactacaagggcgagaacttcagaagacagtacgacgagttctacctggccgaggtggccttcaccgtgctgttcgacctggaggccctgctgaagatctggtgcctgggcttcaccggctacatcagcagcagcctgcacaagttcgagctgctgctggtgatcggcaccaccctgcacgtgtaccccgacctgtaccacagccagttcacctacttccaggtgctgagagtggtgagactgatcaagatcagccccgccctggaggacttcgtgtacaagatcttcggccccggcaagaagctgggcagcctggtggtgttcaccgccagcctgctgatcgtgatgagcgccatcagcctgcagatgttctgcttcgtggaggagctggacagattcaccaccttccccagagccttcatgagcatgttccagatcctgacccaggagggctgggtggacgtgatggaccagaccctgaacgccgtgggccacatgtgggcccccgtggtggccatctacttcatcctgtaccacctgttcgccaccctgccccccagcctgatcagagacctgtgcggcacccaggacgcctgccccagctgcctgcccctgcagccccccaaccccctgcccggcagccagaccctggccagactgacccaccaggccctgaccaccccccccggcatgagaagcagccagctgttcagcaagatcagcctgctgctgggcatctgcgtggcctgggagagcatcctgggcagcctgagcctgagccacaacctgagatag

SEQ ID NO: 99333 - DNA, 657 bp, synthetic construct
  misc_feature 1..657: note = Description of Artificial Sequence: Synthetic coding sequence
  source 1..657: mol_type = other DNA
atgctgaagagaaagcagagcagcagagtggaggcccagcccgtgaccgacttcggccccgacgagagcctgagcgacaacgccgacatcctgtggatcaacaagccctgggtgcacagcctgctgagaatctgcgccatcatcagcgtgatcagcgtgtgcatgaacacccccatgaccttcgagcactacccccccctgcagtacgtgaccttcaccctggacaccctgctgatgttcctgtacaccgccgagatgatcgccaagatgcacatcagaggcatcgtgaagggcgacagcagctacgtgaaggacagatggtgcgtgttcgacggcttcatggtgttctgcctgtgggtgagcctggtgctgcaggtgttcgagatcgccgacatcgtggaccagatgagcccctggggcatgctgagaatccccagacccctgatcatgatcagagccttcagaatctacttcagattcgagctgcccagaaccagaatcaccaacatcctgaagagaagcggcgagcagatctggagcgtgagcatcttcctgctgttcttcctgctgctgtacggcatcctgggcgtgcagatgttcggcaccttcacctaccactgcgtggtgaacgacaccaagcccggcctgagcctgtag

SEQ ID NO: 99334 - DNA, 657 bp, synthetic construct
  misc_feature 1..657: note = Description of Artificial Sequence: Synthetic coding sequence
  source 1..657: mol_type = other DNA
atgctgaagagaaagcagagcagcagagtggaggcccagcccgtgaccgacttcggccccgacgagagcctgagcgacaacgccgacatcctgtggatcaacaagccctgggtgcacagcctgctgagaatctgcgccatcatcagcgtgatcagcgtgtgcatgaacacccccatgaccttcgagcactacccccccctgcagtacgtgaccttcaccctggacaccctgctgatgttcctgtacaccgccgagatgatcgccaagatgcacatcagaggcatcgtgaagggcgacagcagctacgtgaaggacagatggtgcgtgttcgacggcttcatggtgttctgcctgtgggtgagcctggtgctgcaggtgttcgagatcgccgacatcgtggaccagatgagcccctggggcatgctgagaatccccagacccctgatcatgatcagagccttcagaatctacttcagattcgagctgcccagaaccagaatcaccaacatcctgaagagaagcggcgagcagatctggagcgtgagcatcttcctgctgttcttcctgctgctgtacggcatcctgggcgtgcagatgttcggcaccttcacctaccactgcgtggtgaacgacaccaagcccggcctgagcatctag

SEQ ID NO: 99335 - DNA, 1725 bp, synthetic construct
  misc_feature 1..1725: note = Description of Artificial Sequence: Synthetic coding sequence
  source 1..1725: mol_type = other DNA
atggccagcaccgagggcgccaacaacatgcccaagcaggtggaggtgagaatgcacgacagccacctgggcagcgaggagcccaagcacagacacctgggcctgagactgtgcgacaagctgggcaagaacctgctgctgaccctgaccgtgttcggcgtgatcctgggcgccgtgtgcggcggcctgctgagactggccagccccatccaccccgacgtggtgatgctgatcgccttccccggcgacatcctgatgagaatgctgaagatgctgatcctgcccctgatcatcagcagcctgatcaccggcctgagcggcctggacgccaaggccagcggcagactgggcaccagagccatggtgtactacatgagcaccaccatcatcgccgccgtgctgggcgtgatcctggtgctggccatccaccccggcaaccccaagctgaagaagcagctgggccccggcaagaagaacgacgaggtgagcagcctggacgccttcctggacctgatcagaaacctgttccccgagaacctggtgcaggcctgcttccagcagatccagaccgtgaccaagaaggtgctggtggcccccccccccgacgaggaggccaacgccaccagcgccgtggtgagcctgctgaacgagaccgtgaccgaggtgcccgaggagaccaagatggtgatcaagaagggcctggagttcaaggacggcatgaacgtgctgggcctgatcggcttcttcatcgccttcggcatcgccatgggcaagatgggcgaccaggccaagctgatggtggacttcttcaacatcctgaacgagatcgtgatgaagctggtgatcatgatcatgtggtacagccccctgggcatcgcctgcctgatctgcggcaagatcatcgccatcaaggacctggaggtggtggccagacagctgggcatgtacatggtgaccgtgatcatcggcctgatcatccacggcggcatcttcctgcccctgatctacttcgtggtgaccagaaagaaccccttcagcttcttcgccggcatcttccaggcctggatcaccgccctgggcaccgccagcagcgccggcaccctgcccgtgaccttcagatgcctggaggagaacctgggcatcgacaagagagtgaccagattcgtgctgcccgtgggcgccaccatcaacatggacggcaccgccctgtacgaggccgtggccgccatcttcatcgcccagatgaacggcgtggtgctggacggcggccagatcgtgaccgtgagcctgaccgccaccctggccagcgtgggcgccgccagcatccccagcgccggcctggtgaccatgctgctgatcctgaccgccgtgggcctgcccaccgaggacatcagcctgctggtggccgtggactggctgctggacagaatgagaaccagcgtgaacgtggtgggcgacagcttcggcgccggcatcgtgtaccacctgagcaagagcgagctggacaccatcgacagccagcacagagtgcacgaggacatcgagatgaccaagacccagagcatctacgacgacatgaagaaccacagagagagcaacagcaaccagtgcgtgtacgccgcccacaacagcgtgatcgtggacgagtgcaaggtgaccctggccgccaacggcaagagcgccgactgcagcgtggaggaggagccctggaagagagagaagtag

SEQ ID NO: 99336 - DNA, 1698 bp, synthetic construct
  misc_feature 1..1698: note = Description of Artificial Sequence: Synthetic coding sequence
  source 1..1698: mol_type = other DNA
atgcccaagcaggtggaggtgagaatgcacgacagccacctgggcagcgaggagcccaagcacagacacctgggcctgagactgtgcgacaagctgggcaagaacctgctgctgaccctgaccgtgttcggcgtgatcctgggcgccgtgtgcggcggcctgctgagactggccagccccatccaccccgacgtggtgatgctgatcgccttccccggcgacatcctgatgagaatgctgaagatgctgatcctgcccctgatcatcagcagcctgatcaccggcctgagcggcctggacgccaaggccagcggcagactgggcaccagagccatggtgtactacatgagcaccaccatcatcgccgccgtgctgggcgtgatcctggtgctggccatccaccccggcaaccccaagctgaagaagcagctgggccccggcaagaagaacgacgaggtgagcagcctggacgccttcctggacctgatcagaaacctgttccccgagaacctggtgcaggcctgcttccagcagatccagaccgtgaccaagaaggtgctggtggcccccccccccgacgaggaggccaacgccaccagcgccgtggtgagcctgctgaacgagaccgtgaccgaggtgcccgaggagaccaagatggtgatcaagaagggcctggagttcaaggacggcatgaacgtgctgggcctgatcggcttcttcatcgccttcggcatcgccatgggcaagatgggcgaccaggccaagctgatggtggacttcttcaacatcctgaacgagatcgtgatgaagctggtgatcatgatcatgtggtacagccccctgggcatcgcctgcctgatctgcggcaagatcatcgccatcaaggacctggaggtggtggccagacagctgggcatgtacatggtgaccgtgatcatcggcctgatcatccacggcggcatcttcctgcccctgatctacttcgtggtgaccagaaagaaccccttcagcttcttcgccggcatcttccaggcctggatcaccgccctgggcaccgccagcagcgccggcaccctgcccgtgaccttcagatgcctggaggagaacctgggcatcgacaagagagtgaccagattcgtgctgcccgtgggcgccaccatcaacatggacggcaccgccctgtacgaggccgtggccgccatcttcatcgcccagatgaacggcgtggtgctggacggcggccagatcgtgaccgtgagcctgaccgccaccctggccagcgtgggcgccgccagcatccccagcgccggcctggtgaccatgctgctgatcctgaccgccgtgggcctgcccaccgaggacatcagcctgctggtggccgtggactggctgctggacagaatgagaaccagcgtgaacgtggtgggcgacagcttcggcgccggcatcgtgtaccacctgagcaagagcgagctggacaccatcgacagccagcacagagtgcacgaggacatcgagatgaccaagacccagagcatctacgacgacatgaagaaccacagagagagcaacagcaaccagtgcgtgtacgccgcccacaacagcgtgatcgtggacgagtgcaaggtgaccctggccgccaacggcaagagcgccgactgcagcgtggaggaggagccctggaagagagagaagtag

SEQ ID NO: 99337 - DNA, 1698 bp, synthetic construct; identical to SEQ ID NO: 99336
  misc_feature 1..1698: note = Description of Artificial Sequence: Synthetic coding sequence
  source 1..1698: mol_type = other DNA

SEQ ID NO: 99338 - DNA, 1629 bp, synthetic construct
  misc_feature 1..1629: note = Description of Artificial Sequence: Synthetic coding sequence
  source 1..1629: mol_type = other DNA
atgaccaagagcaacggcgaggagcccaagatgggcggcagaatggagagattccagcagggcgtgagaaagagaaccctgctggccaagaagaaggtgcagaacatcaccaaggaggacgtgaagagctacctgttcagaaacgccttcgtgctgctgaccgtgaccgccgtgatcgtgggcaccatcctgggcttcaccctgagaccctacagaatgagctacagagaggtgaagtacttcagcttccccggcgagctgctgatgagaatgctgcagatgctggtgctgcccctgatcatcagcagcctggtgaccggcatggccgccctggacagcaaggccagcggcaagatgggcatgagagccgtggtgtactacatgaccaccaccatcatcgccgtggtgatcggcatcatcatcgtgatcatcatccaccccggcaagggcaccaaggagaacatgcacagagagggcaagatcgtgagagtgaccgccgccgacgccttcctggacctgatcagaaacatgttcccccccaacctggtggaggcctgcttcaagcagttcaagaccaactacgagaagagaagcttcaaggtgcccatccaggccaacgagaccctggtgggcgccgtgatcaacaacgtgagcgaggccatggagaccctgaccagaatcaccgaggagctggtgcccgtgcccggcagcgtgaacggcgtgaacgccctgggcctggtggtgttcagcatgtgcttcggcttcgtgatcggcaacatgaaggagcagggccaggccctgagagagttcttcgacagcctgaacgaggccatcatgagactggtggccgtgatcatgtggtacgcccccgtgggcatcctgttcctgatcgccggcaagatcgtggagatggaggacatgggcgtgatcggcggccagctggccatgtacaccgtgaccgtgatcgtgggcctgctgatccacgccgtgatcgtgctgcccctgctgtacttcctggtgaccagaaagaacccctgggtgttcatcggcggcctgctgcaggccctgatcaccgccctgggcaccagcagcagcagcgccaccctgcccatcaccttcaagtgcctggaggagaacaacggcgtggacaagagagtgaccagattcgtgctgcccgtgggcgccaccatcaacatggacggcaccgccctgtacgaggccctggccgccatcttcatcgcccaggtgaacaacttcgagctgaacttcggccagatcatcaccatcagcatcaccgccaccgccgccagcatcggcgccgccggcatcccccaggccggcctggtgaccatggtgatcgtgctgaccagcgtgggcctgcccaccgacgacatcaccctgatcatcgccgtggactggttcctggacagactgagaaccaccaccaacgtgctgggcgacagcctgggcgccggcatcgtggagcacctgagcagacacgagctgaagaacagagacgtggagatgggcaacagcgtgatcgaggagaacgagatgaagaagccctaccagctgatcgcccaggacaacgagaccgagaagcccatcgacagcgagaccaagatgtag

SEQ ID NO: 99339 - DNA, 1494 bp, synthetic construct
  misc_feature 1..1494: note = Description of Artificial Sequence: Synthetic coding sequence
  source 1..1494: mol_type = other DNA
atgaccaagagcaacggcgaggagcccaagatgggcggcagaatggagagattccagcagggcgtgagaaagagaaccctgctggccaagaagaaggtgcagaacatcaccaaggaggacgtgaagagctacctgttcagaaacgccttcgtgctgctgaccgtgaccgccgtgatcgtgggcaccatcctgggcttcaccctgagaccctacagaatgagctacagagaggtgaagtacttcagcttccccggcgagctgctgatgagaatgctgcagatgctggtgctgcccctgatcatcagcagcctggtgaccggcatggccgccctggacagcaaggccagcggcaagatgggcatgagagccgtggtgtactacatgaccaccaccatcatcgccgtggtgatcggcatcatcatcgtgatcatcatccaccccggcaagggcaccaaggagaacatgcacagagagggcaagatcgtgagagtgaccgccgccgacgccttcctggacctgatcagaaacatgttcccccccaacctggtggaggcctgcttcaagcagttcaagaccaactacgagaagagaagcttcaaggtgcccatccaggccaacgagaccctggtgggcgccgtgatcaacaacgtgagcgaggccatggagaccctgaccagaatcaccgaggagctggtgcccgtgcccggcagcgtgaacggcgtgaacgccctgggcctggtggtgttcagcatgtgcttcggcttcgtgatcggcaacatgaaggagcagggccaggccctgagagagttcttcgacagcctgaacgaggccatcatgagactggtggccgtgatcatgtggtacgcccccgtgggcatcctgttcctgatcgccggcaagatcgtggagatggaggacatgggcgtgatcggcggccagctggccatgtacaccgtgaccgtgatcgtgggcctgctgatccacgccgtgatcgtgctgcccctgctgtacttcctggtgaccagaaagaacccctgggtgttcatcggcggcctgctgcaggccctgatcaccgccctgggcaccagcagcagcagcgccaccctgcccatcaccttcaagtgcctggaggagaacaacggcgtggacaagagagtgaccagattcgtgctgcccgtgggcgccaccatcaacatggacggcaccgccctgtacgaggccctggccgccatcttcatcgcccaggtgaacaacttcgagctgaacttcggccagatcatcaccatcagagacagactgagaaccaccaccaacgtgctgggcgacagcctgggcgccggcatcgtggagcacctgagcagacacgagctgaagaacagagacgtggagatgggcaacagcgtgatcgaggagaacgagatgaagaagccctaccagctgatcgcccaggacaacgagaccgagaagcccatcgacagcgagaccaagatgtag

SEQ ID NO: 99340 - DNA, 348 bp, synthetic construct
  misc_feature 1..348: note = Description of Artificial Sequence: Synthetic coding sequence
  source 1..348: mol_type = other DNA
atgaccaagagcaacggcgaggagcccaagatgggcggcagaatggagagattccagcagggcgtgagaaagagaaccctgctggccaagaagaaggtgcagaacatcaccaaggaggacgtgaagagctacctgttcagaaacgccttcgtgctgctgaccgtgaccgccgtgatcgtggacgagaagaccgaggcccagatcctgaccacccagctgatgaacaccgagtgggacagcaacccccccttcagactgcaggtgctgatccaccacaccgtgctgggcgccatcacccccatcctggccctgctgcagcagttcgccgagggcctgcccgaggtgtag

SEQ ID NO: 99341 - DNA, 1473 bp, synthetic construct
  misc_feature 1..1473: note = Description of Artificial Sequence: Synthetic coding sequence
  source 1..1473: mol_type = other DNA
atgaccaagagcaacggcgaggagcccaagatgggcggcagaatggagagattccagcagggcgtgagaaagagaaccctgctggccaagaagaaggtgcagaacatcaccaaggaggacgtgaagagctacctgttcagaaacgccttcgtgctgctgaccggcatggccgccctggacagcaaggccagcggcaagatgggcatgagagccgtggtgtactacatgaccaccaccatcatcgccgtggtgatcggcatcatcatcgtgatcatcatccaccccggcaagggcaccaaggagaacatgcacagagagggcaagatcgtgagagtgaccgccgccgacgccttcctggacctgatcagaaacatgttcccccccaacctggtggaggcctgcttcaagcagttcaagaccaactacgagaagagaagcttcaaggtgcccatccaggccaacgagaccctggtgggcgccgtgatcaacaacgtgagcgaggccatggagaccctgaccagaatcaccgaggagctggtgcccgtgcccggcagcgtgaacggcgtgaacgccctgggcctggtggtgttcagcatgtgcttcggcttcgtgatcggcaacatgaaggagcagggccaggccctgagagagttcttcgacagcctgaacgaggccatcatgagactggtggccgtgatcatgtggtacgcccccgtgggcatcctgttcctgatcgccggcaagatcgtggagatggaggacatgggcgtgatcggcggccagctggccatgtacaccgtgaccgtgatcgtgggcctgctgatccacgccgtgatcgtgctgcccctgctgtacttcctggtgaccagaaagaacccctgggtgttcatcggcggcctgctgcaggccctgatcaccgccctgggcaccagcagcagcagcgccaccctgcccatcaccttcaagtgcctggaggagaacaacggcgtggacaagagagtgaccagattcgtgctgcccgtgggcgccaccatcaacatggacggcaccgccctgtacgaggccctggccgccatcttcatcgcccaggtgaacaacttcgagctgaacttcggccagatcatcaccatcagcatcaccgccaccgccgccagcatcggcgccgccggcatcccccaggccggcctggtgaccatggtgatcgtgctgaccagcgtgggcctgcccaccgacgacatcaccctgatcatcgccgtggactggttcctggacagactgagaaccaccaccaacgtgctgggcgacagcctgggcgccggcatcgtggagcacctgagcagacacgagctgaagaacagagacgtggagatgggcaacagcgtgatcgaggagaacgagatgaagaagccctaccagctgatcgcccaggacaacgagaccgagaagcccatcgacagcgagaccaagatgtag

SEQ ID NO: 99342 - DNA, 324 bp, synthetic construct
  misc_feature 1..324: note = Description of Artificial Sequence: Synthetic coding sequence
  source 1..324: mol_type = other DNA
atgaccaagagcaacggcgaggagcccaagatgggcggcagaatggagagattccagcagggcgtgagaaagagaaccctgctggccaagaagaaggtgcagaacatcaccaaggaggacgtgaagagctacctgttcagaaacgccttcgtgctgctgaccgtgaccgccgtgatcgtgggcaccatcctgggcttcaccctgagaccctacagaatgagctacagagaggtgaagtacttcagcttccccggcgagctgctgatgagaatgctgcagatgctggtgctgcccctgatcatcagcagcctggtgaccggctag

SEQ ID NO: 99343 - DNA, 324 bp, synthetic construct; identical to SEQ ID NO: 99342
  misc_feature 1..324: note = Description of Artificial Sequence: Synthetic coding sequence
  source 1..324: mol_type = other DNA

SEQ ID NO: 99344 - DNA, 306 bp, synthetic construct
  misc_feature 1..306: note = Description of Artificial Sequence: Synthetic coding sequence
  source 1..306: mol_type = other DNA
atgaccaagagcaacggcgaggagcccaagatgggcggcagaatggagagattccagcagggcgtgagaaagagaaccctgctggccaagaagaaggtgcagaacatcaccaaggaggacgtgaagagctacctgttcagaaacgccttcgtgctgctgaccgtgaccgccgtgatcgtgggcaccatcctgggcttcaccctgagaccctacagaatgagctacagagaggtgaagtacttcagcttccccggcgagctgctgatgagaatgctgcagatgctggtgctgcccctgatcatctag

SEQ ID NO: 99345 - DNA, 987 bp, synthetic construct
  misc_feature 1..987: note = Description of Artificial Sequence: Synthetic coding sequence
  source 1..987: mol_type = other DNA
atgaccggcgtgttcgacagcctggtggccgacatgcacagcacccagatcgccgccagcagcacctaccaccagcaccagcagccccccagcggcggcggcgccggccccggcggcaacagcagcagcagcagcagcctgcacaagccccaggagagccccaccctgcccgtgagcaccgccaccgacagcagctactacaccaaccagcagcaccccgccggcggcggcggcggcggcggcagcccctacgcccacatgggcagctaccagtaccaggccagcggcctgaacaacgtgccctacagcgccaagagcagctacgacctgggctacaccgccgcctacaccagctacgccccctacggcaccagcagcagccccgccaacaacgagcccgagaaggaggacctggagcccgagatcagaatcgtgaacggcaagcccaagaaggtgagaaagcccagaaccatctacagcagcttccagctggccgccctgcagagaagattccagaagacccagtacctggccctgcccgagagagccgagctggccgccagcctgggcctgacccagacccaggtgaagatctggttccagaacagaagaagcaagttcaagaagatgtggaagagcggcgagatccccagcgagcagcaccccggcgccagcgccagccccccctgcgccagcccccccgtgagcgcccccgccagctgggacttcggcgtgccccagagaatggccggcggcggcggccccggcagcggcggcagcggcgccggcagcagcggcagcagccccagcagcgccgccagcgccttcctgggcaactacccctggtaccaccagaccagcggcagcgccagccacctgcaggccaccgcccccctgctgcaccccacccagaccccccagccccaccaccaccaccaccaccacggcggcggcggcgcccccgtgagcgccggcaccatcttctag

SEQ ID NO: 99346 - DNA, 1359 bp, synthetic construct
  misc_feature 1..1359: note = Description of Artificial Sequence: Synthetic coding sequence
  source 1..1359: mol_type = other DNA
atgctgctgagaatgctgagaatgatcatcctgcccctggtggtgtgcagcctggtgagcggcgccgccagcctggacgccagctgcctgggcagactgggcggcatcgccgtggcctacttcggcctgaccaccctgagcgccagcgccctggccgtggccctggccttcatcatcaagcccggcagcggcgcccagaccctgcagagcagcgacctgggcctggaggacagcggccccccccccgtgcccaaggagaccgtggacagcttcctggacctggccagaaacctgttccccagcaacctggtggtggccgccttcagaacctacgccaccgactacaaggtggtgacccagaacagcagcagcggcaacgtgacccacgagaagatccccatcggcaccgagatcgagggcatgaacatcctgggcctggtgctgttcgccctggtgctgggcgtggccctgaagaagctgggcagcgagggcgaggacctgatcagattcttcaacagcctgaacgaggccaccatggtgctggtgagctggatcatgtggtacgtgcccgtgggcatcatgttcctggtgggcagcaagatcgtggagatgaaggacatcatcgtgctggtgaccagcctgggcaagtacatcttcgccagcatcctgggccacgtgatccacggcggcatcgtgctgcccctgatctacttcgtgttcaccagaaagaaccccttcagattcctgctgggcctgctggcccccttcgccaccgccttcgccacctgcagcagcagcgccaccctgcccagcatgatgaagtgcatcgaggagaacaacggcgtggacaagagaatcagcagattcatcctgcccatcggcgccaccgtgaacatggacggcgccgccatcttccagtgcgtggccgccgtgttcatcgcccagctgaacaacgtggagctgaacgccggccagatcttcaccatcctggtgaccgccaccgccagcagcgtgggcgccgccggcgtgcccgccggcggcgtgctgaccatcgccatcatcctggaggccatcggcctgcccacccacgacctgcccctgatcctggccgtggactggatcgtggacagaaccaccaccgtggtgaacgtggagggcgacgccctgggcgccggcatcctgcaccacctgaaccagaaggccaccaagaagggcgagcaggagctggccgaggtgaaggtggaggccatccccaactgcaagagcgaggaggagaccagccccctggtgacccaccagaaccccgccggccccgtggccagcgcccccgagctggagagcaaggagagcgtgctgtag

SEQ ID NO: 99347 - DNA, 705 bp, synthetic construct
  misc_feature 1..705: note = Description of Artificial Sequence: Synthetic coding sequence
  source 1..705: mol_type = other DNA
atgaacatcctgggcctggtgctgttcgccctggtgctgggcgtggccctgaagaagctgggcagcgagggcgaggacctgatcagattcttcaacagcctgaacgaggccaccatggtgctggtgagctggatcatgtgcagcgccaccctgcccagcatgatgaagtgcatcgaggagaacaacggcgtggacaagagaatcagcagattcatcctgcccatcggcgccaccgtgaacatggacggcgccgccatcttccagtgcgtggccgccgtgttcatcgcccagctgaacaacgtggagctgaacgccggccagatcttcaccatcctggtgaccgccaccgccagcagcgtgggcgccgccggcgtgcccgccggcggcgtgctgaccatcgccatcatcctggaggccatcggcctgcccacccacgacctgcccctgatcctggccgtggactggatcgtggacagaaccaccaccgtggtgaacgtggagggcgacgccctgggcgccggcatcctgcaccacctgaaccagaaggccaccaagaagggcgagcaggagctggccgaggtgaaggtggaggccatccccaactgcaagagcgaggaggagaccagccccctggtgacccaccagaaccccgccggccccgtggccagcgcccccgagctggagagcaaggagagcgtgctgtag

SEQ ID NO: 99348 - DNA, 1575 bp, synthetic construct
  misc_feature 1..1575: note = Description of Artificial Sequence: Synthetic coding sequence
  source 1..1575: mol_type = other DNA
atgggcaagcccgccagaaagggctgcgagtggaagagattcctgaagaacaactgggtgctgctgagcaccgtggccgccgtggtgctgggcatcaccaccggcgtgctggtgagagagcacagcaacctgagcaccctggagaagttctacttcgccttccccggcgagatcctgatgagaatgctgaagctgatcatcctgcccctgatcatcagcagcatgatcaccggcgtggccgccctggacagcaacgtgagcggcaagatcggcctgagagccgtggtgtactacttctgcaccaccctgatcgccgtgatcctgggcatcgtgctggtggtgagcatcaagcccggcgtgacccagaaggtgggcgagatcgccagaaccggcagcacccccgaggtgagcaccgtggacgccatgctggacctgatcagaaacatgttccccgagaacctggtgcaggcctgcttccagcagtacaagaccaagagagaggaggtgaagccccccagcgaccccgagatgaacatgaccgaggagagcttcaccgccgtgatgaccaccgccatcagcaagaacaagaccaaggagtacaagatcgtgggcatgtacagcgacggcatcaacgtgctgggcctgatcgtgttctgcctggtgttcggcctggtgatcggcaagatgggcgagaagggccagatcctggtggacttcttcaacgccctgagcgacgccaccatgaagatcgtgcagatcatcatgtgctacatgcccctgggcatcctgttcctgatcgccggcaagatcatcgaggtggaggactgggagatcttcagaaagctgggcctgtacatggccaccgtgctgaccggcctggccatccacagcatcgtgatcctgcccctgatctacttcatcgtggtgagaaagaaccccttcagattcgccatgggcatggcccaggccctgctgaccgccctgatgatcagcagcagcagcgccaccctgcccgtgaccttcagatgcgccgaggagaacaaccaggtggacaagagaatcaccagattcgtgctgcccgtgggcgccaccatcaacatggacggcaccgccctgtacgaggccgtggccgccgtgttcatcgcccagctgaacgacctggacctgggcatcggccagatcatcaccatcagcatcaccgccaccagcgccagcatcggcgccgccggcgtgccccaggccggcctggtgaccatggtgatcgtgctgagcgccgtgggcctgcccgccgaggacgtgaccctgatcatcgccgtggactggctgctggacagattcagaaccatggtgaacgtgctgggcgacgccttcggcaccggcatcgtggagaagctgagcaagaaggagctggagcagatggacgtgagcagcgaggtgaacatcgtgaaccccttcgccctggagagcaccatcctggacaacgaggacagcgacaccaagaagagctacgtgaacggcggcttcgccgtggacaagagcgacaccatcagcttcacccagaccagccagttctag

SEQ ID NO: 99349 - DNA, 729 bp, synthetic construct
  misc_feature 1..729: note = Description of Artificial Sequence: Synthetic coding sequence
  source 1..729: mol_type = other DNA
tgattcttcaacgccctgagcgacgccaccatgaagatcgtgcagatcatcatgtgctacatgcccctgggcatcctgttcctgatcgccggcaagatcatcgaggtggaggactgggagatcttcagaaagctgggcctgtacatggccaccgtgctgaccggcctggccatccacagcatcgtgatcctgcccctgatctacttcatcgtggtgagaaagaaccccttcagattcgccatgggcatggcccaggccctgctgaccgccctgatgatcagcagcagcagcgccaccctgcccgtgaccttcagatgcgccgaggagaacaaccaggtggacaagagaatcaccagattcgtgctgcccgtgggcgccaccatcaacatggacggcaccgccctgtacgaggccgtggccgccgtgttcatcgcccagctgaacgacctggacctgggcatcggccagatcatcaccatcagagacagattcagaaccatggtgaacgtgctgggcgacgccttcggcaccggcatcgtggagaagctgagcaagaaggagctggagcagatggacgtgagcagcgaggtgaacatcgtgaaccccttcgccctggagagcaccatcctggacaacgaggacagcgacaccaagaagagctacgtgaacggcggcttcgccgtggacaagagcgacaccatcagcttcacccagaccagccagttctag

SEQ ID NO: 99350 - DNA, 1647 bp, synthetic construct
  misc_feature 1..1647: note = Description of Artificial Sequence: Synthetic coding sequence
  source 1..1647: mol_type = other DNA
gagacccccgtgctgcccatcatggtggccgacccccccagagacagcaagggcctggccgccgccgagcccaccgccaacggcggcctggccctggccagcatcgaggaccagggcgccgccgccggcggctactgcggcagcagagaccaggtgagaagatgcctgagagccaacctgctggtgctgctgaccgtggtggccgtggtggccggcgtggccctgggcctgggcgtgagcggcgccggcggcgccctggccctgggccccgagagactgagcgccttcgtgttccccggcgagctgctgctgagactgctgagaatgatcatcctgcccctggtggtgtgcagcctgatcggcggcgccgccagcctggaccccggcgccctgggcagactgggcgcctgggccctgctgttcttcctggtgaccaccctgctggccagcgccctgggcgtgggcctggccctggccctgcagcccggcgccgccagcgccgccatcaacgccagcgtgggcgccgccggcagcgccgagaacgcccccagcaaggaggtgctggacagcttcctggacctggccagaaacatcttccccagcaacctggtgagcgccgccttcagaagctacagcaccacctacgaggagagaaacatcaccggcaccagagtgaaggtgcccgtgggccaggaggtggagggcatgaacatcctgggcctggtggtgttcgccatcgtgttcggcgtggccctgagaaagctgggccccgagggcgagctgctgatcagattcttcaacagcttcaacgaggccaccatggtgctggtgagctggatcatgtggtacgcccccgtgggcatcatgttcctggtggccggcaagatcgtggagatggaggacgtgggcctgctgttcgccagactgggcaagtacatcctgtgctgcctgctgggccacgccatccacggcctgctggtgctgcccctgatctacttcctgttcaccagaaagaacccctacagattcctgtggggcatcgtgacccccctggccaccgccttcggcaccagcagcagcagcgccaccctgcccctgatgatgaagtgcgtggaggagaacaacggcgtggccaagcacatcagcagattcatcctgcccatcggcgccaccgtgaacatggacggcgccgccctgttccagtgcgtggccgccgtgttcatcgcccagctgagccagcagagcctggacttcgtgaagatcatcaccatcctggtgaccgccaccgccagcagcgtgggcgccgccggcatccccgccggcggcgtgctgaccctggccatcatcctggaggccgtgaacctgcccgtggaccacatcagcctgatcctggccgtggactggctggtggacagaagctgcaccgtgctgaacgtggagggcgacgccctgggcgccggcctgctgcagaactacgtggacagaaccgagagcagaagcaccgagcccgagctgatccaggtgaagagcgagctgcccctggaccccctgcccgtgcccaccgaggagggcaaccccctgctgaagcactacagaggccccgccggcgacgccaccgtggccagcgagaaggagagcgtgatgtag

SEQ ID NO: 99351 - DNA, 942 bp, synthetic construct
  misc_feature 1..942: note = Description of Artificial Sequence: Synthetic coding sequence
  source 1..942: mol_type = other DNA
atgaacatcctgggcctggtggtgttcgccatcgtgttcggcgtggccctgagaaagctgggccccgagggcgagctgctgatcagattcttcaacagcttcaacgaggccaccatggtgctggtgagctggatcatgtggtacgcccccgtgggcatcatgttcctggtggccggcaagatcgtggagatggaggacgtgggcctgctgttcgccagactgggcaagtacatcctgtgctgcctgctgggccacgccatccacggcctgctggtgctgcccctgatctacttcctgttcaccagaaagaacccctacagattcctgtggggcatcgtgacccccctggccaccgccttcggcaccagcagcagcagcgccaccctgcccctgatgatgaagtgcgtggaggagaacaacggcgtggccaagcacatcagcagattcatcctgcccatcggcgccaccgtgaacatggacggcgccgccctgttccagtgcgtggccgccgtgttcatcgcccagctgagccagcagagcctggacttcgtgaagatcatcaccatcctggtgaccgccaccgccagcagcgtgggcgccgccggcatccccgccggcggcgtgctgaccctggccatcatcctggaggccgtgaacctgcccgtggaccacatcagcctgatcctggccgtggactggctggtggacagaagctgcaccgtgctgaacgtggagggcgacgccctgggcgccggcctgctgcagaactacgtggacagaaccgagagcagaagcaccgagcccgagctgatccaggtgaagagcgagctgcccctggaccccctgcccgtgcccaccgaggagggcaaccccctgctgaagcactacagaggccccgccggcgacgccaccgtggccagcgagaaggagagcgtgatgtag

SEQ ID NO: 99352 - DNA, 1020 bp, synthetic construct
  misc_feature 1..1020: note = Description of Artificial Sequence: Synthetic coding sequence
  source 1..1020: mol_type = other DNA
atgtacagcaccacctacgaggagagaaacatcaccggcaccagagtgaaggtgcccgtgggccaggaggtggagggcatgaacatcctgggcctggtggtgttcgccatcgtgttcggcgtggccctgagaaagctgggccccgagggcgagctgctgatcagattcttcaacagcttcaacgaggccaccatggtgctggtgagctggatcatgtggtacgcccccgtgggcatcatgttcctggtggccggcaagatcgtggagatggaggacgtgggcctgctgttcgccagactgggcaagtacatcctgtgctgcctgctgggccacgccatccacggcctgctggtgctgcccctgatctacttcctgttcaccagaaagaacccctacagattcctgtggggcatcgtgacccccctggccaccgccttcggcaccagcagcagcagcgccaccctgcccctgatgatgaagtgcgtggaggagaacaacggcgtggccaagcacatcagcagattcatcctgcccatcggcgccaccgtgaacatggacggcgccgccctgttccagtgcgtggccgccgtgttcatcgcccagctgagccagcagagcctggacttcgtgaagatcatcaccatcctggtgaccgccaccgccagcagcgtgggcgccgccggcatccccgccggcggcgtgctgaccctggccatcatcctggaggccgtgaacctgcccgtggaccacatcagcctgatcctggccgtggactggctggtggacagaagctgcaccgtgctgaacgtggagggcgacgccctgggcgccggcctgctgcagaactacgtggacagaaccgagagcagaagcaccgagcccgagctgatccaggtgaagagcgagctgcccctggaccccctgcccgtgcccaccgaggagggcaaccccctgctgaagcactacagaggccccgccggcgacgccaccgtggccagcgagaaggagagcgtgatgtag

SEQ ID NO: 99353 - DNA, 1626 bp, synthetic construct
  misc_feature 1..1626: note = Description of Artificial Sequence: Synthetic coding sequence
  source 1..1626: mol_type = other DNA
atggtggccgacccccccagagacagcaagggcctggccgccgccgagcccaccgccaacggcggcctggccctggccagcatcgaggaccagggcgccgccgccggcggctactgcggcagcagagaccaggtgagaagatgcctgagagccaacctgctggtgctgctgaccgtggtggccgtggtggccggcgtggccctgggcctgggcgtgagcggcgccggcggcgccctggccctgggccccgagagactgagcgccttcgtgttccccggcgagctgctgctgagactgctgagaatgatcatcctgcccctggtggtgtgcagcctgatcggcggcgccgccagcctggaccccggcgccctgggcagactgggcgcctgggccctgctgttcttcctggtgaccaccctgctggccagcgccctgggcgtgggcctggccctggccctgcagcccggcgccgccagcgccgccatcaacgccagcgtgggcgccgccggcagcgccgagaacgcccccagcaaggaggtgctggacagcttcctggacctggccagaaacatcttccccagcaacctggtgagcgccgccttcagaagctacagcaccacctacgaggagagaaacatcaccggcaccagagtgaaggtgcccgtgggccaggaggtggagggcatgaacatcctgggcctggtggtgttcgccatcgtgttcggcgtggccctgagaaagctgggccccgagggcgagctgctgatcagattcttcaacagcttcaacgaggccaccatggtgctggtgagctggatcatgtggtacgcccccgtgggcatcatgttcctggtggccggcaagatcgtggagatggaggacgtgggcctgctgttcgccagactgggcaagtacatcctgtgctgcctgctgggccacgccatccacggcctgctggtgctgcccctgatctacttcctgttcaccagaaagaacccctacagattcctgtggggcatcgtgacccccctggccaccgccttcggcaccagcagcagcagcgccaccctgcccctgatgatgaagtgcgtggaggagaacaacggcgtggccaagcacatcagcagattcatcctgcccatcggcgccaccgtgaacatggacggcgccgccctgttccagtgcgtggccgccgtgttcatcgcccagctgagccagcagagcctggacttcgtgaagatcatcaccatcctggtgaccgccaccgccagcagcgtgggcgccgccggcatccccgccggcggcgtgctgaccctggccatcatcctggaggccgtgaacctgcccgtggaccacatcagcctgatcctggccgtggactggctggtggacagaagctgcaccgtgctgaacgtggagggcgacgccctgggcgccggcctgctgcagaactacgtggacagaaccgagagcagaagcaccgagcccgagctgatccaggtgaagagcgagctgcccctggaccccctgcccgtgcccaccgaggagggcaaccccctgctgaagcactacagaggccccgccggcgacgccaccgtggccagcgagaaggagagcgtgatgtag

SEQ ID NO: 99354 - DNA, 1308 bp, synthetic construct
  misc_feature 1..1308: note = Description of Artificial Sequence: Synthetic coding sequence
  source 1..1308: mol_type = other DNA
atggccgagagcagcagcgagagcgaccacttcagatgcagagacagactgagcccctgggccgccagaagcacccacagaggcaccagaagcctgcccaccgtggaggtgaccgagaaggtgaacaccatcaccagcaccctgcaggacaccagcagaaacctgagacaggtggaccagatgctgggcagatacagagagtacagcaacggccaggccggcgccatcgagcacctgaaggagagcctggagcagagcatcgaccagctgagaagccagagactgctgagaaacagcggcggcagaagcatcagcgtgaccagcctgagcgccagcgacctggacggcggcaccggcagcgagctgcaccacttcccccccaccagccccctgaaggactacggcgacccccagggcatcaagagaatgagaagcagaaccggcgtgagattcgtgcaggagaccgacgacatgacccagctgcacggcttccaccagagcctgagagacctgagcagcgagcagatcagactgggcgacgacttcaacagagagctgagcagaagaagcagaagcgacgccgagaccaagagagccctggaggagctgaccgagaagctgaacgaggcccagaagcaggaggtggtgagcgacagagtggagagaagactgcaggagctggagagagagatgagaaccgagagagagctggtggagagaagacaggaccagctgggcctgatgagcctgcagctgcaggaggccctgaagaagcaggaggccaaggccgacgagcacgagggcgccatcaagaacaagctgagacagaccgagaccgagaagaaccagctggagcaggagctggagctgagcagaagactgctgaaccagagcgagggcagcagagagaccctgctgcaccaggtggaggagctgagaacccagctgaccaaggccgagggcgacagaaagggcctgcagcaccaggtgagccagatcagcaagcagcagagcaactaccaggacgagcagggcgaggactggagattcagaagaggcgtggagagagagaagcaggacctggagaagcagatgagcgacctgagagtgcagctgaacttcagcgccatggccagcgagctggaggaggtgaagagatgcatggagagaaaggacaaggagaaggcccacctggccagccaggtggagcacatcaacagaaagtgcctgctgaacctggtgcaggacctggactgcaaggacaacgagatcctgacctacagcctgcagagccccctgcacgtgtag

SEQ ID NO: 99355 - DNA, 1047 bp, synthetic construct
  misc_feature 1..1047: note = Description of Artificial Sequence: Synthetic coding sequence
  source 1..1047: mol_type = other DNA
atgaacgaccccaacagctgcgtggacaacgccaccgtgtgcagcggcgccagctgcgtggtgcccgagagcaacttcaacaacatcctgagcgtggtgctgagcaccgtgctgaccatcctgctggccctggtgatgttcagcatgggctgcaacgtggagatcaagaagttcctgggccacatcaagagaccctggggcatctgcgtgggcttcctgtgccagttcggcatcatgcccctgaccggcttcatcctgagcgtggccttcgacatcctgcccctgcaggccgtggtggtgctgatcatcggctgctgccccggcggcaccgccagcaacatcctggcctactgggtggacggcgacatggacctgagcgtgagcatgaccacctgcagcaccctgctggccctgggcatgatgcccctgtgcctgctgatctacaccaagatgtgggtggacagcggcagcatcgtgatcccctacgacaacatcggcaccagcctggtgagcctggtggtgcccgtgagcatcggcatgttcgtgaaccacaagtggccccagaaggccaagatcatcctgaagatcggcagcatcgccggcgccatcctgatcgtgctgatcgccgtggtgggcggcatcctgtaccagagcgcctggatcatcgcccccaagctgtggatcatcggcaccatcttccccgtggccggctacagcctgggcttcctgctggccagaatcgccggcctgccctggtacagatgcagaaccgtggccttcgagaccggcatgcagaacacccagctgtgcagcaccatcgtgcagctgagcttcacccccgaggagctgaacgtggtgttcaccttccccctgatctacagcatcttccagctggccttcgccgccatcttcctgggcttctacgtggcctacaagaagtgccacggcaagaacaaggccgagatccccgagagcaaggagaacggcaccgagcccgagagcagcttctacaaggccaacggcggcttccagcccgacgagaagtag

SEQ ID NO: 99356 - DNA, 1434 bp, synthetic construct
  misc_feature 1..1434: note = Description of Artificial Sequence: Synthetic coding sequence
  source 1..1434: mol_type = other DNA
atggtgctgatgcaggacaagggcagcagccagcagtggcccggcctgggcggcgagggcggcggcaccggccccctgagcatgctgagagccgccctgctgctgatcagcctgccctggggcgcccagggcaccgccagcaccagcctgagcaccgccggcggccacaccgtgccccccaccggcggcagatacctgagcatcggcgacggcagcgtgatggagttcgagttccccgaggacagcgagggcatcatcgtgatcagcagccagtaccccggccaggccaacagaaccgcccccggccccatgctgagagtgaccagcctggacaccgaggtgctgaccatcaagaacgtgagcgccatcacctggggcggcggcggcggcttcgtggtgagcatccacagcggcctggccggcctggcccccctgcacatccagctggtggacgcccacgaggccccccccaccctgatcgaggagagaagagacttctgcatcaaggtgagccccgccgaggacacccccgccaccctgagcgccgacctggcccacttcagcgagaaccccatcctgtacctgctgctgcccctgatcttcgtgaacaagtgcagcttcggctgcaaggtggagctggaggtgctgaagggcctgatgcagagcccccagcccatgctgctgggcctgctgggccagttcctggtgatgcccctgtacgccttcctgatggccaaggtgttcatgctgcccaaggccctggccctgggcctgatcatcacctgcagcagccccggcggcggcggcagctacctgttcagcctgctgctgggcggcgacgtgaccctggccatcagcatgaccttcctgagcaccgtggccgccaccggcttcctgcccctgagcagcgccatctacagcagactgctgagcatccacgagaccctgcacgtgcccatcagcaagatcctgggcaccctgctgttcatcgccatccccatcgccgtgggcgtgctgatcaagagcaagctgcccaagttcagccagctgctgctgcaggtggtgaagcccttcagcttcgtgctgctgctgggcggcctgttcctggcctacagaatgggcgtgttcatcctggccggcatcagactgcccatcgtgctggtgggcatcaccgtgcccctggtgggcctgctggtgggctactgcctggccacctgcctgaagctgcccgtggcccagagaagaaccgtgagcatcgaggtgggcgtgcagaacagcctgctggccctggccatgctgcagctgagcctgagaagactgcaggccgactacgccagccaggcccccttcatcgtggccctgagcggcaccagcgagatgctggccctggtgatcggccacttcatctacagcagcctgttccccgtgccctag

SEQ ID NO: 99357 - DNA, 1347 bp, synthetic construct
  misc_feature 1..1347: note = Description of Artificial Sequence: Synthetic coding sequence
  source 1..1347: mol_type = other DNA
atggtgctgatgcaggacaagggcagcagccagcagtggcccggcctgggcggcgagggcggcggcaccggccccctgagcatgctgagagccgccctgctgctgatcagcctgccctggggcgcccagggcaccgccagcaccagcctgagcaccgccggcggccacaccgtgccccccaccggcggcagatacctgagcatcggcgacggcagcgtgatggagttcgagttccccgaggacagcgagggcatcatcgtgatcagcagccagtaccccggccaggccaacagaaccgcccccggccccatgctgagagtgaccagcctggacaccgaggtgctgaccatcaagaacctggtggacgcccacgaggccccccccaccctgatcgaggagagaagagacttctgcatcaaggtgagccccgccgaggacacccccgccaccctgagcgccgacctggcccacttcagcgagaaccccatcctgtacctgctgctgcccctgatcttcgtgaacaagtgcagcttcggctgcaaggtggagctggaggtgctgaagggcctgatgcagagcccccagcccatgctgctgggcctgctgggccagttcctggtgatgcccctgtacgccttcctgatggccaaggtgttcatgctgcccaaggccctggccctgggcctgatcatcacctgcagcagccccggcggcggcggcagctacctgttcagcctgctgctgggcggcgacgtgaccctggccatcagcatgaccttcctgagcaccgtggccgccaccggcttcctgcccctgagcagcgccatctacagcagactgctgagcatccacgagaccctgcacgtgcccatcagcaagatcctgggcaccctgctgttcatcgccatccccatcgccgtgggcgtgctgatcaagagcaagctgcccaagttcagccagctgctgctgcaggtggtgaagcccttcagcttcgtgctgctgctgggcggcctgttcctggcctacagaatgggcgtgttcatcctggccggcatcagactgcccatcgtgctggtgggcatcaccgtgcccctggtgggcctgctggtgggctactgcctggccacctgcctgaagctgcccgtggcccagagaagaaccgtgagcatcgaggtgggcgtgcagaacagcctgctggccctggccatgctgcagctgagcctgagaagactgcaggccgactacgccagccaggcccccttcatcgtggccctgagcggcaccagcgagatgctggccctggtgatcggccacttcatctacagcagcctgttccccgtgccctag

SEQ ID NO: 99358 - DNA, 1599 bp, synthetic construct
  misc_feature 1..1599: note = Description of Artificial Sequence: Synthetic coding sequence
  source 1..1599: mol_type = other DNA
atggccggccccagaccccccggcgacagccccgccatcaaggaggacagcaccggcctgggccccacccacgagcccttcagcggccagcccaacagcaccagcggcgacgtgctgctgagcagaagaggccccggccacgccatcagaccccccggcagagccatggtgctgatgcaggacaagggcagcagccagcagtggcccggcctgggcggcgagggcggcggcaccggccccctgagcatgctgagagccgccctgctgctgatcagcctgccctggggcgcccagggcaccgccagcaccagcctgagcaccgccggcggccacaccgtgccccccaccggcggcagatacctgagcatcggcgacggcagcgtgatggagttcgagttccccgaggacagcgagggcatcatcgtgatcagcagccagtaccccggccaggccaacagaaccgcccccggccccatgctgagagtgaccagcctggacaccgaggtgctgaccatcaagaacgtgagcgccatcacctggggcggcggcggcggcttcgtggtgagcatccacagcggcctggccggcctggcccccctgcacatccagctggtggacgcccacgaggccccccccaccctgatcgaggagagaagagacttctgcatcaaggtgagccccgccgaggacacccccgccaccctgagcgccgacctggcccacttcagcgagaaccccatcctgtacctgctgctgcccctgatcttcgtgaacaagtgcagcttcggctgcaaggtggagctggaggtgctgaagggcctgatgcagagcccccagcccatgctgctgggcctgctgggccagttcctggtgatgcccctgtacgccttcctgatggccaaggtgttcatgctgcccaaggccctggccctgggcctgatcatcacctgcagcagccccggcggcggcggcagctacctgttcagcctgctgctgggcggcgacgtgaccctggccatcagcatgaccttcctgagcaccgtggccgccaccggcttcctgcccctgagcagcgccatctacagcagactgctgagcatccacgagaccctgcacgtgcccatcagcaagatcctgggcaccctgctgttcatcgccatccccatcgccgtgggcgtgctgatcaagagcaagctgcccaagttcagccagctgctgctgcaggtggtgaagcccttcagcttcgtgctgctgctgggcggcctgttcctggcctacagaatgggcgtgttcatcctggccggcatcagactgcccatcgtgctggtgggcatcaccgtgcccctggtgggcctgctggtgggctactgcctggccacctgcctgaagctgcccgtggcccagagaagaaccgtgagcatcgaggtgggcgtgcagaacagcctgctggccctggccatgctgcagctgagcctgagaagactgcaggccgactacgccagccaggcccccttcatcgtggccctgagcggcaccagcgagatgctggccctggtgatcggccacttcatctacagcagcctgttccccgtgccctag

SEQ ID NO: 99359 - DNA, 1434 bp, synthetic construct; identical to SEQ ID NO: 99356
  misc_feature 1..1434: note = Description of Artificial Sequence: Synthetic coding sequence
  source 1..1434: mol_type = other DNA

SEQ ID NO: 99360 - DNA, 657 bp, synthetic construct
  misc_feature 1..657: note = Description of Artificial Sequence: Synthetic coding sequence
  source 1..657: mol_type = other DNA
atggtgctgatgcaggacaagggcagcagccagcagtggcccggcctgggcggcgagggcggcggcaccggccccctgagcatgctgagagccgccctgctgctgatcagcctgccctggggcgcccagggcaccgccagcaccagcctgagcaccgccggcggccacaccgtgccccccaccggcggcagatacctgagcatcggcgacggcagcgtgatggagttcgagttccccgaggacagcgagggcatcatcgtgatcagcagccagtaccccggccaggccaacagaaccgcccccggccccatgctgagagtgaccagcctggacaccgaggtgctgaccatcaagaacgtgagcgccatcacctggggcggcggcggcggcttcgtggtgagcatccacagcggcctggccggcctggcccccctgcacatccagctggtggacgcccacgaggccccccccaccctgatcgaggagagaagagacttctgcatcaaggtgagccccgccgaggacacccccgccaccctgagcgccgacctggcccacttcagcgagaaccccatcctgtacctgctgctgcccctgatcttcgtgaacaagtgcagcttcggctgcaaggtggagctggaggtgctgaagggctag

SEQ ID NO: 99361 - DNA, 1314 bp, synthetic construct
  misc_feature 1..1314: note = Description of Artificial Sequence: Synthetic coding sequence
  source 1..1314: mol_type = other DNA
atggacggcaacgacaacgtgaccctgctgttcgcccccctgctgagagacaactacaccctggcccccaacgccagcagcctgggccccggcaccgacctggccctggcccccgccagcagcgccggccccggccccggcctgagcctgggccccggccccagcttcggcttcagccccggccccacccccacccccgagcccaccaccagcggcctggccggcggcgccgccagccacggccccagccccttccccagaccctgggccccccacgccctgcccttctgggacacccccctgaaccacggcctgaacgtgttcgtgggcgccgccctgtgcatcaccatgctgggcctgggctgcaccgtggacgtgaaccacttcggcgcccacgtgagaagacccgtgggcgccctgctggccgccctgtgccagttcggcctgctgcccctgctggccttcctgctggccctggccttcaagctggacgaggtggccgccgtggccgtgctgctgtgcggctgctgccccggcggcaacctgagcaacctgatgagcctgctggtggacggcgacatgaacctgagcatcatcatgaccatcagcagcaccctgctggccctggtgctgatgcccctgtgcctgtggatctacagctgggcctggatcaacacccccatcgtgcagctgctgcccctgggcaccgtgaccctgaccctgtgcagcaccctgatccccatcggcctgggcgtgttcatcagatacaagtacagcagagtggccgactacatcgtgaaggtgagcctgtggagcctgctggtgaccctggtggtgctgttcatcatgaccggcaccatgctgggccccgagctgctggccagcatccccgccgccgtgtacgtgatcgccatcttcatgcccctggccggctacgccagcggctacggcctggccaccctgttccacctgccccccaactgcaagagaaccgtgtgcctggagaccggcagccagaacgtgcagctgtgcaccgccatcctgaagctggccttccccccccagttcatcggcagcatgtacatgttccccctgctgtacgccctgttccagagcgccgaggccggcatcttcgtgctgatctacaagatgtacggcagcgagatgctgcacaagagagaccccctggacgaggacgaggacaccgacatcagctacaagaagctgaaggaggaggagatggccgacaccagctacggcaccgtgaaggccgagaacatcatcatgatggagaccgcccagaccagcctgtag

SEQ ID NO: 99362 - DNA, 1134 bp, synthetic construct
  misc_feature 1..1134: note = Description of Artificial Sequence: Synthetic coding sequence
  source 1..1134: mol_type = other DNA
atgagagccaactgcagcagcagcagcgcctgccccgccaacagcagcgaggaggagctgcccgtgggcctggaggtgcacggcaacctggagctggtgttcaccgtggtgagcaccgtgatgatgggcctgctgatgttcagcctgggctgcagcgtggagatcagaaagctgtggagccacatcagaagaccctggggcatcgccgtgggcctgctgtgccagttcggcctgatgcccttcaccgcctacctgctggccatcagcttcagcctgaagcccgtgcaggccatcgccgtgctgatcatgggctgctgccccggcggcaccatcagcaacatcttcaccttctgggtggacggcgacatggacctgagcatcagcatgaccacctgcagcaccgtggccgccctgggcatgatgcccctgtgcatctacctgtacacctggagctggagcctgcagcagaacctgaccatcccctaccagaacatcggcatcaccctggtgtgcctgaccatccccgtggccttcggcgtgtacgtgaactacagatggcccaagcagagcaagatcatcctgaagatcggcgccgtggtgggcggcgtgctgctgctggtggtggccgtggccggcgtggtgctggccaagggcagctggaacagcgacatcaccctgctgaccatcagcttcatcttccccctgatcggccacgtgaccggcttcctgctggccctgttcacccaccagagctggcagagatgcagaaccatcagcctggagaccggcgcccagaacatccagatgtgcatcaccatgctgcagctgagcttcaccgccgagcacctggtgcagatgctgagcttccccctggcctacggcctgttccagctgatcgacggcttcctgatcgtggccgcctaccagacctacaagagaagactgaagaacaagcacggcaagaagaacagcggctgcaccgaggtgtgccacaccagaaagagcaccagcagcagagagaccaacgccttcctggaggtgaacgaggagggcgccatcacccccggcccccccggccccatggactgccacagagccctggagcccgtgggccacatcaccagctgcgagtag

SEQ ID NO: 99363 - DNA, 2184 bp, synthetic construct; identical to SEQ ID NO: 90366
  misc_feature 1..2184: note = Description of Artificial Sequence: Synthetic coding sequence
  source 1..2184: mol_type = other DNA

SEQ ID NO: 99364 - DNA, 492 bp, synthetic construct
  misc_feature 1..492: note = Description of Artificial Sequence: Synthetic coding sequence
  source 1..492: mol_type = other DNA
atgaccggcgacaagggcccccagagactgagcggcagcagctacggcagcatcagcagccccaccagccccaccagccccggcccccagcaggccccccccagagagacctacctgagcgagaagatccccatccccgacaccaagcccggcaccttcagcctgagaaagctgtgggccttcaccggccccggcttcctgatgagcatcgccttcctggaccccggcaacatcgagagcgacctgcaggccggcgccgtggccggcttcaagctgctgtgggtgctgctgtgggccaccgtgctgggcctgctgtgccagagactggccgccagactgggcgtggtgaccggcaaggacctgggcgaggtgtgccacctgtactaccccaagagcgagagcagaagcgtggcccagagcggcgtgcagtggtgcgacgtgagcagcctgcagcccctgccccccagatgccccgcccccagcagcggctag

SEQ ID NO: 99365 - DNA, 1299 bp, synthetic construct
  misc_feature 1..1299: note = Description of Artificial Sequence: Synthetic coding sequence
  source 1..1299: mol_type = other DNA
atggtgagatgccagctgaccgccaccagcaccagccaggtgcccagaaccgtgctgtggctgaccatcgagctggccatcgtgggcagcgacatgcaggaggtgatcggcaccgccatcgccttcaacctgctgagcgccggcagaatccccctgtggggcggcgtgctgatcaccatcgtggacaccttcttcttcctgttcctggacaactacggcctgagaaagctggaggccttcttcggcctgctgatcaccatcatggccctgaccttcggctacgagtacgtggtggccagacccgagcagggcgccctgctgagaggcctgttcctgcccagctgccccggctgcggccaccccgagctgctgcaggccgtgggcatcgtgggcgccatcatcatgccccacaacatctacctgcacagcgccctggtgaagagcagagagatcgacagagccagaagagccgacatcagagaggccaacatgtacttcctgatcgaggccaccatcgccctgagcgtgagcttcatcatcaacctgttcgtgatggccgtgttcggccaggccttctaccagaagaccaaccaggccgccttcaacatctgcgccaacagcagcctgcacgactacgccaagatcttccccatgaacaacgccaccgtggccgtggacatctaccagggcggcgtgatcctgggctgcctgttcggccccgccgccctgtacatctgggccatcggcctgctggccgccggccagagcagcaccatgaccggcacctacgccggccagttcgtgatggagggcttcctgagactgagatggagcagattcgccagagtgctgctgaccagaagctgcgccatcctgcccaccgtgctggtggccgtgttcagagacctgagagacctgagcggcctgaacgacctgctgaacgtgctgcagagcctgctgctgcccttcgccgtgctgcccatcctgaccttcaccagcatgcccaccctgatgcaggagttcgccaacggcctgctgaacaaggtggtgaccagcagcatcatggtgctggtgtgcgccatcaacctgtacttcgtggtgagctacctgcccagcctgccccaccccgcctacttcggcctggccgccctgctggccgccgcctacctgggcctgagcacctacctggtgtggacctgctgcctggcccacggcgccaccttcctggcccacagcagccaccaccacttcctgtacggcctgctggaggaggaccagaagggcgagaccagcggctag

SEQ ID NO: 99366 - DNA, 3351 bp, synthetic construct
  misc_feature 1..3351: note = Description of Artificial Sequence: Synthetic coding sequence
  source 1..3351: mol_type = other DNA
atgctgaacaacctgaccgactgcgaggacggcgacggcggcgccaaccccggcgacggcaaccccaaggagagcagccccttcatcaacagcaccgacaccgagaagggcaaggagtacgacggcaagaacatggccctgttcgaggaggagatggacaccagccccatggtgagcagcctgctgagcggcctggccaactacaccaacctgccccagggcagcagagagcacgaggaggccgagaacaacgagggcggcaagaagaagcccgtgcaggcccccagaatgggcaccttcatgggcgtgtacctgccctgcctgcagaacatcttcggcgtgatcctgttcctgagactgacctgggtggtgggcatcgccggcatcatggagagcttctgcatggtgttcatctgctgcagctgcaccatgctgaccgccatcagcatgagcgccatcgccaccaacggcgtggtgcccgccggcggcagctactacatgatcagcagaagcctgggccccgagttcggcggcgccgtgggcctgtgcttctacctgggcaccaccttcgccggcgccatgtacatcctgggcaccatcgagatcctgctggcctacctgttccccgccatggccatcttcaaggccgaggacgccagcggcgaggccgccgccatgctgaacaacatgagagtgtacggcacctgcgtgctgacctgcatggccaccgtggtgttcgtgggcgtgaagtacgtgaacaagttcgccctggtgttcctgggctgcgtgatcctgagcatcctggccatctacgccggcgtgatcaagagcgccttcgacccccccaacttccccatctgcctgctgggcaacagaaccctgagcagacacggcttcgacgtgtgcgccaagctggcctgggagggcaacgagaccgtgaccaccagactgtggggcctgttctgcagcagcagattcctgaacgccacctgcgacgagtacttcaccagaaacaacgtgaccgagatccagggcatccccggcgccgccagcggcctgatcaaggagaacctgtggagcagctacctgaccaagggcgtgatcgtggagagaagcggcatgaccagcgtgggcctggccgacggcacccccatcgacatggaccacccctacgtgttcagcgacatgaccagctacttcaccctgctggtgggcatctacttccccagcgtgaccggcatcatggccggcagcaacagaagcggcgacctgagagacgcccagaagagcatccccaccggcaccatcctggccatcgccaccaccagcgccgtgtacatcagcagcgtggtgctgttcggcgcctgcatcgagggcgtggtgctgagagacaagttcggcgaggccgtgaacggcaacctggtggtgggcaccctggcctggcccagcccctgggtgatcgtgatcggcagcttcttcagcacctgcggcgccggcctgcagagcctgaccggcgcccccagactgctgcaggccatcagcagagacggcatcgtgcccttcctgcaggtgttcggccacggcaaggccaacggcgagcccacctgggccctgctgctgaccgcctgcatctgcgagatcggcatcctgatcgccagcctggacgaggtggcccccatcctgagcatgttcttcctgatgtgctacatgttcgtgaacctggcctgcgccgtgcagaccctgctgagaacccccaactggagacccagattcagatactaccactggaccctgagcttcctgggcatgagcctgtgcctggccctgatgttcatctgcagctggtactacgccctggtggccatgctgatcgccggcctgatctacaagtacatcgagtacagaggcgccgagaaggagtggggcgacggcatcagaggcctgagcctgagcgccgccagatacgccctgctgagactggaggagggccccccccacaccaagaactggagaccccagctgctggtgctggtgagagtggaccaggaccagaacgtggtgcacccccagctgctgagcctgaccagccagctgaaggccggcaagggcctgaccatcgtgggcagcgtgctggagggcaccttcctggagaaccacccccaggcccagagagccgaggagagcatcagaagactgatggaggccgagaaggtgaagggcttctgccaggtggtgatcagcagcaacctgagagacggcgtgagccacctgatccagagcggcggcctgggcggcctgcagcacaacaccgtgctggtgggctggcccagaaactggagacagaaggaggaccaccagacctggagaaacttcatcgagctggtgagagagaccaccgccggccacctggccctgctggtgaccaagaacgtgagcatgttccccggcaaccccgagagattcagcgagggcagcatcgacgtgtggtggatcgtgcacgacggcggcatgctgatgctgctgcccttcctgctgagacaccacaaggtgtggagaaagtgcaagatgagaatcttcaccgtggcccagatggacgacaacagcatccagatgaagaaggacctgaccaccttcctgtaccacctgagaatcaccgccgaggtggaggtggtggagatgcacgagagcgacatcagcgcctacacctacgagaagaccctggtgatggagcagagaagccagatcctgaagcagatgcacctgaccaagaacgagagagagagagagatccagagcatcaccgacgagagcagaggcagcatcagaagaaagaaccccgccaacaccagactgagactgaacgtgcccgaggagaccgccggcgacagcgaggagaagcccgaggaggaggtgcagctgatccacgaccagagcgcccccagctgccccagcagcagccccagccccggcgaggagcccgagggcgagggcgagaccgaccccgagaaggtgcacctgacctggaccaaggacaagagcgtggccgagaagaacaagggccccagccccgtgagcagcgagggcatcaaggacttcttcagcatgaagcccgagtgggagaacctgaaccagagcaacgtgagaagaatgcacaccgccgtgagactgaacgaggtgatcgtgaagaagagcagagacgccaagctggtgctgctgaacatgcccggcccccccagaaacagaaacggcgacgagaactacatggagttcctggaggtgctgaccgagcacctggacagagtgatgctggtgagaggcggcggcagagaggtgatcaccatctacagctag

SEQ ID NO: 99367 - DNA, 858 bp, synthetic construct
  misc_feature 1..858: note = Description of Artificial Sequence: Synthetic coding sequence
  source 1..858: mol_type = other DNA
atgctgaacaacctgaccgactgcgaggacggcgacggcggcgccaaccccggcgacggcaaccccaaggagagcagccccttcatcaacagcaccgacaccgagaagggcaaggagtacgacggcaagaacatggccctgttcgaggaggagatggacaccagccccatggtgagcagcctgctgagcggcctggccaactacaccaacctgccccagggcagcagagagcacgaggaggccgagaacaacgagggcggcaagaagaagcccgtgcaggcccccagaatgggcaccttcatgggcgtgtacctgccctgcctgcagaacatcttcggcgtgatcctgttcctgagactgacctgggtggtgggcatcgccggcatcatggagagcttctgcatggtgttcatctgctgcagctgcaccatgctgaccgccatcagcatgagcgccatcgccaccaacggcgtggtgcccgccggcggcagctactacatgatcagcagaagcctgggccccgagttcggcggcgccgtgggcctgtgcttctacctgggcaccaccttcgccggcgccatgtacatcctgggcaccatcgagatcctgctggcctacctgttccccgccatggccatcttcaaggccgaggacgccagcggcgaggccgccgccatgctgaacaacatgagagtgtacggcacctgcgtgctgacctgcatggccaccgtggtgttcgtgggcgtgaagtacgtgaacaagttcgccctggtgttcctgggctgcgtgatcctgagcatcctggccatctacgccggcgtgatcaagagcgccttcgacccccccaacttcccctag

SEQ ID NO: 99368 - DNA, 3420 bp, synthetic construct
  misc_feature 1..3420: note = Description of Artificial Sequence: Synthetic coding sequence
  source 1..3420: mol_type = other DNA
atgagcagaagattcaccgtgaccagcctgccccccgccggccccgccagaagccccgaccccgagagcagaagacacagcgtggccgaccccagacacctgcccggcgaggacgtgaagggcgacggcaaccccaaggagagcagccccttcatcaacagcaccgacaccgagaagggcaaggagtacgacggcaagaacatggccctgttcgaggaggagatggacaccagccccatggtgagcagcctgctgagcggcctggccaactacaccaacctgccccagggcagcagagagcacgaggaggccgagaacaacgagggcggcaagaagaagcccgtgcaggcccccagaatgggcaccttcatgggcgtgtacctgccctgcctgcagaacatcttcggcgtgatcctgttcctgagactgacctgggtggtgggcatcgccggcatcatggagagcttctgcatggtgttcatctgctgcagctgcaccatgctgaccgccatcagcatgagcgccatcgccaccaacggcgtggtgcccgccggcggcagctactacatgatcagcagaagcctgggccccgagttcggcggcgccgtgggcctgtgcttctacctgggcaccaccttcgccggcgccatgtacatcctgggcaccatcgagatcctgctggcctacctgttccccgccatggccatcttcaaggccgaggacgccagcggcgaggccgccgccatgctgaacaacatgagagtgtacggcacctgcgtgctgacctgcatggccaccgtggtgttcgtgggcgtgaagtacgtgaacaagttcgccctggtgttcctgggctgcgtgatcctgagcatcctggccatctacgccggcgtgatcaagagcgccttcgacccccccaacttccccatctgcctgctgggcaacagaaccctgagcagacacggcttcgacgtgtgcgccaagctggcctgggagggcaacgagaccgtgaccaccagactgtggggcctgttctgcagcagcagattcctgaacgccacctgcgacgagtacttcaccagaaacaacgtgaccgagatccagggcatccccggcgccgccagcggcctgatcaaggagaacctgtggagcagctacctgaccaagggcgtgatcgtggagagaagcggcatgaccagcgtgggcctggccgacggcacccccatcgacatggaccacccctacgtgttcagcgacatgaccagctacttcaccctgctggtgggcatctacttccccagcgtgaccggcatcatggccggcagcaacagaagcggcgacctgagagacgcccagaagagcatccccaccggcaccatcctggccatcgccaccaccagcgccgtgtacatcagcagcgtggtgctgttcggcgcctgcatcgagggcgtggtgctgagagacaagttcggcgaggccgtgaacggcaacctggtggtgggcaccctggcctggcccagcccctgggtgatcgtgatcggcagcttcttcagcacctgcggcgccggcctgcagagcctgaccggcgcccccagactgctgcaggccatcagcagagacggcatcgtgcccttcctgcaggtgttcggccacggcaaggccaacggcgagcccacctgggccctgctgctgaccgcctgcatctgcgagatcggcatcctgatcgccagcctggacgaggtggcccccatcctgagcatgttcttcctgatgtgctacatgttcgtgaacctggcctgcgccgtgcagaccctgctgagaacccccaactggagacccagattcagatactaccactggaccctgagcttcctgggcatgagcctgtgcctggccctgatgttcatctgcagctggtactacgccctggtggccatgctgatcgccggcctgatctacaagtacatcgagtacagaggcgccgagaaggagtggggcgacggcatcagaggcctgagcctgagcgccgccagatacgccctgctgagactggaggagggccccccccacaccaagaactggagaccccagctgctggtgctggtgagagtggaccaggaccagaacgtggtgcacccccagctgctgagcctgaccagccagctgaaggccggcaagggcctgaccatcgtgggcagcgtgctggagggcaccttcctggagaaccacccccaggcccagagagccgaggagagcatcagaagactgatggaggccgagaaggtgaagggcttctgccaggtggtgatcagcagcaacctgagagacggcgtgagccacctgatccagagcggcggcctgggcggcctgcagcacaacaccgtgctggtgggctggcccagaaactggagacagaaggaggaccaccagacctggagaaacttcatcgagctggtgagagagaccaccgccggccacctggccctgctggtgaccaagaacgtgagcatgttccccggcaaccccgagagattcagcgagggcagcatcgacgtgtggtggatcgtgcacgacggcggcatgctgatgctgctgcccttcctgctgagacaccacaaggtgtggagaaagtgcaagatgagaatcttcaccgtggcccagatggacgacaacagcatccagatgaagaaggacctgaccaccttcctgtaccacctgagaatcaccgccgaggtggaggtggtggagatgcacgagagcgacatcagcgcctacacctacgagaagaccctggtgatggagcagagaagccagatcctgaagcagatgcacctgaccaagaacgagagagagagagagatccagagcatcaccgacgagagcagaggcagcatcagaagaaagaaccccgccaacaccagactgagactgaacgtgcccgaggagaccgccggcgacagcgaggagaagcccgaggaggaggtgcagctgatccacgaccagagcgcccccagctgccccagcagcagccccagccccggcgaggagcccgagggcgagggcgagaccgaccccgagaaggtgcacctgacctggaccaaggacaagagcgtggccgagaagaacaagggccccagccccgtgagcagcgagggcatcaaggacttcttcagcatgaagcccgagtgggagaacctgaaccagagcaacgtgagaagaatgcacaccgccgtgagactgaacgaggtgatcgtgaagaagagcagagacgccaagctggtgctgctgaacatgcccggcccccccagaaacagaaacggcgacgagaactacatggagttcctggaggtgctgaccgagcacctggacagagtgatgctggtgagaggcggcggcagagaggtgatcaccatctacagctag

SEQ ID NO: 99369 - DNA, 561 bp, synthetic construct
  misc_feature 1..561: note = Description of Artificial Sequence: Synthetic coding sequence
  source 1..561: mol_type = other DNA
atgctgaacaacctgaccgactgcgaggacggcgacggcggcgccaaccccggcgacggcaaccccaaggagagcagccccttcatcaacagcaccgacaccgagaagggcaaggagtacgacggcaagaacatggccctgttcgaggaggagatggacaccagccccatggtgagcagcctgctgagcggcctggccaactacaccaacctgccccagggcagcagagagcacgaggaggccgagaacaacgagggcggcaagaagaagcccgtgcaggcccccagaatgggcaccttcatgggcgtgtacctgccctgcctgcagaacatcttcggcgtgatcctgttcctgagactgacctgggtggtgggcatcgccggcatcatggagagcttctgcatggtgttcatctgctgcagctgcaccatgctgaccgccatcagcatgagcgccatcgccaccaacggcgtggtgcccgccggcggcagctactacatgatcagcagaagcctggccatggccagacccatggagagcagacccggcccctgcagctag

SEQ ID NO: 99370 - DNA, 3258 bp, synthetic construct
  misc_feature 1..3258: note = Description of Artificial Sequence: Synthetic coding sequence
  source 1..3258: mol_type = other DNA
atgccccacttcaccgtggtgcccgtggacggccccagaagaggcgactacgacaacctggagggcctgagctgggtggactacggcgagagagccgagctggacgacagcgacggccacggcaaccacagagagagcagccccttcctgagccccctggaggccagcagaggcatcgactactacgacagaaacctggccctgttcgaggaggagctggacatcagacccaaggtgagcagcctgctgggcaagctggtgagctacaccaacctgacccagggcgccaaggagcacgaggaggccgagagcggcgagggcaccagaagaagagccgccgaggcccccagcatgggcaccctgatgggcgtgtacctgccctgcctgcagaacatcttcggcgtgatcctgttcctgagactgacctggatggtgggcaccgccggcgtgctgcaggccctgctgatcgtgctgatctgctgctgctgcaccctgctgaccgccatcagcatgagcgccatcgccaccaacggcgtggtgcccgccggcggcagctacttcatgatcagcagaagcctgggccccgagttcggcggcgccgtgggcctgtgcttctacctgggcaccaccttcgccgccgccatgtacatcctgggcgccatcgagatcctgctgacctacatcgccccccccgccgccatcttctaccccagcggcgcccacgacaccagcaacgccaccctgaacaacatgagagtgtacggcaccatcttcctgaccttcatgaccctggtggtgttcgtgggcgtgaagtacgtgaacaagttcgccagcctgttcctggcctgcgtgatcatcagcatcctgagcatctacgccggcggcatcaagagcatcttcgacccccccgtgttccccgtgtgcatgctgggcaacagaaccctgagcagagaccagttcgacatctgcgccaagaccgccgtggtggacaacgagaccgtggccacccagctgtggagcttcttctgccacagccccaacctgaccaccgacagctgcgacccctacttcatgctgaacaacgtgaccgagatccccggcatccccggcgccgccgccggcgtgctgcaggagaacctgtggagcgcctacctggagaagggcgacatcgtggagaagcacggcctgcccagcgccgacgcccccagcctgaaggagagcctgcccctgtacgtggtggccgacatcgccaccagcttcaccgtgctggtgggcatcttcttccccagcgtgaccggcatcatggccggcagcaacagaagcggcgacctgagagacgcccagaagagcatccccgtgggcaccatcctggccatcatcaccaccagcctggtgtacttcagcagcgtggtgctgttcggcgcctgcatcgagggcgtggtgctgagagacaagtacggcgacggcgtgagcagaaacctggtggtgggcaccctggcctggcccagcccctgggtgatcgtgatcggcagcttcttcagcacctgcggcgccggcctgcagagcctgaccggcgcccccagactgctgcaggccatcgccaaggacaacatcatccccttcctgagagtgttcggccacggcaaggtgaacggcgagcccacctgggccctgctgctgaccgccctgatcgccgagctgggcatcctgatcgccagcctggacatggtggcccccatcctgagcatgttcttcctgatgtgctacctgttcgtgaacctggcctgcgccgtgcagaccctgctgagaacccccaactggagacccagattcaagtactaccactgggccctgagcttcctgggcatgagcctgtgcctggccctgatgttcgtgagcagctggtactacgccctggtggccatgctgatcgccggcatgatctacaagtacatcgagtaccagggcgccgagaaggagtggggcgacggcatcagaggcctgagcctgagcgccgccagatacgccctgctgagactggaggagggccccccccacaccaagaactggagaccccagctgctggtgctgctgaagctggacgaggacctgcacgtgaagtaccccagactgctgaccttcgccagccagctgaaggccggcaagggcctgaccatcgtgggcagcgtgatccagggcagcttcctggagagctacggcgaggcccaggccgccgagcagaccatcaagaacatgatggagatcgagaaggtgaagggcttctgccaggtggtggtggccagcaaggtgagagagggcctggcccacctgatccagagctgcggcctgggcggcatgagacacaacagcgtggtgctgggctggccctacggctggagacagagcgaggaccccagagcctggaagaccttcatcgacaccgtgagatgcaccaccgccgcccacctggccctgctggtgcccaagaacatcgccttctaccccagcaaccacgagagatacctggagggccacatcgacgtgtggtggatcgtgcacgacggcggcatgctgatgctgctgcccttcctgctgagacagcacaaggtgtggagaaagtgcagaatgagaatcttcaccgtggcccagatggacgacaacagcatccagatgaagaaggacctggccgtgttcctgtaccacctgagactggaggccgaggtggaggtggtggagatgcacaacagcgacatcagcgcctacacctacgagagaaccctgatgatggagcagagaagccagatgctgagacagatgagactgaccaagaccgagagagagagagaggcccagctggtgaaggacagacacagcgccctgagactggagagcctgtacagcgacgaggaggacgagagcgccgtgggcgccgacaagatccagatgacctggaccagagacaagtacatgaccgagacctgggaccccagccacgcccccgacaacttcagagagctggtgcacatcaagcccgaccagagcaacgtgagaagaatgcacaccgccgtgaagctgaacgaggtgatcgtgaccagaagccacgacgccagactggtgctgctgaacatgcccggcccccccagaaacagcgagggcgacgagaactacatggagttcctggaggtgctgaccgagggcctggagagagtgctgctggtgagaggcggcggcagagaggtgatcaccatctacagctag

SEQ ID NO: 99371 - DNA, 2343 bp, synthetic construct
  misc_feature 1..2343: note = Description of Artificial Sequence: Synthetic coding sequence
  source 1..2343: mol_type = other DNA
atgccccacttcaccgtggtgcccgtggacggccccagaagaggcgactacgacaacctggagggcctgagctgggtggactacggcgagagagccgagctggacgacagcgacggccacggcaaccacagagagagcagccccttcctgagccccctggaggccagcagaggcatcgactactacgacagaaacctggccctgttcgaggaggagctggacatcagacccaaggtgagcagcctgctgggcaagctggtgagctacaccaacctgacccagggcgccaaggagcacgaggaggccgagagcggcgagggcaccagaagaagagccgccgaggcccccagcatgggcaccctgatgggcgtgtacctgccctgcctgcagaacatcttcggcgtgatcctgttcctgagactgacctggatggtgggcaccgccggcgtgctgcaggccctgctgatcgtgctgatctgctgctgctgcaccctgctgaccgccatcagcatgagcgccatcgccaccaacggcgtggtgcccgccggcggcagctacttcatgatcagcagaagcctgggccccgagttcggcggcgccgtgggcctgtgcttctacctgggcaccaccttcgccgccgccatgtacatcctgggcgccatcgagatcctgctgacctacatcgccccccccgccgccatcttctaccccagcggcgcccacgacaccagcaacgccaccctgaacaacatgagagtgtacggcaccatcttcctgaccttcatgaccctggtggtgttcgtgggcgtgaagtacgtgaacaagttcgccagcctgttcctggcctgcgtgatcatcagcatcctgagcatctacgccggcggcatcaagagcatcttcgacccccccgtgttccccgtgtgcatgctgggcaacagaaccctgagcagagaccagttcgacatctgcgccaagaccgccgtggtggacaacgagaccgtggccacccagctgtggagcttcttctgccacagccccaacctgaccaccgacagctgcgacccctacttcatgctgaacaacgtgaccgagatccccggcatccccggcgccgccgccggcgtgctgcaggagaacctgtggagcgcctacctggagaagggcgacatcgtggagaagcacggcctgcccagcgccgacgcccccagcctgaaggagagcctgcccctgtacgtggtggccgacatcgccaccagcttcaccgtgctggtgggcatcttcttccccagcgtgaccggcatcatggccggcagcaacagaagcggcgacctgagagacgcccagaagagcatccccgtgggcaccatcctggccatcatcaccaccagcctggtgtacttcagcagcgtggtgctgttcggcgcctgcatcgagggcgtggtgctgagagacaagtacggcgacggcgtgagcagaaacctggtggtgggcaccctggcctggcccagcccctgggtgatcgtgatcggcagcttcttcagcacctgcggcgccggcctgcagagcctgaccggcgcccccagactgctgcaggccatcgccaaggacaacatcatccccttcctgagagtgttcggccacggcaaggtgaacggcgagcccacctgggccctgctgctgaccgccctgatcgccgagctgggcatcctgatcgccagcctggacatggtggcccccatcctgagcatgttcttcctgatgtgctacctgttcgtgaacctggcctgcgccgtgcagaccctgctgagaacccccaactggagacccagattcaagtactaccactgggccctgagcttcctgggcatgagcctgtgcctggccctgatgttcgtgagcagctggtactacgccctggtggccatgctgatcgccggcatgatctacaagtacatcgagtaccagggcgccgagaaggagtggggcgacggcatcagaggcctgagcctgagcgccgccagatacgccctgctgagactggaggagggccccccccacaccaagaactggagaccccagctgctggtgctgctgaagctggacgaggacctgcacgtgaagtaccccagactgctgaccttcgccagccagctgaaggccggcaagggcctgaccatcgtgggcagcgtgatccagggcagcttcctggagagctacggcgaggcccaggccgccgagcagaccccctgcgccgccctgagactgcccacctggccctgcagctgccccagaaccagccccagcacccccgccaccaccagcgccacctggagagccacctag

SEQ ID NO: 99372 - DNA, 3264 bp, synthetic construct
  misc_feature 1..3264: note = Description of Artificial Sequence: Synthetic coding sequence
  source 1..3264: mol_type = other DNA
atgagagccggcggcgcctgcagacccggcgccgccggcaccgccgccggcaccgccgccggcggctgggacggcggctgcggcggcgccgagcccgccagatgcctgaccagcccctggtgccagtggaccggcagaggcgccgccaccatgaccaccagcagaggcagcgtgggctggaccaccggcagcgcccccagctggatgaccagaaccgaggagctggacatcagacccaaggtgagcagcctgctgggcaagctggtgagctacaccaacctgacccagggcgccaaggagcacgaggaggccgagagcggcgagggcaccagaagaagagccgccgaggcccccagcatgggcaccctgatgggcgtgtacctgccctgcctgcagaacatcttcggcgtgatcctgttcctgagactgacctggatggtgggcaccgccggcgtgctgcaggccctgctgatcgtgctgatctgctgctgctgcaccctgctgaccgccatcagcatgagcgccatcgccaccaacggcgtggtgcccgccggcggcagctacttcatgatcagcagaagcctgggccccgagttcggcggcgccgtgggcctgtgcttctacctgggcaccaccttcgccgccgccatgtacatcctgggcgccatcgagatcctgctgacctacatcgccccccccgccgccatcttctaccccagcggcgcccacgacaccagcaacgccaccctgaacaacatgagagtgtacggcaccatcttcctgaccttcatgaccctggtggtgttcgtgggcgtgaagtacgtgaacaagttcgccagcctgttcctggcctgcgtgatcatcagcatcctgagcatctacgccggcggcatcaagagcatcttcgacccccccgtgttccccgtgtgcatgctgggcaacagaaccctgagcagagaccagttcgacatctgcgccaagaccgccgtggtggacaacgagaccgtggccacccagctgtggagcttcttctgccacagccccaacctgaccaccgacagctgcgacccctacttcatgctgaacaacgtgaccgagatccccggcatccccggcgccgccgccggcgtgctgcaggagaacctgtggagcgcctacctggagaagggcgacatcgtggagaagcacggcctgcccagcgccgacgcccccagcctgaaggagagcctgcccctgtacgtggtggccgacatcgccaccagcttcaccgtgctggtgggcatcttcttccccagcgtgaccggcatcatggccggcagcaacagaagcggcgacctgagagacgcccagaagagcatccccgtgggcaccatcctggccatcatcaccaccagcctggtgtacttcagcagcgtggtgctgttcggcgcctgcatcgagggcgtggtgctgagagacaagtacggcgacggcgtgagcagaaacctggtggtgggcaccctggcctggcccagcccctgggtgatcgtgatcggcagcttcttcagcacctgcggcgccggcctgcagagcctgaccggcgcccccagactgctgcaggccatcgccaaggacaacatcatccccttcctgagagtgttcggccacggcaaggtgaacggcgagcccacctgggccctgctgctgaccgccctgatcgccgagctgggcatcctgatcgccagcctggacatggtggcccccatcctgagcatgttcttcctgatgtgctacctgttcgtgaacctggcctgcgccgtgcagaccctgctgagaacccccaactggagacccagattcaagtactaccactgggccctgagcttcctgggcatgagcctgtgcctggccctgatgttcgtgagcagctggtactacgccctggtggccatgctgatcgccggcatgatctacaagtacatcgagtaccagggcgccgagaaggagtggggcgacggcatcagaggcctgagcctgagcgccgccagatacgccctgctgagactggaggagggccccccccacaccaagaactggagaccccagctgctggtgctgctgaagctggacgaggacctgcacgtgaagtaccccagactgctgaccttcgccagccagctgaaggccggcaagggcctgaccatcgtgggcagcgtgatccagggcagcttcctggagagctacggcgaggcccaggccgccgagcagaccatcaagaacatgatggagatcgagaaggtgaagggcttctgccaggtggtggtggccagcaaggtgagagagggcctggcccacctgatccagagctgcggcctgggcggcatgagacacaacagcgtggtgctgggctggccctacggctggagacagagcgaggaccccagagcctggaagaccttcatcgacaccgtgagatgcaccaccgccgcccacctggccctgctggtgcccaagaacatcgccttctaccccagcaaccacgagagatacctggagggccacatcgacgtgtggtggatcgtgcacgacggcggcatgctgatgctgctgcccttcctgctgagacagcacaaggtgtggagaaagtgcagaatgagaatcttcaccgtggcccagatggacgacaacagcatccagatgaagaaggacctggccgtgttcctgtaccacctgagactggaggccgaggtggaggtggtggagatgcacaacagcgacatcagcgcctacacctacgagagaaccctgatgatggagcagagaagccagatgctgagacagatgagactgaccaagaccgagagagagagagaggcccagctggtgaaggacagacacagcgccctgagactggagagcctgtacagcgacgaggaggacgagagcgccgtgggcgccgacaagatccagatgacctggaccagagacaagtacatgaccgagacctgggaccccagccacgcccccgacaacttcagagagctggtgcacatcaagcccgaccagagcaacgtgagaagaatgcacaccgccgtgaagctgaacgaggtgatcgtgaccagaagccacgacgccagactggtgctgctgaacatgcccggcccccccagaaacagcgagggcgacgagaactacatggagttcctggaggtgctgaccgagggcctggagagagtgctgctggtgagaggcggcggcagagaggtgatcaccatctacagctag

SEQ ID NO: 99373 - DNA, 3240 bp, synthetic construct
  misc_feature 1..3240: note = Description of Artificial Sequence: Synthetic coding sequence
  source 1..3240: mol_type = other DNA
atggccgccgagggcgccgtgtgcggcttcgtgtacctggagggcaccgcctgggccgtgcccgaggacaccgagcccctggccagctgcaccctgggccacggcaaccacagagagagcagccccttcctgagccccctggaggccagcagaggcatcgactactacgacagaaacctggccctgttcgaggaggagctggacatcagacccaaggtgagcagcctgctgggcaagctggtgagctacaccaacctgacccagggcgccaaggagcacgaggaggccgagagcggcgagggcaccagaagaagagccgccgaggcccccagcatgggcaccctgatgggcgtgtacctgccctgcctgcagaacatcttcggcgtgatcctgttcctgagactgacctggatggtgggcaccgccggcgtgctgcaggccctgctgatcgtgctgatctgctgctgctgcaccctgctgaccgccatcagcatgagcgccatcgccaccaacggcgtggtgcccgccggcggcagctacttcatgatcagcagaagcctgggccccgagttcggcggcgccgtgggcctgtgcttctacctgggcaccaccttcgccgccgccatgtacatcctgggcgccatcgagatcctgctgacctacatcgccccccccgccgccatcttctaccccagcggcgcccacgacaccagcaacgccaccctgaacaacatgagagtgtacggcaccatcttcctgaccttcatgaccctggtggtgttcgtgggcgtgaagtacgtgaacaagttcgccagcctgttcctggcctgcgtgatcatcagcatcctgagcatctacgccggcggcatcaagagcatcttcgacccccccgtgttccccgtgtgcatgctgggcaacagaaccctgagcagagaccagttcgacatctgcgccaagaccgccgtggtggacaacgagaccgtggccacccagctgtggagcttcttctgccacagccccaacctgaccaccgacagctgcgacccctacttcatgctgaacaacgtgaccgagatccccggcatccccggcgccgccgccggcgtgctgcaggagaacctgtggagcgcctacctggagaagggcgacatcgtggagaagcacggcctgcccagcgccgacgcccccagcctgaaggagagcctgcccctgtacgtggtggccgacatcgccaccagcttcaccgtgctggtgggcatcttcttccccagcgtgaccggcatcatggccggcagcaacagaagcggcgacctgagagacgcccagaagagcatccccgtgggcaccatcctggccatcatcaccaccagcctggtgtacttcagcagcgtggtgctgttcggcgcctgcatcgagggcgtggtgctgagagacaagtacggcgacggcgtgagcagaaacctggtggtgggcaccctggcctggcccagcccctgggtgatcgtgatcggcagcttcttcagcacctgcggcgccggcctgcagagcctgaccggcgcccccagactgctgcaggccatcgccaaggacaacatcatccccttcctgagagtgttcggccacggcaaggtgaacggcgagcccacctgggccctgctgctgaccgccctgatcgccgagctgggcatcctgatcgccagcctggacatggtggcccccatcctgagcatgttcttcctgatgtgctacctgttcgtgaacctggcctgcgccgtgcagaccctgctgagaacccccaactggagacccagattcaagtactaccactgggccctgagcttcctgggcatgagcctgtgcctggccctgatgttcgtgagcagctggtactacgccctggtggccatgctgatcgccggcatgatctacaagtacatcgagtaccagggcgccgagaaggagtggggcgacggcatcagaggcctgagcctgagcgccgccagatacgccctgctgagactggaggagggccccccccacaccaagaactggagaccccagctgctggtgctgctgaagctggacgaggacctgcacgtgaagtaccccagactgctgaccttcgccagccagctgaaggccggcaagggcctgaccatcgtgggcagcgtgatccagggcagcttcctggagagctacggcgaggcccaggccgccgagcagaccatcaagaacatgatggagatcgagaaggtgaagggcttctgccaggtggtggtggccagcaaggtgagagagggcctggcccacctgatccagagctgcggcctgggcggcatgagacacaacagcgtggtgctgggctggccctacggctggagacagagcgaggaccccagagcctggaagaccttcatcgacaccgtgagatgcaccaccgccgcccacctggccctgctggtgcccaagaacatcgccttctaccccagcaaccacgagagatacctggagggccacatcgacgtgtggtggatcgtgcacgacggcggcatgctgatgctgctgcccttcctgctgagacagcacaaggtgtggagaaagtgcagaatgagaatcttcaccgtggcccagatggacgacaacagcatccagatgaagaaggacctggccgtgttcctgtaccacctgagactggaggccgaggtggaggtggtggagatgcacaacagcgacatcagcgcctacacctacgagagaaccctgatgatggagcagagaagccagatgctgagacagatgagactgaccaagaccgagagagagagagaggcccagctggtgaaggacagacacagcgccctgagactggagagcctgtacagcgacgaggaggacgagagcgccgtgggcgccgacaagatccagatgacctggaccagagacaagtacatgaccgagacctgggaccccagccacgcccccgacaacttcagagagctggtgcacatcaagcccgaccagagcaacgtgagaagaatgcacaccgccgtgaagctgaacgaggtgatcgtgaccagaagccacgacgccagactggtgctgctgaacatgcccggcccccccagaaacagcgagggcgacgagaactacatggagttcctggaggtgctgaccgagggcctggagagagtgctgctggtgagaggcggcggcagagaggtgatcaccatctacagctag

SEQ ID NO: 99374 - DNA, 3165 bp, synthetic construct
  misc_feature 1..3165: note = Description of Artificial Sequence: Synthetic coding sequence
  source 1..3165: mol_type = other DNA
atgggcgacaccctgagccccggccacggcaaccacagagagagcagccccttcctgagccccctggaggccagcagaggcatcgactactacgacagaaacctggccctgttcgaggaggagctggacatcagacccaaggtgagcagcctgctgggcaagctggtgagctacaccaacctgacccagggcgccaaggagcacgaggaggccgagagcggcgagggcaccagaagaagagccgccgaggcccccagcatgggcaccctgatgggcgtgtacctgccctgcctgcagaacatcttcggcgtgatcctgttcctgagactgacctggatggtgggcaccgccggcgtgctgcaggccctgctgatcgtgctgatctgctgctgctgcaccctgctgaccgccatcagcatgagcgccatcgccaccaacggcgtggtgcccgccggcggcagctacttcatgatcagcagaagcctgggccccgagttcggcggcgccgtgggcctgtgcttctacctgggcaccaccttcgccgccgccatgtacatcctgggcgccatcgagatcctgctgacctacatcgccccccccgccgccatcttctaccccagcggcgcccacgacaccagcaacgccaccctgaacaacatgagagtgtacggcaccatcttcctgaccttcatgaccctggtggtgttcgtgggcgtgaagtacgtgaacaagttcgccagcctgttcctggcctgcgtgatcatcagcatcctgagcatctacgccggcggcatcaagagcatcttcgacccccccgtgttccccgtgtgcatgctgggcaacagaaccctgagcagagaccagttcgacatctgcgccaagaccgccgtggtggacaacgagaccgtggccacccagctgtggagcttcttctgccacagccccaacctgaccaccgacagctgcgacccctacttcatgctgaacaacgtgaccgagatccccggcatccccggcgccgccgccggcgtgctgcaggagaacctgtggagcgcctacctggagaagggcgacatcgtggagaagcacggcctgcccagcgccgacgcccccagcctgaaggagagcctgcccctgtacgtggtggccgacatcgccaccagcttcaccgtgctggtgggcatcttcttccccagcgtgaccggcatcatggccggcagcaacagaagcggcgacctgagagacgcccagaagagcatccccgtgggcaccatcctggccatcatcaccaccagcctggtgtacttcagcagcgtggtgctgttcggcgcctgcatcgagggcgtggtgctgagagacaagtacggcgacggcgtgagcagaaacctggtggtgggcaccctggcctggcccagcccctgggtgatcgtgatcggcagcttcttcagcacctgcggcgccggcctgcagagcctgaccggcgcccccagactgctgcaggccatcgccaaggacaacatcatccccttcctgagagtgttcggccacggcaaggtgaacggcgagcccacctgggccctgctgctgaccgccctgatcgccgagctgggcatcctgatcgccagcctggacatggtggcccccatcctgagcatgttcttcctgatgtgctacctgttcgtgaacctggcctgcgccgtgcagaccctgctgagaacccccaactggagacccagattcaagtactaccactgggccctgagcttcctgggcatgagcctgtgcctggccctgatgttcgtgagcagctggtactacgccctggtggccatgctgatcgccggcatgatctacaagtacatcgagtaccagggcgccgagaaggagtggggcgacggcatcagaggcctgagcctgagcgccgccagatacgccctgctgagactggaggagggccccccccacaccaagaactggagaccccagctgctggtgctgctgaagctggacgaggacctgcacgtgaagtaccccagactgctgaccttcgccagccagctgaaggccggcaagggcctgaccatcgtgggcagcgtgatccagggcagcttcctggagagctacggcgaggcccaggccgccgagcagaccatcaagaacatgatggagatcgagaaggtgaagggcttctgccaggtggtggtggccagcaaggtgagagagggcctggcccacctgatccagagctgcggcctgggcggcatgagacacaacagcgtggtgctgggctggccctacggctggagacagagcgaggaccccagagcctggaagaccttcatcgacaccgtgagatgcaccaccgccgcccacctggccctgctggtgcccaagaacatcgccttctaccccagcaaccacgagagatacctggagggccacatcgacgtgtggtggatcgtgcacgacggcggcatgctgatgctgctgcccttcctgctgagacagcacaaggtgtggagaaagtgcagaatgagaatcttcaccgtggcccagatggacgacaacagcatccagatgaagaaggacctggccgtgttcctgtaccacctgagactggaggccgaggtggaggtggtggagatgcacaacagcgacatcagcgcctacacctacgagagaaccctgatgatggagcagagaagccagatgctgagacagatgagactgaccaagaccgagagagagagagaggcccagctggtgaaggacagacacagcgccctgagactggagagcctgtacagcgacgaggaggacgagagcgccgtgggcgccgacaagatccagatgacctggaccagagacaagtacatgaccgagacctgggaccccagccacgcccccgacaacttcagagagctggtgcacatcaagcccgaccagagcaacgtgagaagaatgcacaccgccgtgaagctgaacgaggtgatcgtgaccagaagccacgacgccagactggtgctgctgaacatgcccggcccccccagaaacagcgagggcgacgagaactacatggagttcctggaggtgctgaccgagggcctggagagagtgctgctggtgagaggcggcggcagagaggtgatcaccatctacagctag

SEQ ID NO: 99375 - DNA, 3300 bp, synthetic construct
  misc_feature 1..3300: note = Description of Artificial Sequence: Synthetic coding sequence
  source 1..3300: mol_type = other DNA
atgccccacttcaccgtgaccaaggtggaggaccccgaggagggcgccgccgccagcatcagccaggagcccagcctggccgacatcaaggccagaatccaggacagcgacgagcccgacctgagccagaacagcatcaccggcgagcacagccagctgctggacgacggccacaagaaggccagaaacgcctacctgaacaacagcaactacgaggagggcgacgagtacttcgacaagaacctggccctgttcgaggaggagatggacaccagacccaaggtgagcagcctgctgaacagaatggccaactacaccaacctgacccagggcgccaaggagcacgaggaggccgagaacatcaccgagggcaagaagaagcccaccaagaccccccagatgggcaccttcatgggcgtgtacctgccctgcctgcagaacatcttcggcgtgatcctgttcctgagactgacctgggtggtgggcaccgccggcgtgctgcaggccttcgccatcgtgctgatctgctgctgctgcaccatgctgaccgccatcagcatgagcgccatcgccaccaacggcgtggtgcccgccggcggcagctacttcatgatcagcagagccctgggccccgagttcggcggcgccgtgggcctgtgcttctacctgggcaccaccttcgccgccgccatgtacatcctgggcgccatcgagatcttcctggtgtacatcgtgcccagagccgccatcttccacagcgacgacgccctgaaggagagcgccgccatgctgaacaacatgagagtgtacggcaccgccttcctggtgctgatggtgctggtggtgttcatcggcgtgagatacgtgaacaagttcgccagcctgttcctggcctgcgtgatcgtgagcatcctggccatctacgccggcgccatcaagagcagcttcgcccccccccacttccccgtgtgcatgctgggcaacagaaccctgagcagcagacacatcgacgtgtgcagcaagaccaaggagatcaacaacatgaccgtgcccagcaagctgtggggcttcttctgcaacagcagccagttcttcaacgccacctgcgacgagtacttcgtgcacaacaacgtgaccagcatccagggcatccccggcctggccagcggcatcatcaccgagaacctgtggagcaactacctgcccaagggcgagatcatcgagaagcccagcgccaagagcagcgacgtgctgggcagcctgaaccacgagtacgtgctggtggacatcaccaccagcttcaccctgctggtgggcatcttcttccccagcgtgaccggcatcatggccggcagcaacagaagcggcgacctgaaggacgcccagaagagcatccccatcggcaccatcctggccatcctgaccaccagcttcgtgtacctgagcaacgtggtgctgttcggcgcctgcatcgagggcgtggtgctgagagacaagttcggcgacgccgtgaagggcaacctggtggtgggcaccctgagctggcccagcccctgggtgatcgtgatcggcagcttcttcagcacctgcggcgccggcctgcagagcctgaccggcgcccccagactgctgcaggccatcgccaaggacaacatcatccccttcctgagagtgttcggccacagcaaggccaacggcgagcccacctgggccctgctgctgaccgccgccatcgccgagctgggcatcctgatcgccagcctggacctggtggcccccatcctgagcatgttcttcctgatgtgctacctgttcgtgaacctggcctgcgccctgcagaccctgctgagaacccccaactggagacccagattcagatactaccactgggccctgagcttcatgggcatgagcatctgcctggccctgatgttcatcagcagctggtactacgccatcgtggccatggtgatcgccggcatgatctacaagtacatcgagtaccagggcgccgagaaggagtggggcgacggcatcagaggcctgagcctgagcgccgccagattcgccctgctgagactggaggagggccccccccacaccaagaactggagaccccagctgctggtgctgctgaagctggacgaggacctgcacgtgaagcaccccagactgctgaccttcgccagccagctgaaggccggcaagggcctgaccatcgtgggcagcgtgatcgtgggcaacttcctggagaactacggcgaggccctggccgccgagcagaccatcaagcacctgatggaggccgagaaggtgaagggcttctgccagctggtggtggccgccaagctgagagagggcatcagccacctgatccagagctgcggcctgggcggcatgaagcacaacaccgtggtgatgggctggcccaacggctggagacagagcgaggacgccagagcctggaagaccttcatcggcaccgtgagagtgaccaccgccgcccacctggccctgctggtggccaagaacatcagcttcttccccagcaacgtggagcagttcagcgagggcaacatcgacgtgtggtggatcgtgcacgacggcggcatgctgatgctgctgcccttcctgctgaagcagcacaaggtgtggagaaagtgcagcatcagaatcttcaccgtggcccagctggaggacaacagcatccagatgaagaaggacctggccaccttcctgtaccacctgagaatcgaggccgaggtggaggtggtggagatgcacgacagcgacatcagcgcctacacctacgagagaaccctgatgatggagcagagaagccagatgctgagacacatgagactgagcaagaccgagagagacagagaggcccagctggtgaaggacagaaacagcatgctgagactgaccagcatcggcagcgacgaggacgaggagaccgagacctaccaggagaaggtgcacatgacctggaccaaggacaagtacatggccagcagaggccagaaggccaagagcatggagggcttccaggacctgctgaacatgagacccgaccagagcaacgtgagaagaatgcacaccgccgtgaagctgaacgaggtgatcgtgaacaagagccacgaggccaagctggtgctgctgaacatgcccggcccccccagaaaccccgagggcgacgagaactacatggagttcctggaggtgctgaccgagggcctggagagagtgctgctggtgagaggcggcggcagcgaggtgatcaccatctacagctag

SEQ ID NO: 99376 - DNA, 3453 bp, synthetic construct
  misc_feature 1..3453: note = Description of Artificial Sequence: Synthetic coding sequence
  source 1..3453: mol_type = other DNA
atgcacccccccgagaccaccaccaagatggccagcgtgagattcatggtgacccccaccaagatcgacgacatccccggcctgagcgacaccagccccgacctgagcagcagaagcagcagcagagtgagattcagcagcagagagagcgtgcccgagaccagcagaagcgagcccatgagcgagatgagcggcgccaccaccagcctggccaccgtggccctggacccccccagcgacagaaccagccacccccaggacgtgatcgaggacctgagccagaacagcatcaccggcgagcacagccagctgctggacgacggccacaagaaggccagaaacgcctacctgaacaacagcaactacgaggagggcgacgagtacttcgacaagaacctggccctgttcgaggaggagatggacaccagacccaaggtgagcagcctgctgaacagaatggccaactacaccaacctgacccagggcgccaaggagcacgaggaggccgagaacatcaccgagggcaagaagaagcccaccaagaccccccagatgggcaccttcatgggcgtgtacctgccctgcctgcagaacatcttcggcgtgatcctgttcctgagactgacctgggtggtgggcaccgccggcgtgctgcaggccttcgccatcgtgctgatctgctgctgctgcaccatgctgaccgccatcagcatgagcgccatcgccaccaacggcgtggtgcccgccggcggcagctacttcatgatcagcagagccctgggccccgagttcggcggcgccgtgggcctgtgcttctacctgggcaccaccttcgccgccgccatgtacatcctgggcgccatcgagatcttcctggtgtacatcgtgcccagagccgccatcttccacagcgacgacgccctgaaggagagcgccgccatgctgaacaacatgagagtgtacggcaccgccttcctggtgctgatggtgctggtggtgttcatcggcgtgagatacgtgaacaagttcgccagcctgttcctggcctgcgtgatcgtgagcatcctggccatctacgccggcgccatcaagagcagcttcgcccccccccacttccccgtgtgcatgctgggcaacagaaccctgagcagcagacacatcgacgtgtgcagcaagaccaaggagatcaacaacatgaccgtgcccagcaagctgtggggcttcttctgcaacagcagccagttcttcaacgccacctgcgacgagtacttcgtgcacaacaacgtgaccagcatccagggcatccccggcctggccagcggcatcatcaccgagaacctgtggagcaactacctgcccaagggcgagatcatcgagaagcccagcgccaagagcagcgacgtgctgggcagcctgaaccacgagtacgtgctggtggacatcaccaccagcttcaccctgctggtgggcatcttcttccccagcgtgaccggcatcatggccggcagcaacagaagcggcgacctgaaggacgcccagaagagcatccccatcggcaccatcctggccatcctgaccaccagcttcgtgtacctgagcaacgtggtgctgttcggcgcctgcatcgagggcgtggtgctgagagacaagttcggcgacgccgtgaagggcaacctggtggtgggcaccctgagctggcccagcccctgggtgatcgtgatcggcagcttcttcagcacctgcggcgccggcctgcagagcctgaccggcgcccccagactgctgcaggccatcgccaaggacaacatcatccccttcctgagagtgttcggccacagcaaggccaacggcgagcccacctgggccctgctgctgaccgccgccatcgccgagctgggcatcctgatcgccagcctggacctggtggcccccatcctgagcatgttcttcctgatgtgctacctgttcgtgaacctggcctgcgccctgcagaccctgctgagaacccccaactggagacccagattcagatactaccactgggccctgagcttcatgggcatgagcatctgcctggccctgatgttcatcagcagctggtactacgccatcgtggccatggtgatcgccggcatgatctacaagtacatcgagtaccagggcgccgagaaggagtggggcgacggcatcagaggcctgagcctgagcgccgccagattcgccctgctgagactggaggagggccccccccacaccaagaactggagaccccagctgctggtgctgctgaagctggacgaggacctgcacgtgaagcaccccagactgctgaccttcgccagccagctgaaggccggcaagggcctgaccatcgtgggcagcgtgatcgtgggcaacttcctggagaactacggcgaggccctggccgccgagcagaccatcaagcacctgatggaggccgagaaggtgaagggcttctgccagctggtggtggccgccaagctgagagagggcatcagccacctgatccagagctgcggcctgggcggcatgaagcacaacaccgtggtgatgggctggcccaacggctggagacagagcgaggacgccagagcctggaagaccttcatcggcaccgtgagagtgaccaccgccgcccacctggccctgctggtggccaagaacatcagcttcttccccagcaacgtggagcagttcagcgagggcaacatcgacgtgtggtggatcgtgcacgacggcggcatgctgatgctgctgcccttcctgctgaagcagcacaaggtgtggagaaagtgcagcatcagaatcttcaccgtggcccagctggaggacaacagcatccagatgaagaaggacctggccaccttcctgtaccacctgagaatcgaggccgaggtggaggtggtggagatgcacgacagcgacatcagcgcctacacctacgagagaaccctgatgatggagcagagaagccagatgctgagacacatgagactgagcaagaccgagagagacagagaggcccagctggtgaaggacagaaacagcatgctgagactgaccagcatcggcagcgacgaggacgaggagaccgagacctaccaggagaaggtgcacatgacctggaccaaggacaagtacatggccagcagaggccagaaggccaagagcatggagggcttccaggacctgctgaacatgagacccgaccagagcaacgtgagaagaatgcacaccgccgtgaagctgaacgaggtgatcgtgaacaagagccacgaggccaagctggtgctgctgaacatgcccggcccccccagaaaccccgagggcgacgagaactacatggagttcctggaggtgctgaccgagggcctggagagagtgctgctggtgagaggcggcggcagcgaggtgatcaccatctacagctag

SEQ ID NO: 99377 - DNA, 3276 bp, synthetic construct
  misc_feature 1..3276: note = Description of Artificial Sequence: Synthetic coding sequence
  source 1..3276: mol_type = other DNA
atgagcgagatgagcggcgccaccaccagcctggccaccgtggccctggacccccccagcgacagaaccagccacccccaggacgtgatcgaggacctgagccagaacagcatcaccggcgagcacagccagctgctggacgacggccacaagaaggccagaaacgcctacctgaacaacagcaactacgaggagggcgacgagtacttcgacaagaacctggccctgttcgaggaggagatggacaccagacccaaggtgagcagcctgctgaacagaatggccaactacaccaacctgacccagggcgccaaggagcacgaggaggccgagaacatcaccgagggcaagaagaagcccaccaagaccccccagatgggcaccttcatgggcgtgtacctgccctgcctgcagaacatcttcggcgtgatcctgttcctgagactgacctgggtggtgggcaccgccggcgtgctgcaggccttcgccatcgtgctgatctgctgctgctgcaccatgctgaccgccatcagcatgagcgccatcgccaccaacggcgtggtgcccgccggcggcagctacttcatgatcagcagagccctgggccccgagttcggcggcgccgtgggcctgtgcttctacctgggcaccaccttcgccgccgccatgtacatcctgggcgccatcgagatcttcctggtgtacatcgtgcccagagccgccatcttccacagcgacgacgccctgaaggagagcgccgccatgctgaacaacatgagagtgtacggcaccgccttcctggtgctgatggtgctggtggtgttcatcggcgtgagatacgtgaacaagttcgccagcctgttcctggcctgcgtgatcgtgagcatcctggccatctacgccggcgccatcaagagcagcttcgcccccccccacttccccgtgtgcatgctgggcaacagaaccctgagcagcagacacatcgacgtgtgcagcaagaccaaggagatcaacaacatgaccgtgcccagcaagctgtggggcttcttctgcaacagcagccagttcttcaacgccacctgcgacgagtacttcgtgcacaacaacgtgaccagcatccagggcatccccggcctggccagcggcatcatcaccgagaacctgtggagcaactacctgcccaagggcgagatcatcgagaagcccagcgccaagagcagcgacgtgctgggcagcctgaaccacgagtacgtgctggtggacatcaccaccagcttcaccctgctggtgggcatcttcttccccagcgtgaccggcatcatggccggcagcaacagaagcggcgacctgaaggacgcccagaagagcatccccatcggcaccatcctggccatcctgaccaccagcttcgtgtacctgagcaacgtggtgctgttcggcgcctgcatcgagggcgtggtgctgagagacaagttcggcgacgccgtgaagggcaacctggtggtgggcaccctgagctggcccagcccctgggtgatcgtgatcggcagcttcttcagcacctgcggcgccggcctgcagagcctgaccggcgcccccagactgctgcaggccatcgccaaggacaacatcatccccttcctgagagtgttcggccacagcaaggccaacggcgagcccacctgggccctgctgctgaccgccgccatcgccgagctgggcatcctgatcgccagcctggacctggtggcccccatcctgagcatgttcttcctgatgtgctacctgttcgtgaacctggcctgcgccctgcagaccctgctgagaacccccaactggagacccagattcagatactaccactgggccctgagcttcatgggcatgagcatctgcctggccctgatgttcatcagcagctggtactacgccatcgtggccatggtgatcgccggcatgatctacaagtacatcgagtaccagggcgccgagaaggagtggggcgacggcatcagaggcctgagcctgagcgccgccagattcgccctgctgagactggaggagggccccccccacaccaagaactggagaccccagctgctggtgctgctgaagctggacgaggacctgcacgtgaagcaccccagactgctgaccttcgccagccagctgaaggccggcaagggcctgaccatcgtgggcagcgtgatcgtgggcaacttcctggagaactacggcgaggccctggccgccgagcagaccatcaagcacctgatggaggccgagaaggtgaagggcttctgccagctggtggtggccgccaagctgagagagggcatcagccacctgatccagagctgcggcctgggcggcatgaagcacaacaccgtggtgatgggctggcccaacggctggagacagagcgaggacgccagagcctggaagaccttcatcggcaccgtgagagtgaccaccgccgcccacctggccctgctggtggccaagaacatcagcttcttccccagcaacgtggagcagttcagcgagggcaacatcgacgtgtggtggatcgtgcacgacggcggcatgctgatgctgctgcccttcctgctgaagcagcacaaggtgtggagaaagtgcagcatcagaatcttcaccgtggcccagctggaggacaacagcatccagatgaagaaggacctggccaccttcctgtaccacctgagaatcgaggccgaggtggaggtggtggagatgcacgacagcgacatcagcgcctacacctacgagagaaccctgatgatggagcagagaagccagatgctgagacacatgagactgagcaagaccgagagagacagagaggcccagctggtgaaggacagaaacagcatgctgagactgaccagcatcggcagcgacgaggacgaggagaccgagacctaccaggagaaggtgcacatgacctggaccaaggacaagtacatggccagcagaggccagaaggccaagagcatggagggcttccaggacctgctgaacatgagacccgaccagagcaacgtgagaagaatgcacaccgccgtgaagctgaacgaggtgatcgtgaacaagagccacgaggccaagctggtgctgctgaacatgcccggcccccccagaaaccccgagggcgacgagaactacatggagttcctggaggtgctgaccgagggcctggagagagtgctgctggtgagaggcggcggcagcgaggtgatcaccatctacagctag

SEQ ID NO: 99378 - DNA, 3408 bp, synthetic construct
  misc_feature 1..3408: note = Description of Artificial Sequence: Synthetic coding sequence
  source 1..3408: mol_type = other DNA
atgcacccccccgagaccaccaccaagatggccagcgtgagattcatggtgacccccaccaagatcgacgacatccccggcctgagcgacaccagccccgacctgagcagcagaagcagcagcagagtgagattcagcagcagagagagcgtgcccgagaccagcagaagcgagcccatgagcgagatgagcggcgccaccaccagcctggccaccgtggccctggacccccccagcgacagaaccagccacccccaggacgtgatcgaggacgacggccacaagaaggccagaaacgcctacctgaacaacagcaactacgaggagggcgacgagtacttcgacaagaacctggccctgttcgaggaggagatggacaccagacccaaggtgagcagcctgctgaacagaatggccaactacaccaacctgacccagggcgccaaggagcacgaggaggccgagaacatcaccgagggcaagaagaagcccaccaagaccccccagatgggcaccttcatgggcgtgtacctgccctgcctgcagaacatcttcggcgtgatcctgttcctgagactgacctgggtggtgggcaccgccggcgtgctgcaggccttcgccatcgtgctgatctgctgctgctgcaccatgctgaccgccatcagcatgagcgccatcgccaccaacggcgtggtgcccgccggcggcagctacttcatgatcagcagagccctgggccccgagttcggcggcgccgtgggcctgtgcttctacctgggcaccaccttcgccgccgccatgtacatcctgggcgccatcgagatcttcctggtgtacatcgtgcccagagccgccatcttccacagcgacgacgccctgaaggagagcgccgccatgctgaacaacatgagagtgtacggcaccgccttcctggtgctgatggtgctggtggtgttcatcggcgtgagatacgtgaacaagttcgccagcctgttcctggcctgcgtgatcgtgagcatcctggccatctacgccggcgccatcaagagcagcttcgcccccccccacttccccgtgtgcatgctgggcaacagaaccctgagcagcagacacatcgacgtgtgcagcaagaccaaggagatcaacaacatgaccgtgcccagcaagctgtggggcttcttctgcaacagcagccagttcttcaacgccacctgcgacgagtacttcgtgcacaacaacgtgaccagcatccagggcatccccggcctggccagcggcatcatcaccgagaacctgtggagcaactacctgcccaagggcgagatcatcgagaagcccagcgccaagagcagcgacgtgctgggcagcctgaaccacgagtacgtgctggtggacatcaccaccagcttcaccctgctggtgggcatcttcttccccagcgtgaccggcatcatggccggcagcaacagaagcggcgacctgaaggacgcccagaagagcatccccatcggcaccatcctggccatcctgaccaccagcttcgtgtacctgagcaacgtggtgctgttcggcgcctgcatcgagggcgtggtgctgagagacaagttcggcgacgccgtgaagggcaacctggtggtgggcaccctgagctggcccagcccctgggtgatcgtgatcggcagcttcttcagcacctgcggcgccggcctgcagagcctgaccggcgcccccagactgctgcaggccatcgccaaggacaacatcatccccttcctgagagtgttcggccacagcaaggccaacggcgagcccacctgggccctgctgctgaccgccgccatcgccgagctgggcatcctgatcgccagcctggacctggtggcccccatcctgagcatgttcttcctgatgtgctacctgttcgtgaacctggcctgcgccctgcagaccctgctgagaacccccaactggagacccagattcagatactaccactgggccctgagcttcatgggcatgagcatctgcctggccctgatgttcatcagcagctggtactacgccatcgtggccatggtgatcgccggcatgatctacaagtacatcgagtaccagggcgccgagaaggagtggggcgacggcatcagaggcctgagcctgagcgccgccagattcgccctgctgagactggaggagggccccccccacaccaagaactggagaccccagctgctggtgctgctgaagctggacgaggacctgcacgtgaagcaccccagactgctgaccttcgccagccagctgaaggccggcaagggcctgaccatcgtgggcagcgtgatcgtgggcaacttcctggagaactacggcgaggccctggccgccgagcagaccatcaagcacctgatggaggccgagaaggtgaagggcttctgccagctggtggtggccgccaagctgagagagggcatcagccacctgatccagagctgcggcctgggcggcatgaagcacaacaccgtggtgatgggctggcccaacggctggagacagagcgaggacgccagagcctggaagaccttcatcggcaccgtgagagtgaccaccgccgcccacctggccctgctggtggccaagaacatcagcttcttccccagcaacgtggagcagttcagcgagggcaacatcgacgtgtggtggatcgtgcacgacggcggcatgctgatgctgctgcccttcctgctgaagcagcacaaggtgtggagaaagtgcagcatcagaatcttcaccgtggcccagctggaggacaacagcatccagatgaagaaggacctggccaccttcctgtaccacctgagaatcgaggccgaggtggaggtggtggagatgcacgacagcgacatcagcgcctacacctacgagagaaccctgatgatggagcagagaagccagatgctgagacacatgagactgagcaagaccgagagagacagagaggcccagctggtgaaggacagaaacagcatgctgagactgaccagcatcggcagcgacgaggacgaggagaccgagacctaccaggagaaggtgcacatgacctggaccaaggacaagtacatggccagcagaggccagaaggccaagagcatggagggcttccaggacctgctgaacatgagacccgaccagagcaacgtgagaagaatgcacaccgccgtgaagctgaacgaggtgatcgtgaacaagagccacgaggccaagctggtgctgctgaacatgcccggcccccccagaaaccccgagggcgacgagaactacatggagttcctggaggtgctgaccgagggcctggagagagtgctgctggtgagaggcggcggcagcgaggtgatcaccatctacagctag

SEQ ID NO: 99379 - DNA, 2889 bp, synthetic construct
  misc_feature 1..2889: note = Description of Artificial Sequence: Synthetic coding sequence
  source 1..2889: mol_type = other DNA
atggacaccagacccaaggtgagcagcctgctgaacagaatggccaactacaccaacctgacccagggcgccaaggagcacgaggaggccgagaacatcaccgagggcaagaagaagcccaccaagaccatgctgaccgccatcagcatgagcgccatcgccaccaacggcgtggtgcccgccggcggcagctacttcatgatcagcagagccctgggccccgagttcggcggcgccgtgggcctgtgcttctacctgggcaccaccttcgccgccgccatgtacatcctgggcgccatcgagatcttcctggtgtacatcgtgcccagagccgccatcttccacagcgacgacgccctgaaggagagcgccgccatgctgaacaacatgagagtgtacggcaccgccttcctggtgctgatggtgctggtggtgttcatcggcgtgagatacgtgaacaagttcgccagcctgttcctggcctgcgtgatcgtgagcatcctggccatctacgccggcgccatcaagagcagcttcgcccccccccacttccccgtgtgcatgctgggcaacagaaccctgagcagcagacacatcgacgtgtgcagcaagaccaaggagatcaacaacatgaccgtgcccagcaagctgtggggcttcttctgcaacagcagccagttcttcaacgccacctgcgacgagtacttcgtgcacaacaacgtgaccagcatccagggcatccccggcctggccagcggcatcatcaccgagaacctgtggagcaactacctgcccaagggcgagatcatcgagaagcccagcgccaagagcagcgacgtgctgggcagcctgaaccacgagtacgtgctggtggacatcaccaccagcttcaccctgctggtgggcatcttcttccccagcgtgaccggcatcatggccggcagcaacagaagcggcgacctgaaggacgcccagaagagcatccccatcggcaccatcctggccatcctgaccaccagcttcgtgtacctgagcaacgtggtgctgttcggcgcctgcatcgagggcgtggtgctgagagacaagttcggcgacgccgtgaagggcaacctggtggtgggcaccctgagctggcccagcccctgggtgatcgtgatcggcagcttcttcagcacctgcggcgccggcctgcagagcctgaccggcgcccccagactgctgcaggccatcgccaaggacaacatcatccccttcctgagagtgttcggccacagcaaggccaacggcgagcccacctgggccctgctgctgaccgccgccatcgccgagctgggcatcctgatcgccagcctggacctggtggcccccatcctgagcatgttcttcctgatgtgctacctgttcgtgaacctggcctgcgccctgcagaccctgctgagaacccccaactggagacccagattcagatactaccactgggccctgagcttcatgggcatgagcatctgcctggccctgatgttcatcagcagctggtactacgccatcgtggccatggtgatcgccggcatgatctacaagtacatcgagtaccagggcgccgagaaggagtggggcgacggcatcagaggcctgagcctgagcgccgccagattcgccctgctgagactggaggagggccccccccacaccaagaactggagaccccagctgctggtgctgctgaagctggacgaggacctgcacgtgaagcaccccagactgctgaccttcgccagccagctgaaggccggcaagggcctgaccatcgtgggcagcgtgatcgtgggcaacttcctggagaactacggcgaggccctggccgccgagcagaccatcaagcacctgatggaggccgagaaggtgaagggcttctgccagctggtggtggccgccaagctgagagagggcatcagccacctgatccagagctgcggcctgggcggcatgaagcacaacaccgtggtgatgggctggcccaacggctggagacagagcgaggacgccagagcctggaagaccttcatcggcaccgtgagagtgaccaccgccgcccacctggccctgctggtggccaagaacatcagcttcttccccagcaacgtggagcagttcagcgagggcaacatcgacgtgtggtggatcgtgcacgacggcggcatgctgatgctgctgcccttcctgctgaagcagcacaaggtgtggagaaagtgcagcatcagaatcttcaccgtggcccagctggaggacaacagcatccagatgaagaaggacctggccaccttcctgtaccacctgagaatcgaggccgaggtggaggtggtggagatgcacgacagcgacatcagcgcctacacctacgagagaaccctgatgatggagcagagaagccagatgctgagacacatgagactgagcaagaccgagagagacagagaggcccagctggtgaaggacagaaacagcatgctgagactgaccagcatcggcagcgacgaggacgaggagaccgagacctaccaggagaaggtgcacatgacctggaccaaggacaagtacatggccagcagaggccagaaggccaagagcatggagggcttccaggacctgctgaacatgagacccgaccagagcaacgtgagaagaatgcacaccgccgtgaagctgaacgaggtgatcgtgaacaagagccacgaggccaagctggtgctgctgaacatgcccggcccccccagaaaccccgagggcgacgagaactacatggagttcctggaggtgctgaccgagggcctggagagagtgctgctggtgagaggcggcggcagcgaggtgatcaccatctacagctag

SEQ ID NO: 99380 - DNA, 3276 bp, synthetic construct; identical to SEQ ID NO: 99377
  misc_feature 1..3276: note = Description of Artificial Sequence: Synthetic coding sequence
  source 1..3276: mol_type = other DNA

SEQ ID NO: 99381 - DNA, 3426 bp, synthetic construct
  misc_feature 1..3426: note = Description of Artificial Sequence: Synthetic coding sequence
  source 1..3426: mol_type = other DNA
atggccagcgtgagattcatggtgacccccaccaagatcgacgacatccccggcctgagcgacaccagccccgacctgagcagcagaagcagcagcagagtgagattcagcagcagagagagcgtgcccgagaccagcagaagcgagcccatgagcgagatgagcggcgccaccaccagcctggccaccgtggccctggacccccccagcgacagaaccagccacccccaggacgtgatcgaggacctgagccagaacagcatcaccggcgagcacagccagctgctggacgacggccacaagaaggccagaaacgcctacctgaacaacagcaactacgaggagggcgacgagtacttcgacaagaacctggccctgttcgaggaggagatggacaccagacccaaggtgagcagcctgctgaacagaatggccaactacaccaacctgacccagggcgccaaggagcacgaggaggccgagaacatcaccgagggcaagaagaagcccaccaagaccccccagatgggcaccttcatgggcgtgtacctgccctgcctgcagaacatcttcggcgtgatcctgttcctgagactgacctgggtggtgggcaccgccggcgtgctgcaggccttcgccatcgtgctgatctgctgctgctgcaccatgctgaccgccatcagcatgagcgccatcgccaccaacggcgtggtgcccgccggcggcagctacttcatgatcagcagagccctgggccccgagttcggcggcgccgtgggcctgtgcttctacctgggcaccaccttcgccgccgccatgtacatcctgggcgccatcgagatcttcctggtgtacatcgtgcccagagccgccatcttccacagcgacgacgccctgaaggagagcgccgccatgctgaacaacatgagagtgtacggcaccgccttcctggtgctgatggtgctggtggtgttcatcggcgtgagatacgtgaacaagttcgccagcctgttcctggcctgcgtgatcgtgagcatcctggccatctacgccggcgccatcaagagcagcttcgcccccccccacttccccgtgtgcatgctgggcaacagaaccctgagcagcagacacatcgacgtgtgcagcaagaccaaggagatcaacaacatgaccgtgcccagcaagctgtggggcttcttctgcaacagcagccagttcttcaacgccacctgcgacgagtacttcgtgcacaacaacgtgaccagcatccagggcatccccggcctggccagcggcatcatcaccgagaacctgtggagcaactacctgcccaagggcgagatcatcgagaagcccagcgccaagagcagcgacgtgctgggcagcctgaaccacgagtacgtgctggtggacatcaccaccagcttcaccctgctggtgggcatcttcttccccagcgtgaccggcatcatggccggcagcaacagaagcggcgacctgaaggacgcccagaagagcatccccatcggcaccatcctggccatcctgaccaccagcttcgtgtacctgagcaacgtggtgctgttcggcgcctgcatcgagggcgtggtgctgagagacaagttcggcgacgccgtgaagggcaacctggtggtgggcaccctgagctggcccagcccctgggtgatcgtgatcggcagcttcttcagcacctgcggcgccggcctgcagagcctgaccggcgcccccagactgctgcaggccatcgccaaggacaacatcatccccttcctgagagtgttcggccacagcaaggccaacggcgagcccacctgggccctgctgctgaccgccgccatcgccgagctgggcatcctgatcgccagcctggacctggtggcccccatcctgagcatgttcttcctgatgtgctacctgttcgtgaacctggcctgcgccctgcagaccctgctgagaacccccaactggagacccagattcagatactaccactgggccctgagcttcatgggcatgagcatctgcctggccctgatgttcatcagcagctggtactacgccatcgtggccatggtgatcgccggcatgatctacaagtacatcgagtaccagggcgccgagaaggagtggggcgacggcatcagaggcctgagcctgagcgccgccagattcgccctgctgagactggaggagggccccccccacaccaagaactggagaccccagctgctggtgctgctgaagctggacgaggacctgcacgtgaagcaccccagactgctgaccttcgccagccagctgaaggccggcaagggcctgaccatcgtgggcagcgtgatcgtgggcaacttcctggagaactacggcgaggccctggccgccgagcagaccatcaagcacctgatggaggccgagaaggtgaagggcttctgccagctggtggtggccgccaagctgagagagggcatcagccacctgatccagagctgcggcctgggcggcatgaagcacaacaccgtggtgatgggctggcccaacggctggagacagagcgaggacgccagagcctggaagaccttcatcggcaccgtgagagtgaccaccgccgcccacctggccctgctggtggccaagaacatcagcttcttccccagcaacgtggagcagttcagcgagggcaacatcgacgtgtggtggatcgtgcacgacggcggcatgctgatgctgctgcccttcctgctgaagcagcacaaggtgtggagaaagtgcagcatcagaatcttcaccgtggcccagctggaggacaacagcatccagatgaagaaggacctggccaccttcctgtaccacctgagaatcgaggccgaggtggaggtggtggagatgcacgacagcgacatcagcgcctacacctacgagagaaccctgatgatggagcagagaagccagatgctgagacacatgagactgagcaagaccgagagagacagagaggcccagctggtgaaggacagaaacagcatgctgagactgaccagcatcggcagcgacgaggacgaggagaccgagacctaccaggagaaggtgcacatgacctggaccaaggacaagtacatggccagcagaggccagaaggccaagagcatggagggcttccaggacctgctgaacatgagacccgaccagagcaacgtgagaagaatgcacaccgccgtgaagctgaacgaggtgatcgtgaacaagagccacgaggccaagctggtgctgctgaacatgcccggcccccccagaaaccccgagggcgacgagaactacatggagttcctggaggtgctgaccgagggcctggagagagtgctgctggtgagaggcggcggcagcgaggtgatcaccatctacagctag

SEQ ID NO: 99382 - DNA, 3453 bp, synthetic construct; identical to SEQ ID NO: 99376
  misc_feature 1..3453: note = Description of Artificial Sequence: Synthetic coding sequence
  source 1..3453: mol_type = other DNA

SEQ ID NO: 99383 - DNA, 186 bp, synthetic construct
  misc_feature 1..186: note = Description of Artificial Sequence: Synthetic coding sequence
  source 1..186: mol_type = other DNA
atgagcgagatgagcggcgccaccaccagcctggccaccgtggccctggacccccccagcgacagaaccagccacccccaggacgtgatcgaggacctgagccagaacagcatcaccggcgagcacagccagctgctggacgacggccacaagaaggccagaaacgcctacctgaacaacagctag

SEQ ID NO: 99384 - DNA, 2889 bp, synthetic construct; identical to SEQ ID NO: 99379
  misc_feature 1..2889: note = Description of Artificial Sequence: Synthetic coding sequence
  source 1..2889: mol_type = other DNA

SEQ ID NO: 99385 - DNA, 3453 bp, synthetic construct; identical to SEQ ID NO: 99376
  misc_feature 1..3453: note = Description of Artificial Sequence: Synthetic coding sequence
  source 1..3453: mol_type = other DNA

SEQ ID NO: 99386 - DNA, 459 bp, synthetic construct
  misc_feature 1..459: note = Description of Artificial Sequence: Synthetic coding sequence
  source 1..459: mol_type = other DNA
atggccagcgtgagattcatggtgacccccaccaagatcgacgacatccccggcctgagcgacaccagccccgacctgagcagcagaagcagcagcagagtgagattcagcagcagagagagcgtgcccgagaccagcagaagcgagcccatgagcgagatgagcggcgccaccaccagcctggccaccgtggccctggacccccccagcgacagaaccagccacccccaggacgtgatcgaggacctgagccagaacagcatcaccggcgagcacagccagctgctggacgacggccacaagaaggccagaaacgcctacctgaacaacagcaactacgaggagggcgacgagtacttcgacaagaacctggccctgttcgaggaggagatggacaccagacccaaggtgagcagcctgctgaacagaatggccaactacaccaacctgacccagtag

SEQ ID NO: 99387 - DNA, 3252 bp, synthetic construct
  misc_feature 1..3252: note = Description of Artificial Sequence: Synthetic coding sequence
  source 1..3252: mol_type = other DNA
atgcccaccaacttcaccgtggtgcccgtggaggcccacgccgacggcggcggcgacgagaccgccgagagaaccgaggcccccggcacccccgagggccccgagcccgagagacccagccccggcgacggcaaccccagagagaacagccccttcctgaacaacgtggaggtggagcaggagagcttcttcgagggcaagaacatggccctgttcgaggaggagatggacagcaaccccatggtgagcagcctgctgaacaagctggccaactacaccaacctgagccagggcgtggtggagcacgaggaggacgaggagagcagaagaagagaggccaaggcccccagaatgggcaccttcatcggcgtgtacctgccctgcctgcagaacatcctgggcgtgatcctgttcctgagactgacctggatcgtgggcgtggccggcgtgctggagagcttcctgatcgtggccatgtgctgcacctgcaccatgctgaccgccatcagcatgagcgccatcgccaccaacggcgtggtgcccgccggcggcagctactacatgatcagcagaagcctgggccccgagttcggcggcgccgtgggcctgtgcttctacctgggcaccaccttcgccggcgccatgtacatcctgggcaccatcgagatcttcctgacctacatcagccccggcgccgccatcttccaggccgaggccgccggcggcgaggccgccgccatgctgcacaacatgagagtgtacggcacctgcaccctggtgctgatggccctggtggtgttcgtgggcgtgaagtacgtgaacaagctggccctggtgttcctggcctgcgtggtgctgagcatcctggccatctacgccggcgtgatcaagagcgccttcgacccccccgacatccccgtgtgcctgctgggcaacagaaccctgagcagaagaagcttcgacgcctgcgtgaaggcctacggcatccacaacaacagcgccaccagcgccctgtggggcctgttctgcaacggcagccagcccagcgccgcctgcgacgagtacttcatccagaacaacgtgaccgagatccagggcatccccggcgccgccagcggcgtgttcctggagaacctgtggagcacctacgcccacgccggcgccttcgtggagaagaagggcgtgcccagcgtgcccgtggccgaggagagcagagccagcgccctgccctacgtgctgaccgacatcgccgccagcttcaccctgctggtgggcatctacttccccagcgtgaccggcatcatggccggcagcaacagaagcggcgacctgaaggacgcccagaagagcatccccaccggcaccatcctggccatcgtgaccaccagcttcatctacctgagctgcatcgtgctgttcggcgcctgcatcgagggcgtggtgctgagagacaagttcggcgaggccctgcagggcaacctggtgatcggcatgctggcctggcccagcccctgggtgatcgtgatcggcagcttcttcagcacctgcggcgccggcctgcagagcctgaccggcgcccccagactgctgcaggccatcgccagagacggcatcgtgcccttcctgcaggtgttcggccacggcaaggccaacggcgagcccacctgggccctgctgctgaccgtgctgatctgcgagaccggcatcctgatcgccagcctggacagcgtggcccccatcctgagcatgttcttcctgatgtgctacctgttcgtgaacctggcctgcgccgtgcagaccctgctgagaacccccaactggagacccagattcaagttctaccactggaccctgagcttcctgggcatgagcctgtgcctggccctgatgttcatctgcagctggtactacgccctgagcgccatgctgatcgccggctgcatctacaagtacatcgagtacagaggcgccgagaaggagtggggcgacggcatcagaggcctgagcctgaacgccgccagatacgccctgctgagagtggagcacggccccccccacaccaagaactggagaccccaggtgctggtgatgctgaacctggacgccgagcaggccgtgaagcaccccagactgctgagcttcaccagccagctgaaggccggcaagggcctgaccatcgtgggcagcgtgctggagggcacctacctggacaagcacatggaggcccagagagccgaggagaacatcagaagcctgatgagcaccgagaagaccaagggcttctgccagctggtggtgagcagcagcctgagagacggcatgagccacctgatccagagcgccggcctgggcggcctgaagcacaacaccgtgctgatggcctggcccgccagctggaagcaggaggacaaccccttcagctggaagaacttcgtggacaccgtgagagacaccaccgccgcccaccaggccctgctggtggccaagaacgtggacagcttcccccagaaccaggagagattcggcggcggccacatcgacgtgtggtggatcgtgcacgacggcggcatgctgatgctgctgcccttcctgctgagacagcacaaggtgtggagaaagtgcagaatgagaatcttcaccgtggcccaggtggacgacaacagcatccagatgaagaaggacctgcagatgttcctgtaccacctgagaatcagcgccgaggtggaggtggtggagatggtggagaacgacatcagcgccttcacctacgagagaaccctgatgatggagcagagaagccagatgctgaagcagatgcagctgagcaagaacgagcaggagagagaggcccagctgatccacgacagaaacaccgccagccacaccgccgccgccgccagaacccaggccccccccacccccgacaaggtgcagatgacctggaccagagagaagctgatcgccgagaagtacagaagcagagacaccagcctgagcggcttcaaggacctgttcagcatgaagcccgaccagagcaacgtgagaagaatgcacaccgccgtgaagctgaacggcgtggtgctgaacaagagccaggacgcccagctggtgctgctgaacatgcccggcccccccaagaacagacagggcgacgagaactacatggagttcctggaggtgctgaccgagggcctgaacagagtgctgctggtgagaggcggcggcagagaggtgatcaccatctacagctag

SEQ ID NO: 99388 - DNA, 801 bp, synthetic construct
  misc_feature 1..801: note = Description of Artificial Sequence: Synthetic coding sequence
  source 1..801: mol_type = other DNA
atgcccaccaacttcaccgtggtgcccgtggaggcccacgccgacggcggcggcgacgagaccgccgagagaaccgaggcccccggcacccccgagggccccgagcccgagagacccagccccggcgacggcaaccccagagagaacagccccttcctgaacaacgtggaggtggagcaggagagcttcttcgagggcaagaacatggccctgttcgaggaggagatggacagcaaccccatggtgagcagcctgctgaacaagctggccaactacaccaacctgagccagggcgtggtggagcacgaggaggacgaggagagcagaagaagagaggccaaggcccccagaatgggcaccttcatcggcgtgtacctgccctgcctgcagaacatcctgggcgtgatcctgttcctgagactgacctggatcgtgggcgtggccggcgtgctggagagcttcctgatcgtggccatgtgctgcacctgcaccatgctgaccgccatcagcatgagcgccatcgccaccaacggcgtggtgcccgccggcggcagctactacatgatcagcagaagcctgggccccgagttcggcggcgccgtgggcctgtgcttctacctgggcaccaccttcgccggcgccatgtacatcctgggcaccatcgagatcttcctgaccggcaccgaggacggcgtgggcagcctgggcctgggcctggcccagggcaacagaagacagacccacctgagccccagcgacgccgcccaggccgcccacggcgccagctacggcagcttctag

SEQ ID NO: 99389 - DNA, 3066 bp, synthetic construct
  misc_feature 1..3066: note = Description of Artificial Sequence: Synthetic coding sequence
  source 1..3066: mol_type = other DNA
atggccgagctgcccaccaccgagacccccggcgacgccaccctgtgcagcggcagattcaccatcagcaccctgctgagcagcgacgagcccagcccccccgccgcctacgacagcagccaccccagccacctgacccacagcagcaccttctgcatgagaaccttcggctacaacaccatcgacgtggtgcccacctacgagcactacgccaacagcacccagcccggcgagcccagaaaggtgagacccaccctggccgacctgcacagcttcctgaagcaggagggcagacacctgcacgccctggccttcgacagcagacccagccacgagatgaccgacggcctggtggagggcgaggccggcaccagcagcgagaagaaccccgaggagcccgtgagattcggctgggtgaagggcgtgatgatcagatgcatgctgaacatctggggcgtgatcctgtacctgagactgccctggatcaccgcccaggccggcatcgtgctgacctggatcatcatcctgctgagcgtgaccgtgaccagcatcaccggcctgagcatcagcgccatcagcaccaacggcaaggtgaagagcggcggcacctacttcctgatcagcagaagcctgggccccgagctgggcggcagcatcggcctgatcttcgccttcgccaacgccgtgggcgtggccatgcacaccgtgggcttcgccgagaccgtgagagacctgctgcaggagtacggcgcccccatcgtggaccccatcaacgacatcagaatcatcgccgtggtgagcgtgaccgtgctgctggccatcagcctggccggcatggagtgggagagcaaggcccaggtgctgttcttcctggtgatcatggtgagcttcgccaactacctggtgggcaccctgatcccccccagcgaggacaaggccagcaagggcttcttcagctacagagccgacatcttcgtgcagaacctggtgcccgactggagaggccccgacggcaccttcttcggcatgttcagcatcttcttccccagcgccaccggcatcctggccggcgccaacatcagcggcgacctgaaggaccccgccatcgccatccccaagggcaccctgatggccatcttctggaccaccatcagctacctggccatcagcgccaccatcggcagctgcgtggtgagagacgccagcggcgtgctgaacgacaccgtgacccccggctggggcgcctgcgagggcctggcctgcagctacggctggaacttcaccgagtgcacccagcagcacagctgccactacggcctgatcaactactaccagaccatgagcatggtgagcggcttcgcccccctgatcaccgccggcatcttcggcgccaccctgagcagcgccctggcctgcctggtgagcgccgccaaggtgttccagtgcctgtgcgaggaccagctgtaccccctgatcggcttcttcggcaagggctacggcaagaacaaggagcccgtgagaggctacctgctggcctacgccatcgccgtggccttcatcatcatcgccgagctgaacaccatcgcccccatcatcagcaacttcttcctgtgcagctacgccctgatcaacttcagctgcttccacgccagcatcaccaacagccccggctggagacccagcttccagtactacaacaagtgggccgccctgttcggcgccatcatcagcgtggtgatcatgttcctgctgacctggtgggccgccctgatcgccatcggcgtggtgctgttcctgctgctgtacgtgatctacaagaagcccgaggtgaactggggcagcagcgtgcaggccggcagctacaacctggccctgagctacagcgtgggcctgaacgaggtggaggaccacatcaagaactacagaccccagtgcctggtgctgaccggcccccccaacttcagacccgccctggtggacttcgtgggcaccttcaccagaaacctgagcctgatgatctgcggccacgtgctgatcggcccccacaagcagagaatgcccgagctgcagctgatcgccaacggccacaccaagtggctgaacaagagaaagatcaaggccttctacagcgacgtgatcgccgaggacctgagaagaggcgtgcagatcctgatgcaggccgccggcctgggcagaatgaagcccaacatcctggtggtgggcttcaagaagaactggcagagcgcccaccccgccaccgtggaggactacatcggcatcctgcacgacgccttcgacttcaactacggcgtgtgcgtgatgagaatgagagagggcctgaacgtgagcaagatgatgcaggcccacatcaaccccgtgttcgaccccgccgaggacggcaaggaggccagcgccagagtggaccccaaggccctggtgaaggaggagcaggccaccaccatcttccagagcgagcagggcaagaagaccatcgacatctactggctgttcgacgacggcggcctgaccctgctgatcccctacctgctgggcagaaagagaagatggagcaagtgcaagatcagagtgttcgtgggcggccagatcaacagaatggaccaggagagaaaggccatcatcagcctgctgagcaagttcagactgggcttccacgaggtgcacatcctgcccgacatcaaccagaaccccagagccgagcacaccaagagattcgaggacatgatcgcccccttcagactgaacgacggcttcaaggacgaggccaccgtgaacgagatgagaagagactgcccctggaagatcagcgacgaggagatcaccaagaacagagtgaagagcctgagacaggtgagactgaacgagatcgtgctggactacagcagagacgccgccctgatcgtgatcaccctgcccatcggcagaaagggcaagtgccccagcagcctgtacatggcctggctggagaccctgagccaggacctgagaccccccgtgatcctgatcagaggcaaccaggagaacgtgctgaccttctactgccagtag

SEQ ID NO: 99390 - DNA, 3090 bp, synthetic construct
  misc_feature 1..3090: note = Description of Artificial Sequence: Synthetic coding sequence
  source 1..3090: mol_type = other DNA
atggccgagctgcccaccaccgagacccccggcgacgccaccctgtgcagcggcagattcaccatcagcaccctgctgagcagcgacgagcccagcccccccgccgcctacgacagcagccaccccagccacctgacccacagcagcaccttctgcatgagaaccttcggctacaacaccatcgacgtggtgcccacctacgagcactacgccaacagcacccagcccggcgagcccagaaaggtgagacccaccctggccgacctgcacagcttcctgaaggagggcagacacctgcacgccctggccttcgacagcagacccagccacgagatgaccgacggcctggtggagggcgaggccggcaccagcagcgagaagaaccccgaggagcccgtgagattcggctgggtgaagggcgtgatgatcagatgcatgctgaacatctggggcgtgatcctgtacctgagactgccctggatcaccgcccaggccggcatcgtgctgacctggatcatcatcctgctgagcgtgaccgtgaccagcatcaccggcctgagcatcagcgccatcagcaccaacggcaaggtgaagagcggcggcacctacttcctgatcagcagaagcctgggccccgagctgggcggcagcatcggcctgatcttcgccttcgccaacgccgtgggcgtggccatgcacaccgtgggcttcgccgagaccgtgagagacctgctgcaggagtacggcgcccccatcgtggaccccatcaacgacatcagaatcatcgccgtggtgagcgtgaccgtgctgctggccatcagcctggccggcatggagtgggagagcaaggcccaggtgctgttcttcctggtgatcatggtgagcttcgccaactacctggtgggcaccctgatcccccccagcgaggacaaggccagcaagggcttcttcagctacagagccgacatcttcgtgcagaacctggtgcccgactggagaggccccgacggcaccttcttcggcatgttcagcatcttcttccccagcgccaccggcatcctggccggcgccaacatcagcggcgacctgaaggaccccgccatcgccatccccaagggcaccctgatggccatcttctggaccaccatcagctacctggccatcagcgccaccatcggcagctgcgtggtgagagacgccagcggcgtgctgaacgacaccgtgacccccggctggggcgcctgcgagggcctggcctgcagctacggctggaacttcaccgagtgcacccagcagcacagctgccactacggcctgatcaactactaccagaccatgagcatggtgagcggcttcgcccccctgatcaccgccggcatcttcggcgccaccctgagcagcgccctggcctgcctggtgagcgccgccaaggtgttccagtgcctgtgcgaggaccagctgtaccccctgatcggcttcttcggcaagggctacggcaagaacaaggagcccgtgagaggctacctgctggcctacgccatcgccgtggccttcatcatcatcgccgagctgaacaccatcgcccccatcatcagcaacttcttcctgtgcagctacgccctgatcaacttcagctgcttccacgccagcatcaccaacagccccggctggagacccagcttccagtactacaacaagtgggccgccctgttcggcgccatcatcagcgtggtgatcatgttcctgctgacctggtgggccgccctgatcgccatcggcgtggtgctgttcctgctgctgtacgtgatctacaagaagcccgaggtgaactggggcagcagcgtgcaggccggcagctacaacctggccctgagctacagcgtgggcctgaacgaggtggaggaccacatcaagaactacagaccccagtgcctggtgctgaccggcccccccaacttcagacccgccctggtggacttcgtgggcaccttcaccagaaacctgagcctgatgatctgcggccacgtgctgatcggcccccacaagcagagaatgcccgagctgcagctgatcgccaacggccacaccaagtggctgaacaagagaaagatcaaggccttctacagcgacgtgatcgccgaggacctgagaagaggcgtgcagatcctgatgcaggccgccggcctgggcagaatgaagcccaacatcctggtggtgggcttcaagaagaactggcagagcgcccaccccgccaccgtggaggactacatcggcatcctgcacgacgccttcgacttcaactacggcgtgtgcgtgatgagaatgagagagggcctgaacgtgagcaagatgatgcaggcccacatcaaccccgtgttcgaccccgccgaggacggcaaggaggccagcgccagaggcgccagacccagcgtgagcggcgccctggaccccaaggccctggtgaaggaggagcaggccaccaccatcttccagagcgagcagggcaagaagaccatcgacatctactggctgttcgacgacggcggcctgaccctgctgatcccctacctgctgggcagaaagagaagatggagcaagtgcaagatcagagtgttcgtgggcggccagatcaacagaatggaccaggagagaaaggccatcatcagcctgctgagcaagttcagactgggcttccacgaggtgcacatcctgcccgacatcaaccagaaccccagagccgagcacaccaagagattcgaggacatgatcgcccccttcagactgaacgacggcttcaaggacgaggccaccgtgaacgagatgagaagagactgcccctggaagatcagcgacgaggagatcaccaagaacagagtgaagagcctgagacaggtgagactgaacgagatcgtgctggactacagcagagacgccgccctgatcgtgatcaccctgcccatcggcagaaagggcaagtgccccagcagcctgtacatggcctggctggagaccctgagccaggacctgagaccccccgtgatcctgatcagaggcaaccaggagaacgtgctgaccttctactgccagtag

SEQ ID NO: 99391 - DNA, 3093 bp, synthetic construct
  misc_feature 1..3093: note = Description of Artificial Sequence: Synthetic coding sequence
  source 1..3093: mol_type = other DNA
atggccgagctgcccaccaccgagacccccggcgacgccaccctgtgcagcggcagattcaccatcagcaccctgctgagcagcgacgagcccagcccccccgccgcctacgacagcagccaccccagccacctgacccacagcagcaccttctgcatgagaaccttcggctacaacaccatcgacgtggtgcccacctacgagcactacgccaacagcacccagcccggcgagcccagaaaggtgagacccaccctggccgacctgcacagcttcctgaagcaggagggcagacacctgcacgccctggccttcgacagcagacccagccacgagatgaccgacggcctggtggagggcgaggccggcaccagcagcgagaagaaccccgaggagcccgtgagattcggctgggtgaagggcgtgatgatcagatgcatgctgaacatctggggcgtgatcctgtacctgagactgccctggatcaccgcccaggccggcatcgtgctgacctggatcatcatcctgctgagcgtgaccgtgaccagcatcaccggcctgagcatcagcgccatcagcaccaacggcaaggtgaagagcggcggcacctacttcctgatcagcagaagcctgggccccgagctgggcggcagcatcggcctgatcttcgccttcgccaacgccgtgggcgtggccatgcacaccgtgggcttcgccgagaccgtgagagacctgctgcaggagtacggcgcccccatcgtggaccccatcaacgacatcagaatcatcgccgtggtgagcgtgaccgtgctgctggccatcagcctggccggcatggagtgggagagcaaggcccaggtgctgttcttcctggtgatcatggtgagcttcgccaactacctggtgggcaccctgatcccccccagcgaggacaaggccagcaagggcttcttcagctacagagccgacatcttcgtgcagaacctggtgcccgactggagaggccccgacggcaccttcttcggcatgttcagcatcttcttccccagcgccaccggcatcctggccggcgccaacatcagcggcgacctgaaggaccccgccatcgccatccccaagggcaccctgatggccatcttctggaccaccatcagctacctggccatcagcgccaccatcggcagctgcgtggtgagagacgccagcggcgtgctgaacgacaccgtgacccccggctggggcgcctgcgagggcctggcctgcagctacggctggaacttcaccgagtgcacccagcagcacagctgccactacggcctgatcaactactaccagaccatgagcatggtgagcggcttcgcccccctgatcaccgccggcatcttcggcgccaccctgagcagcgccctggcctgcctggtgagcgccgccaaggtgttccagtgcctgtgcgaggaccagctgtaccccctgatcggcttcttcggcaagggctacggcaagaacaaggagcccgtgagaggctacctgctggcctacgccatcgccgtggccttcatcatcatcgccgagctgaacaccatcgcccccatcatcagcaacttcttcctgtgcagctacgccctgatcaacttcagctgcttccacgccagcatcaccaacagccccggctggagacccagcttccagtactacaacaagtgggccgccctgttcggcgccatcatcagcgtggtgatcatgttcctgctgacctggtgggccgccctgatcgccatcggcgtggtgctgttcctgctgctgtacgtgatctacaagaagcccgaggtgaactggggcagcagcgtgcaggccggcagctacaacctggccctgagctacagcgtgggcctgaacgaggtggaggaccacatcaagaactacagaccccagtgcctggtgctgaccggcccccccaacttcagacccgccctggtggacttcgtgggcaccttcaccagaaacctgagcctgatgatctgcggccacgtgctgatcggcccccacaagcagagaatgcccgagctgcagctgatcgccaacggccacaccaagtggctgaacaagagaaagatcaaggccttctacagcgacgtgatcgccgaggacctgagaagaggcgtgcagatcctgatgcaggccgccggcctgggcagaatgaagcccaacatcctggtggtgggcttcaagaagaactggcagagcgcccaccccgccaccgtggaggactacatcggcatcctgcacgacgccttcgacttcaactacggcgtgtgcgtgatgagaatgagagagggcctgaacgtgagcaagatgatgcaggcccacatcaaccccgtgttcgaccccgccgaggacggcaaggaggccagcgccagaggcgccagacccagcgtgagcggcgccctggaccccaaggccctggtgaaggaggagcaggccaccaccatcttccagagcgagcagggcaagaagaccatcgacatctactggctgttcgacgacggcggcctgaccctgctgatcccctacctgctgggcagaaagagaagatggagcaagtgcaagatcagagtgttcgtgggcggccagatcaacagaatggaccaggagagaaaggccatcatcagcctgctgagcaagttcagactgggcttccacgaggtgcacatcctgcccgacatcaaccagaaccccagagccgagcacaccaagagattcgaggacatgatcgcccccttcagactgaacgacggcttcaaggacgaggccaccgtgaacgagatgagaagagactgcccctggaagatcagcgacgaggagatcaccaagaacagagtgaagagcctgagacaggtgagactgaacgagatcgtgctggactacagcagagacgccgccctgatcgtgatcaccctgcccatcggcagaaagggcaagtgccccagcagcctgtacatggcctggctggagaccctgagccaggacctgagaccccccgtgatcctgatcagaggcaaccaggagaacgtgctgaccttctactgccagtag

SEQ ID NO: 99392 - DNA, 3090 bp, synthetic construct; identical to SEQ ID NO: 99390
  misc_feature 1..3090: note = Description of Artificial Sequence: Synthetic coding sequence
  source 1..3090: mol_type = other DNA

SEQ ID NO: 99393 - DNA, 1293 bp, synthetic construct
  misc_feature 1..1293: note = Description of Artificial Sequence: Synthetic coding sequence
  source 1..1293: mol_type = other DNA
atgagcctgaacaacagcagcaacgtgttcctggacagcgtgcccagcaacaccaacagattccaggtgagcgtgatcaacgagaaccacgagagcagcgccgccgccgacgacaacaccgaccccccccactacgaggagaccagcttcggcgacgaggcccagaagagactgagaatcagcttcagacccggcaaccaggagtgctacgacaacttcctgcagagcggcgagaccgccaagaccgacgccagcttccacgcctacgacagccacaccaacacctactacctgcagaccttcggccacaacaccatggacgccgtgcccaagatcgagtactacagaaacaccggcagcatcagcggccccaaggtgaacagacccagcctgctggagatccacgagcagctggccaagaacgtggccgtgacccccagcagcgccgacagagtggccaacggcgacggcatccccggcgacgagcaggccgagaacaaggaggacgaccaggccggcgtggtgaagttcggctgggtgaagggcgtgctggtgagatgcatgctgaacatctggggcgtgatgctgttcatcagactgagctggatcgtgggcgaggccggcatcggcctgggcgtgctgatcatcctgctgagcaccatggtgaccagcatcaccggcctgagcaccagcgccatcgccaccaacggcttcgtgagaggcggcggcgcctactacctgatcagcagaagcctgggccccgagttcggcggcagcatcggcctgatcttcgccttcgccaacgccgtggccgtggccatgtacgtggtgggcttcgccgagaccgtggtggacctgctgaaggagagcgacagcatgatggtggaccccaccaacgacatcagaatcatcggcagcatcaccgtggtgatcctgctgggcatcagcgtggccggcatggagtgggaggccaaggcccaggtgatcctgctggtgatcctgctgatcgccatcgccaacttcttcatcggcaccgtgatccccagcaacaacgagaagaagagcagaggcttcttcaactaccaggccagcatcttcgccgagaacttcggccccagattcaccaagggcgagggcttcttcagcgtgttcgccatcttcttccccgccgccaccggcatcctggccggcgccaacatcagcggcgacctggaggccctgagaaagcagggcgccagccccctgccccagggcgcccagagcagaagaagaagacagaccagcctgatctag

SEQ ID NO: 99394 - DNA, 3300 bp, synthetic construct
  misc_feature 1..3300: note = Description of Artificial Sequence: Synthetic coding sequence
  source 1..3300: mol_type = other DNA
atgagcctgaacaacagcagcaacgtgttcctggacagcgtgcccagcaacaccaacagattccaggtgagcgtgatcaacgagaaccacgagagcagcgccgccgccgacgacaacaccgaccccccccactacgaggagaccagcttcggcgacgaggcccagaagagactgagaatcagcttcagacccggcaaccaggagtgctacgacaacttcctgcagagcggcgagaccgccaagaccgacgccagcttccacgcctacgacagccacaccaacacctactacctgcagaccttcggccacaacaccatggacgccgtgcccaagatcgagtactacagaaacaccggcagcatcagcggccccaaggtgaacagacccagcctgctggagatccacgagcagctggccaagaacgtggccgtgacccccagcagcgccgacagagtggccaacggcgacggcatccccggcgacgagcaggccgagaacaaggaggacgaccaggccggcgtggtgaagttcggctgggtgaagggcgtgctggtgagatgcatgctgaacatctggggcgtgatgctgttcatcagactgagctggatcgtgggcgaggccggcatcggcctgggcgtgctgatcatcctgctgagcaccatggtgaccagcatcaccggcctgagcaccagcgccatcgccaccaacggcttcgtgagaggcggcggcgcctactacctgatcagcagaagcctgggccccgagttcggcggcagcatcggcctgatcttcgccttcgccaacgccgtggccgtggccatgtacgtggtgggcttcgccgagaccgtggtggacctgctgaaggagagcgacagcatgatggtggaccccaccaacgacatcagaatcatcggcagcatcaccgtggtgatcctgctgggcatcagcgtggccggcatggagtgggaggccaaggcccaggtgatcctgctggtgatcctgctgatcgccatcgccaacttcttcatcggcaccgtgatccccagcaacaacgagaagaagagcagaggcttcttcaactaccaggccagcatcttcgccgagaacttcggccccagattcaccaagggcgagggcttcttcagcgtgttcgccatcttcttccccgccgccaccggcatcctggccggcgccaacatcagcggcgacctggaggacccccaggacgccatccccagaggcaccatgctggccatcttcatcaccaccgtggcctacctgggcgtggccatctgcgtgggcgcctgcgtggtgagagacgccaccggcaacatgaacgacaccatcatcagcggcatgaactgcaacggcagcgccgcctgcggcctgggctacgacttcagcagatgcagacacgagccctgccagtacggcctgatgaacaacttccaggtgatgagcatggtgagcggcttcggccccctgatcaccgccggcatcttcagcgccaccctgagcagcgccctggccagcctggtgagcgcccccaaggtgttccaggccctgtgcaaggacaacatctacaaggccctgcagttcttcgccaagggctacggcaagaacaacgagcccctgagaggctacatcctgaccttcctgatcgccatggccttcatcctgatcgccgagctgaacaccatcgcccccatcatcagcaacttcttcctggccagctacgccctgatcaacttcagctgcttccacgccagctacgccaagagccccggctggagacccgcctacggcatctacaacatgtgggtgagcctgttcggcgccgtgctgtgctgcgccgtgatgttcgtgatcaactggtgggccgccgtgatcacctacgtgatcgagttcttcctgtacgtgtacgtgacctgcaagaagcccgacgtgaactggggcagcagcacccaggccctgagctacgtgagcgccctggacaacgccctggagctgaccaccgtggaggaccacgtgaagaacttcagaccccagtgcatcgtgctgaccggcggccccatgaccagacccgccctgctggacatcacccacgccttcaccaagaacagcggcctgtgcatctgctgcgaggtgttcgtgggccccagaaagctgtgcgtgaaggagatgaacagcggcatggccaagaagcaggcctggctgatcaagaacaagatcaaggccttctacgccgccgtggccgccgactgcttcagagacggcgtgagaagcctgctgcaggccagcggcctgggcagaatgaagcccaacaccctggtgatcggctacaagaagaactggagaaaggcccccctgaccgagatcgagaactacgtgggcatcatccacgacgccttcgacttcgagatcggcgtggtgatcgtgagaatcagccagggcttcgacatcagccaggtgctgcaggtgcaggaggagctggagagactggagcaggagagactggccctggaggccaccatcaaggacaacgagtgcgaggaggagagcggcggcatcagaggcctgttcaagaaggccggcaagctgaacatcaccaagaccacccccaagaaggacggcagcatcaacaccagccagagcatgcacgtgggcgagttcaaccagaagctggtggaggccagcacccagttcaagaagaagcaggagaagggcaccatcgacgtgtggtggctgttcgacgacggcggcctgaccctgctgatcccctacatcctgaccctgagaaagaagtggaaggactgcaagctgagaatctacgtgggcggcaagatcaacagaatcgaggaggagaagatcgtgatggccagcctgctgagcaagttcagaatcaagttcgccgacatccacatcatcggcgacatcaacatcagacccaacaaggagagctggaaggtgttcgaggagatgatcgagccctacagactgcacgagagctgcaaggacctgaccaccgccgagaagctgaagagagagaccccctggaagatcaccgacgccgagctggaggccgtgaaggagaagagctacagacaggtgagactgaacgagctgctgcaggagcacagcagagccgccaacctgatcgtgctgagcctgcccgtggccagaaagggcagcatcagcgacctgctgtacatggcctggctggagatcctgaccaagaacctgccccccgtgctgctggtgagaggcaaccacaagaacgtgctgaccttctacagctag

SEQ ID NO: 99395 - DNA, 3300 bp, synthetic construct
  misc_feature 1..3300: note = Description of Artificial Sequence: Synthetic coding sequence
  source 1..3300: mol_type = other DNA
atgagcctgaacaacagcagcaacgtgttcctggacagcgtgcccagcaacaccaacagattccaggtgagcgtgatcaacgagaaccacgagagcagcgccgccgccgacgacaacaccgaccccccccactacgaggagaccagcttcggcgacgaggcccagaagagactgagaatcagcttcagacccggcaaccaggagtgctacgacaacttcctgcagagcggcgagaccgccaagaccgacgccagcttccacgcctacgacagccacaccaacacctactacctgcagaccttcggccacaacaccatggacgccgtgcccaagatcgagtactacagaaacaccggcagcatcagcggccccaaggtgaacagacccagcctgctggagatccacgagcagctggccaagaacgtggccgtgacccccagcagcgccgacagagtggccaacggcgacggcatccccggcgacgagcaggccgagaacaaggaggacgaccaggccggcgtggtgaagttcggctgggtgaagggcgtgctggtgagatgcatgctgaacatctggggcgtgatgctgttcatcagactgagctggatcgtgggcgaggccggcatcggcctgggcgtgatcatcatcggcctgagcgtggtggtgaccaccctgaccggcatcagcatgagcgccatctgcaccaacggcgtggtgagaggcggcggcgcctactacctgatcagcagaagcctgggccccgagttcggcggcagcatcggcctgatcttcgccttcgccaacgccgtggccgtggccatgtacgtggtgggcttcgccgagaccgtggtggacctgctgaaggagagcgacagcatgatggtggaccccaccaacgacatcagaatcatcggcagcatcaccgtggtgatcctgctgggcatcagcgtggccggcatggagtgggaggccaaggcccaggtgatcctgctggtgatcctgctgatcgccatcgccaacttcttcatcggcaccgtgatccccagcaacaacgagaagaagagcagaggcttcttcaactaccaggccagcatcttcgccgagaacttcggccccagattcaccaagggcgagggcttcttcagcgtgttcgccatcttcttccccgccgccaccggcatcctggccggcgccaacatcagcggcgacctggaggacccccaggacgccatccccagaggcaccatgctggccatcttcatcaccaccgtggcctacctgggcgtggccatctgcgtgggcgcctgcgtggtgagagacgccaccggcaacatgaacgacaccatcatcagcggcatgaactgcaacggcagcgccgcctgcggcctgggctacgacttcagcagatgcagacacgagccctgccagtacggcctgatgaacaacttccaggtgatgagcatggtgagcggcttcggccccctgatcaccgccggcatcttcagcgccaccctgagcagcgccctggccagcctggtgagcgcccccaaggtgttccaggccctgtgcaaggacaacatctacaaggccctgcagttcttcgccaagggctacggcaagaacaacgagcccctgagaggctacatcctgaccttcctgatcgccatggccttcatcctgatcgccgagctgaacaccatcgcccccatcatcagcaacttcttcctggccagctacgccctgatcaacttcagctgcttccacgccagctacgccaagagccccggctggagacccgcctacggcatctacaacatgtgggtgagcctgttcggcgccgtgctgtgctgcgccgtgatgttcgtgatcaactggtgggccgccgtgatcacctacgtgatcgagttcttcctgtacgtgtacgtgacctgcaagaagcccgacgtgaactggggcagcagcacccaggccctgagctacgtgagcgccctggacaacgccctggagctgaccaccgtggaggaccacgtgaagaacttcagaccccagtgcatcgtgctgaccggcggccccatgaccagacccgccctgctggacatcacccacgccttcaccaagaacagcggcctgtgcatctgctgcgaggtgttcgtgggccccagaaagctgtgcgtgaaggagatgaacagcggcatggccaagaagcaggcctggctgatcaagaacaagatcaaggccttctacgccgccgtggccgccgactgcttcagagacggcgtgagaagcctgctgcaggccagcggcctgggcagaatgaagcccaacaccctggtgatcggctacaagaagaactggagaaaggcccccctgaccgagatcgagaactacgtgggcatcatccacgacgccttcgacttcgagatcggcgtggtgatcgtgagaatcagccagggcttcgacatcagccaggtgctgcaggtgcaggaggagctggagagactggagcaggagagactggccctggaggccaccatcaaggacaacgagtgcgaggaggagagcggcggcatcagaggcctgttcaagaaggccggcaagctgaacatcaccaagaccacccccaagaaggacggcagcatcaacaccagccagagcatgcacgtgggcgagttcaaccagaagctggtggaggccagcacccagttcaagaagaagcaggagaagggcaccatcgacgtgtggtggctgttcgacgacggcggcctgaccctgctgatcccctacatcctgaccctgagaaagaagtggaaggactgcaagctgagaatctacgtgggcggcaagatcaacagaatcgaggaggagaagatcgtgatggccagcctgctgagcaagttcagaatcaagttcgccgacatccacatcatcggcgacatcaacatcagacccaacaaggagagctggaaggtgttcgaggagatgatcgagccctacagactgcacgagagctgcaaggacctgaccaccgccgagaagctgaagagagagaccccctggaagatcaccgacgccgagctggaggccgtgaaggagaagagctacagacaggtgagactgaacgagctgctgcaggagcacagcagagccgccaacctgatcgtgctgagcctgcccgtggccagaaagggcagcatcagcgacctgctgtacatggcctggctggagatcctgaccaagaacctgccccccgtgctgctggtgagaggcaaccacaagaacgtgctgaccttctacagctag

SEQ ID NO: 99396 - DNA, 1782 bp, synthetic construct
  misc_feature 1..1782: note = Description of Artificial Sequence: Synthetic coding sequence
  source 1..1782: mol_type = other DNA
atgctgaacatctggggcgtgatgctgttcatcagactgagctggatcgtgggcgaggccggcatcggcctgggcgtgctgatcatcctgctgagcaccatggtgaccagcatcaccggcctgagcaccagcgccatcgccaccaacggcttcgtgagaggcggcggcgcctactacctgatcagcagaagcctgggccccgagttcggcggcagcatcggcctgatcttcgccttcgccaacgccgtggccgtggccatgtacgtggtgggcttcgccgagaccgtggtggacctgctgaaggagagcgacagcatgatggtggaccccaccaacgacatcagaatcatcggcagcatcaccgtggtgatcctgctgggcatcagcgtggccggcatggagtgggaggccaaggcccaggtgatcctgctggtgatcctgctgatcgccatcgccaacttcttcatcggcaccgtgatccccagcaacaacgagaagaagagcagaggcttcttcaactaccaggccagcatcttcgccgagaacttcggccccagattcaccaagggcgagggcttcttcagcgtgttcgccatcttcttccccgccgccaccggcatcctggccggcgccaacatcagcggcgacctggaggacccccaggacgccatccccagaggcaccatgctggccatcttcatcaccaccgtggcctacctgggcgtggccatctgcgtgggcgcctgcgtggtgagagacgccaccggcaacatgaacgacaccatcatcagcggcatgaactgcaacggcagcgccgcctgcggcctgggctacgacttcagcagatgcagacacgagccctgccagtacggcctgatgaacaacttccaggtgatgagcatggtgagcggcttcggccccctgatcaccgccggcatcttcagcgccaccctgagcagcgccctggccagcctggtgagcgcccccaaggtgttccaggccctgtgcaaggacaacatctacaaggccctgcagttcttcgccaagggctacggcaagaacaacgagcccctgagaggctacatcctgaccttcctgatcgccatggccttcatcctgatcgccgagctgaacaccatcgcccccatcatcagcaacttcttcctggccagctacgccctgatcaacttcagctgcttccacgccagctacgccaagagccccggctggagacccgcctacggcatctacaacatgtgggtgagcctgttcggcgccgtgctgtgctgcgccgtgatgttcgtgatcaactggtgggccgccgtgatcacctacgtgatcgagttcttcctgtacgtgtacgtgacctgcaagaagcccgacgtgaactggggcagcagcacccaggccctgagctacgtgagcgccctggacaacgccctggagctgaccaccgtggaggaccacgtgaagaacttcagaccccagtgcatcgtgctgaccggcggccccatgaccagacccgccctgctggacatcacccacgccttcaccaagaacagcggcctgtgcatctgctgcgaggtgttcgtgggccccagaaagctgtgcgtgaaggagatgaacagcggcatggccaagaccggcctggcctacaaggagcagaaccagggcttcctgtgctgcagcggcggcagactgttccagggctggtgccccaagagcagcagcggcctgagactgagaaagaacgagaccaagcacagcggcgactggatctag

SEQ ID NO: 99397 - DNA, 540 bp, synthetic construct
  misc_feature 1..540: note = Description of Artificial Sequence: Synthetic coding sequence
  source 1..540: mol_type = other DNA
atgagaaccatgagagccgtgcagctgcagatgaccatcctgacccaccacatcatgaagaagcccctgctgggcatgaagctgagaaaggacagcgagagcgccctgggcctgggcatcagaagcgccatgaccatcagcagcaagcaggccctgagctacgtgagcgccctggacaacgccctggagctgaccaccgtggaggaccacgtgaagaacttcagaccccagtgcatcgtgctgaccggcggccccatgaccagacccgccctgctggacatcacccacgccttcaccaagaacagcggcctgtgcatctgctgcgaggtgttcgtgggccccagaaagctgtgcgtgaaggagatgaacagcggcatggccaagaagcaggcctggctgatcaagaacaagatcaaggccttctacgccgccgtggccgccgactgcttcagagacggcgtgagaagcctgctgcaggccagcggcctgggcagaatgaagcccaacaccctggtgatcggctacaagaagaactggtag

SEQ ID NO: 99398 - DNA, 3300 bp, synthetic construct; identical to SEQ ID NO: 99394
  misc_feature 1..3300: note = Description of Artificial Sequence: Synthetic coding sequence
  source 1..3300: mol_type = other DNA

SEQ ID NO: 99399 - DNA, 1947 bp, synthetic construct
  misc_feature 1..1947: note = Description of Artificial Sequence: Synthetic coding sequence
  source 1..1947: mol_type = other DNA
atgctgaacatctggggcgtgatgctgttcatcagactgagctggatcgtgggcgaggccggcatcggcctgggcgtgctgatcatcctgctgagcaccatggtgaccagcatcaccggcctgagcaccagcgccatcgccaccaacggcttcgtgagaggcggcggcgcctactacctgatcagcagaagcctgggccccgagttcggcggcagcatcggcctgatcttcgccttcgccaacgccgtggccgtggccatgtacgtggtgggcttcgccgagaccgtggtggacctgctgaaggagagcgacagcatgatggtggaccccaccaacgacatcagaatcatcggcagcatcaccgtggtgatcctgctgggcatcagcgtggccggcatggagtgggaggccaaggcccaggtgatcctgctggtgatcctgctgatcgccatcgccaacttcttcatcggcaccgtgatccccagcaacaacgagaagaagagcagaggcttcttcaactaccaggccagcatcttcgccgagaacttcggccccagattcaccaagggcgagggcttcttcagcgtgttcgccatcttcttccccgccgccaccggcatcctggccggcgccaacatcagcggcgacctggaggacccccaggacgccatccccagaggcaccatgctggccatcttcatcaccaccgtggcctacctgggcgtggccatctgcgtgggcgcctgcgtggtgagagacgccaccggcaacatgaacgacaccatcatcagcggcatgaactgcaacggcagcgccgcctgcggcctgggctacgacttcagcagatgcagacacgagccctgccagtacggcctgatgaacaacttccaggtgatgagcatggtgagcggcttcggccccctgatcaccgccggcatcttcagcgccaccctgagcagcgccctggccagcctggtgagcgcccccaaggtgttccaggccctgtgcaaggacaacatctacaaggccctgcagttcttcgccaagggctacggcaagaacaacgagcccctgagaggctacatcctgaccttcctgatcgccatggccttcatcctgatcgccgagctgaacaccatcgcccccatcatcagcaacttcttcctggccagctacgccctgatcaacttcagctgcttccacgccagctacgccaagagccccggctggagacccgcctacggcatctacaacatgtgggtgagcctgttcggcgccgtgctgtgctgcgccgtgatgttcgtgatcaactggtgggccgccgtgatcacctacgtgatcgagttcttcctgtacgtgtacgtgacctgcaagaagcccgacgtgaactggggcagcagcacccaggccctgagctacgtgagcgccctggacaacgccctggagctgaccaccgtggaggaccacgtgaagaacttcagaccccagtgcatcgtgctgaccggcggccccatgaccagacccgccctgctggacatcacccacgccttcaccaagaacagcggcctgtgcatctgctgcgaggtgttcgtgggccccagaaagctgtgcgtgaaggagatgaacagcggcatggccaagaagcaggcctggctgatcaagaacaagatcaaggccttctacgccgccgtggccgccgactgcttcagagacggcgtgagaagcctgctgcaggccagcggcctgggcagaatgaagcccaacaccctggtgatcggctacaagaagaactggagaaaggcccccctgaccgagatcgagaactacgtgggcatcatccacgacgccttcgacttcgagatcggcgtggtgatcgtgagaatcagccagggcttcgacatcagccaggtgctgcaggtgcaggaggagctggagagactggagtag

SEQ ID NO: 99400 - DNA, 3639 bp, synthetic construct
  misc_feature 1..3639: note = Description of Artificial Sequence: Synthetic coding sequence
  source 1..3639: mol_type = other DNA
atggagcccagacccaccgcccccagcagcggcgcccccggcctggccggcgtgggcgagacccccagcgccgccgccctggccgccgccagagtggagctgcccggcaccgccgtgcccagcgtgcccgaggacgccgcccccgccagcagagacggcggcggcgtgagagacgagggccccgccgccgccggcgacggcctgggcagacccctgggccccacccccagccagagcagattccaggtggacctggtgagcgagaacgccggcagagccgccgccgccgccgccgccgccgccgccgccgccgccgccgccggcgccggcgccggcgccaagcagacccccgccgacggcgaggccagcggcgagagcgagcccgccaagggcagcgaggaggccaagggcagattcagagtgaacttcgtggaccccgccgccagcagcagcgccgaggacagcctgagcgacgccgccggcgtgggcgtggacggccccaacgtgagcttccagaacggcggcgacaccgtgctgagcgagggcagcagcctgcacagcggcggcggcggcggcagcggccaccaccagcactactactacgacacccacaccaacacctactacctgagaaccttcggccacaacaccatggacgccgtgcccagaatcgaccactacagacacaccgccgcccagctgggcgagaagctgctgagacccagcctggccgagctgcacgacgagctggagaaggagcccttcgaggacggcttcgccaacggcgaggagagcacccccaccagagacgccgtggtgacctacaccgccgagagcaagggcgtggtgaagttcggctggatcaagggcgtgctggtgagatgcatgctgaacatctggggcgtgatgctgttcatcagactgagctggatcgtgggccaggccggcatcggcctgagcgtgctggtgatcatgatggccaccgtggtgaccaccatcaccggcctgagcaccagcgccatcgccaccaacggcttcgtgagaggcggcggcgcctactacctgatcagcagaagcctgggccccgagttcggcggcgccatcggcctgatcttcgccttcgccaacgccgtggccgtggccatgtacgtggtgggcttcgccgagaccgtggtggagctgctgaaggagcacagcatcctgatgatcgacgagatcaacgacatcagaatcatcggcgccatcaccgtggtgatcctgctgggcatcagcgtggccggcatggagtgggaggccaaggcccagatcgtgctgctggtgatcctgctgctggccatcggcgacttcgtgatcggcaccttcatccccctggagagcaagaagcccaagggcttcttcggctacaagagcgagatcttcaacgagaacttcggccccgacttcagagaggaggagaccttcttcagcgtgttcgccatcttcttccccgccgccaccggcatcctggccggcgccaacatcagcggcgacctggccgacccccagagcgccatccccaagggcaccctgctggccatcctgatcaccaccctggtgtacgtgggcatcgccgtgagcgtgggcagctgcgtggtgagagacgccaccggcaacgtgaacgacaccatcgtgaccgagctgaccaactgcaccagcgccgcctgcaagctgaacttcgacttcagcagctgcgagagcagcccctgcagctacggcctgatgaacaacttccaggtgatgagcatggtgagcggcttcacccccctgatcagcgccggcatcttcagcgccaccctgagcagcgccctggccagcctggtgagcgcccccaagatcttccaggccctgtgcaaggacaacatctaccccgccttccagatgttcgccaagggctacggcaagaacaacgagcccctgagaggctacatcctgaccttcctgatcgccctgggcttcatcctgatcgccgagctgaacgtgatcgcccccatcatcagcaacttcttcctggccagctacgccctgatcaacttcagcgtgttccacgccagcctggccaagagccccggctggagacccgccttcaagtactacaacatgtggatcagcctgctgggcgccatcctgtgctgcatcgtgatgttcgtgatcaactggtgggccgccctgctgacctacgtgatcgtgctgggcctgtacatctacgtgacctacaagaagcccgacgtgaactggggcagcagcacccaggccctgacctacctgaacgccctgcagcacagcatcagactgagcggcgtggaggaccacgtgaagaacttcagaccccagtgcctggtgatgaccggcgcccccaacagcagacccgccctgctgcacctggtgcacgacttcaccaagaacgtgggcctgatgatctgcggccacgtgcacatgggccccagaagacaggccatgaaggagatgagcatcgaccaggccaagtaccagagatggctgatcaagaacaagatgaaggccttctacgcccccgtgcacgccgacgacctgagagagggcgcccagtacctgatgcaggccgccggcctgggcagaatgaagcccaacaccctggtgctgggcttcaagaaggactggctgcaggccgacatgagagacgtggacatgtacatcaacctgttccacgacgccttcgacatccagtacggcgtggtggtgatcagactgaaggagggcctggacatcagccacctgcagggccaggaggagctgctgagcagccaggagaagagccccggcaccaaggacgtggtggtgagcgtggagtacagcaagaagagcgacctggacaccagcaagcccctgagcgagaagcccatcacccacaaggtggaggaggaggacggcaagaccgccacccagcccctgctgaagaaggagagcaagggccccatcgtgcccctgaacgtggccgaccagaagctgctggaggccagcacccagttccagaagaagcagggcaagaacaccatcgacgtgtggtggctgttcgacgacggcggcctgaccctgctgatcccctacctgctgaccaccaagaagaagtggaaggactgcaagatcagagtgttcatcggcggcaagatcaacagaatcgaccacgacagaagagccatggccaccctgctgagcaagttcagaatcgacttcagcgacatcatggtgctgggcgacatcaacaccaagcccaagaaggagaacatcatcgccttcgaggagatcatcgagccctacagactgcacgaggacgacaaggagcaggacatcgccgacaagatgaaggaggacgagccctggagaatcaccgacaacgagctggagctgtacaagaccaagacctacagacagatcagactgaacgagctgctgaaggagcacagcagcaccgccaacatcatcgtgatgagcctgcccgtggccagaaagggcgccgtgagcagcgccctgtacatggcctggctggaggccctgagcaaggacctgccccccatcctgctggtgagaggcaaccaccagagcgtgctgaccttctacagctag

SEQ ID NO: 99401 - DNA, 3591 bp, synthetic construct
  misc_feature 1..3591: note = Description of Artificial Sequence: Synthetic coding sequence
  source 1..3591: mol_type = other DNA
atggagcccagacccaccgcccccagcagcggcgcccccggcctggccggcgtgggcgagacccccagcgccgccgccctggccgccgccagagtggagctgcccggcaccgccgtgcccagcgtgcccgaggacgccgcccccgccagcagagacggcggcggcgtgagagacgagggccccgccgccgccggcgacggcctgggcagacccctgggccccacccccagccagagcagattccaggtggacctggtgagcgagaacgccggcagagccgccgccgccgccgccgccgccgccgccgccgccgccgccgccggcgccggcgccggcgccaagcagacccccgccgacggcgaggccagcggcgagagcgagcccgccaagggcagcgaggaggccaagggcagattcagagtgaacttcgtggaccccgccgccagcagcagcgccgaggacagcctgagcgacgccgccggcgtgggcgtggacggccccaacgtgagcttccagaacggcggcgacaccgtgctgagcgagggcagcagcctgcacagcggcggcggcggcggcagcggccaccaccagcactactactacgacacccacaccaacacctactacctgagaaccttcggccacaacaccatggacgccgtgcccagaatcgaccactacagacacaccgccgcccagctgggcgagaagctgctgagacccagcctggccgagctgcacgacgagctggagaaggagcccttcgaggacggcttcgccaacggcgaggagagcacccccaccagagacgccgtggtgacctacaccgccgagagcaagggcgtggtgaagttcggctggatcaagggcgtgctggtgagatgcatgctgaacatctggggcgtgatgctgttcatcagactgagctggatcgtgggccaggccggcatcggcctgagcgtgctggtgatcatgatggccaccgtggtgaccaccatcaccggcctgagcaccagcgccatcgccaccaacggcttcgtgagaggcggcggcgcctactacctgatcagcagaagcctgggccccgagttcggcggcgccatcggcctgatcttcgccttcgccaacgccgtggccgtggccatgtacgtggtgggcttcgccgagaccgtggtggagctgctgaaggagcacagcatcctgatgatcgacgagatcaacgacatcagaatcatcggcgccatcaccgtggtgatcctgctgggcatcagcgtggccggcatggagtgggaggccaaggcccagatcgtgctgctggtgatcctgctgctggccatcggcgacttcgtgatcggcaccttcatccccctggagagcaagaagcccaagggcttcttcggctacaagagcgagatcttcaacgagaacttcggccccgacttcagagaggaggagaccttcttcagcgtgttcgccatcttcttccccgccgccaccggcatcctggccggcgccaacatcagcggcgacctggccgacccccagagcgccatccccaagggcaccctgctggccatcctgatcaccaccctggtgtacgtgggcatcgccgtgagcgtgggcagctgcgtggtgagagacgccaccggcaacgtgaacgacaccatcgtgaccgagctgaccaactgcaccagcgccgcctgcaagctgaacttcgacttcagcagctgcgagagcagcccctgcagctacggcctgatgaacaacttccaggtgatgagcatggtgagcggcttcacccccctgatcagcgccggcatcttcagcgccaccctgagcagcgccctggccagcctggtgagcgcccccaagatcttccaggccctgtgcaaggacaacatctaccccgccttccagatgttcgccaagggctacggcaagaacaacgagcccctgagaggctacatcctgaccttcctgatcgccctgggcttcatcctgatcgccgagctgaacgtgatcgcccccatcatcagcaacttcttcctggccagctacgccctgatcaacttcagcgtgttccacgccagcctggccaagagccccggctggagacccgccttcaagtactacaacatgtggatcagcctgctgggcgccatcctgtgctgcatcgtgatgttcgtgatcaactggtgggccgccctgctgacctacgtgatcgtgctgggcctgtacatctacgtgacctacaagaagcccgacgtgaactggggcagcagcacccaggccctgacctacctgaacgccctgcagcacagcatcagactgagcggcgtggaggaccacgtgaagaacttcagaccccagtgcctggtgatgaccggcgcccccaacagcagacccgccctgctgcacctggtgcacgacttcaccaagaacgtgggcctgatgatctgcggccacgtgcacatgggccccagaagacaggccatgaaggagatgagcatcgaccaggccaagtaccagagatggctgatcaagaacaagatgaaggccttctacgcccccgtgcacgccgacgacctgagagagggcgcccagtacctgatgcaggccgccggcctgggcagaatgaagcccaacaccctggtgctgggcttcaagaaggactggctgcaggccgacatgagagacgtggacatgtacatcaacctgttccacgacgccttcgacatccagtacggcgtggtggtgatcagactgaaggagggcctggacatcagccacctgcagggccaggaggagctgctgagcagccaggagaagagccccggcaccaaggacgtggtggtgagcgtggagtacagcaagaagagcgacctggacaccagcaagcccctgagcgagaagcccatcacccacaaggagagcaagggccccatcgtgcccctgaacgtggccgaccagaagctgctggaggccagcacccagttccagaagaagcagggcaagaacaccatcgacgtgtggtggctgttcgacgacggcggcctgaccctgctgatcccctacctgctgaccaccaagaagaagtggaaggactgcaagatcagagtgttcatcggcggcaagatcaacagaatcgaccacgacagaagagccatggccaccctgctgagcaagttcagaatcgacttcagcgacatcatggtgctgggcgacatcaacaccaagcccaagaaggagaacatcatcgccttcgaggagatcatcgagccctacagactgcacgaggacgacaaggagcaggacatcgccgacaagatgaaggaggacgagccctggagaatcaccgacaacgagctggagctgtacaagaccaagacctacagacagatcagactgaacgagctgctgaaggagcacagcagcaccgccaacatcatcgtgatgagcctgcccgtggccagaaagggcgccgtgagcagcgccctgtacatggcctggctggaggccctgagcaaggacctgccccccatcctgctggtgagaggcaaccaccagagcgtgctgaccttctacagctag

SEQ ID NO: 99402 - DNA, 1788 bp, synthetic construct
  misc_feature 1..1788: note = Description of Artificial Sequence: Synthetic coding sequence
  source 1..1788: mol_type = other DNA
atgaagttcttcagctacatcctggtgtacagaagattcctgttcgtggtgttcaccgtgctggtgctgctgcccctgcccatcgtgctgcacaccaaggaggccgagtgcgcctacaccctgttcgtggtggccaccttctggctgaccgaggccctgcccctgagcgtgaccgccctgctgcccagcctgatgctgcccatgttcggcatcatgcccagcaagaaggtggccagcgcctacttcaaggacttccacctgctgctgatcggcgtgatctgcctggccaccagcatcgagaagtggaacctgcacaagagaatcgccctgaagatggtgatgatggtgggcgtgaaccccgcctggctgaccctgggcttcatgagcagcaccgccttcctgagcatgtggctgagcaacaccagcaccgccgccatggtgatgcccatcgccgaggccgtggtgcagcagatcatcaacgccgaggccgaggtggaggccacccagatgacctacttcaacggcagcaccaaccacggcctggagatcgacgagagcgtgaacggccacgagatcaacgagagaaaggagaagaccaagcccgtgcccggctacaacaacgacaccggcaagatcagcagcaaggtggagctggagaagaacagcggcatgagaaccaagtacagaaccaagaagggccacgtgaccagaaagctgacctgcctgtgcatcgcctacagcagcaccatcggcggcctgaccaccatcaccggcaccagcaccaacctgatcttcgccgagtacttcaacaccagataccccgactgcagatgcctgaacttcggcagctggttcaccttcagcttccccgccgccctgatcatcctgctgctgagctggatctggctgcagtggctgttcctgggcttcaacttcaaggagatgttcaagtgcggcaagaccaagaccgtgcagcagaaggcctgcgccgaggtgatcaagcaggagtaccagaagctgggccccatcagataccaggagatcgtgaccctggtgctgttcatcatcatggccctgctgtggttcagcagagaccccggcttcgtgcccggctggagcgccctgttcagcgagtaccccggcttcgccaccgacagcaccgtggccctgctgatcggcctgctgttcttcctgatccccgccaagaccctgaccaagaccacccccaccggcgagatcgtggccttcgactacagccccctgatcacctggaaggagttccagagcttcatgccctgggacatcgccatcctggtgggcggcggcttcgccctggccgacggctgcgaggagagcggcctgagcaagtggatcggcaacaagctgagccccctgggcagcctgcccgcctggctgatcatcctgatcagcagcctgatggtgaccagcctgaccgaggtggccagcaaccccgccaccatcaccctgttcctgcccatcctgagccccctggccgaggccatccacgtgaaccccctgtacatcctgatccccagcaccctgtgcaccagcttcgccttcctgctgcccgtggccaacccccccaacgccatcgtgttcagctacggccacctgaaggtgatcgacatggtgaaggccggcctgggcgtgaacatcgtgggcgtggccgtggtgatgctgggcatctgcacctggatcgtgcccatgttcgacctgtacacctaccccagctgggcccccgccatgagcaacgagaccatgccctag

SEQ ID NO: 99403 - DNA, 486 bp, synthetic construct
  misc_feature 1..486: note = Description of Artificial Sequence: Synthetic coding sequence
  source 1..486: mol_type = other DNA
atgctgcccatgttcggcatcatgcccagcaagaaggtggccagcgcctacttcaaggacttccacctgctgctgatcggcgtgatctgcctggccaccagcatcgagaagtggaacctgcacaagagaatcgccctgaagatggtgatgatggtgggcgtgaaccccgcctggctgaccctgggcttcatgagcagcaccgccttcctgagcatgtggctgagcaacaccagcaccgccgccatggtgatgcccatcgccgaggccgtggtgcagcagatcatcaacgccgaggccgaggtggaggccacccagatgacctacttcaacggcagcaccaaccacggcctggagatcgacgagagcgtgaacggccacgagatcaacgagagaaaggagaagaccaagcccgtgcccggctacaacaacgacaccggcaagatcagcagcaaggtggagctggagaagtacctgcaggtgagatag

SEQ ID NO: 99404 - DNA, 1881 bp, synthetic construct
  misc_feature 1..1881: note = Description of Artificial Sequence: Synthetic coding sequence
  source 1..1881: mol_type = other DNA
atgggcctgctgcagggcctgctgagagtgagaaagctgctgctggtggtgtgcgtgcccctgctgctgctgcccctgcccgtgctgcaccccagcagcgaggccagctgcgcctacgtgctgatcgtgaccgccgtgtactgggtgagcgaggccgtgcccctgggcgccgccgccctggtgcccgccttcctgtaccccttcttcggcgtgctgagaagcaacgaggtggccgccgagtacttcaagaacaccaccctgctgctggtgggcgtgatctgcgtggccgccgccgtggagaagtggaacctgcacaagagaatcgccctgagaatggtgctgatggccggcgccaagcccggcatgctgctgctgtgcttcatgtgctgcaccaccctgctgagcatgtggctgagcaacaccagcaccaccgccatggtgatgcccatcgtggaggccgtgctgcaggagctggtgagcgccgaggacgagcagctggtggccggcaacagcaacaccgaggaggccgagcccatcagcctggacgtgaagaacagccagcccagcctggagctgatcttcgtgaacgaggagagcaacgccgacctgaccaccctgatgcacaacgagaacctgaacggcgtgcccagcatcaccaaccccatcaagaccgccaaccagcaccagggcaagaagcagcaccccagccaggagaagccccaggtgctgacccccagccccagaaagcagaagctgaacagaaagtacagaagccaccacgaccagatgatctgcaagtgcctgagcctgagcatcagctacagcgccaccatcggcggcctgaccaccatcatcggcaccagcaccagcctgatcttcctggagcacttcaacaaccagtaccccgccgccgaggtggtgaacttcggcacctggttcctgttcagcttccccatcagcctgatcatgctggtggtgagctggttctggatgcactggctgttcctgggctgcaacttcaaggagacctgcagcctgagcaagaagaagaagaccaagagagagcagctgagcgagaagagaatccaggaggagtacgagaagctgggcgacatcagctaccccgagatggtgaccggcttcttcttcatcctgatgaccgtgctgtggttcaccagagagcccggcttcgtgcccggctgggacagcttcttcgagaagaagggctacagaaccgacgccaccgtgagcgtgttcctgggcttcctgctgttcctgatccccgccaagaagccctgcttcggcaagaagaacgacggcgagaaccaggagcacagcctgggcaccgagcccatcatcacctggaaggacttccagaagaccatgccctgggagatcgtgatcctggtgggcggcggctacgccctggccagcggcagcaagagcagcggcctgagcacctggatcggcaaccagatgctgagcctgagcagcctgcccccctgggccgtgaccctgctggcctgcatcctggtgagcatcgtgaccgagttcgtgagcaaccccgccaccatcaccatcttcctgcccatcctgtgcagcctgagcgagaccctgcacatcaaccccctgtacaccctgatccccgtgaccatgtgcatcagcttcgccgtgatgctgcccgtgggcaacccccccaacgccatcgtgttcagctacggccactgccagatcaaggacatggtgaaggccggcctgggcgtgaacgtgatcggcctggtgatcgtgatggtggccatcaacacctggggcgtgagcctgttccacctggacacctaccccgcctgggccagagtgagcaacatcaccgaccaggcctag

SEQ ID NO: 99405 - DNA, 1569 bp, synthetic construct
  misc_feature 1..1569: note = Description of Artificial Sequence: Synthetic coding sequence
  source 1..1569: mol_type = other DNA
atggccagcgccctgagctacgtgagcaagttcaagagcttcgtgatcctgttcgtgacccccctgctgctgctgcccctggtgatcctgatgcccgccaagttcgtgagatgcgcctacgtgatcatcctgatggccatctactggtgcaccgaggtgatccccctggccgtgaccagcctgatgcccgtgctgctgttccccctgttccagatcctggacagcagacaggtgtgcgtgcagtacatgaaggacaccaacatgctgttcctgggcggcctgatcgtggccgtggccgtggagagatggaacctgcacaagagaatcgccctgagaaccctgctgtgggtgggcgccaagcccgccagactgatgctgggcttcatgggcgtgaccgccctgctgagcatgtggatcagcaacaccgccaccaccgccatgatggtgcccatcgtggaggccatcctgcagcagatggaggccaccagcgccgccaccgaggccggcctggagctggtggacaagggcaaggccaaggagctgcccggcagccaggtgatcttcgagggccccaccctgggccagcaggaggaccaggagagaaagagactgtgcaaggccatgaccctgtgcatctgctacgccgccagcatcggcggcaccgccaccctgaccggcaccggccccaacgtggtgctgctgggccagatgaacgagctgttccccgacagcaaggacctggtgaacttcgccagctggttcgccttcgccttccccaacatgctggtgatgctgctgttcgcctggctgtggctgcagttcgtgtacatgagattcaacttcaagaagagctggggctgcggcctggagagcaagaagaacgagaaggccgccctgaaggtgctgcaggaggagtacagaaagctgggccccctgagcttcgccgagatcaacgtgctgatctgcttcttcctgctggtgatcctgtggttcagcagagaccccggcttcatgcccggctggctgaccgtggcctgggtggagggcgagaccaagtacgtgagcgacgccaccgtggccatcttcgtggccaccctgctgttcatcgtgcccagccagaagcccaagttcaacttcagaagccagaccgaggaggagagaaagacccccttctaccccccccccctgctggactggaaggtgacccaggagaaggtgccctggggcatcgtgctgctgctgggcggcggcttcgccctggccaagggcagcgaggccagcggcctgagcgtgtggatgggcaagcagatggagcccctgcacgccgtgccccccgccgccatcaccctgatcctgagcctgctggtggccgtgttcaccgagtgcaccagcaacgtggccaccaccaccctgttcctgcccatcttcgccagcatggtgaagaccggcgtgatcatgaacatcatcggcgtgttctgcgtgttcctggccgtgaacacctggggcagagccatcttcgacctggaccacttccccgactgggccaacgtgacccacatcgagacctag

SEQ ID NO: 99406 - DNA, 1707 bp, synthetic construct
  misc_feature 1..1707: note = Description of Artificial Sequence: Synthetic coding sequence
  source 1..1707: mol_type = other DNA
atggccagcgccctgagctacgtgagcaagttcaagagcttcgtgatcctgttcgtgacccccctgctgctgctgcccctggtgatcctgatgcccgccaagttcgtgagatgcgcctacgtgatcatcctgatggccatctactggtgcaccgaggtgatccccctggccgtgaccagcctgatgcccgtgctgctgttccccctgttccagatcctggacagcagacaggtgtgcgtgcagtacatgaaggacaccaacatgctgttcctgggcggcctgatcgtggccgtggccgtggagagatggaacctgcacaagagaatcgccctgagaaccctgctgtgggtgggcgccaagcccgccagactgatgctgggcttcatgggcgtgaccgccctgctgagcatgtggatcagcaacaccgccaccaccgccatgatggtgcccatcgtggaggccatcctgcagcagatggaggccaccagcgccgccaccgaggccggcctggagctggtggacaagggcaaggccaaggagctgcccggcagccaggtgatcttcgagggccccaccctgggccagcaggaggaccaggagagaaagagactgtgcaaggccatgaccctgtgcatctgctacgccgccagcatcggcggcaccgccaccctgaccggcaccggccccaacgtggtgctgctgggccagatgaacgagctgttccccgacagcaaggacctggtgaacttcgccagctggttcgccttcgccttccccaacatgctggtgatgctgctgttcgcctggctgtggctgcagttcgtgtacatgagattcaacttcaagaagagctggggctgcggcctggagagcaagaagaacgagaaggccgccctgaaggtgctgcaggaggagtacagaaagctgggccccctgagcttcgccgagatcaacgtgctgatctgcttcttcctgctggtgatcctgtggttcagcagagaccccggcttcatgcccggctggctgaccgtggcctgggtggagggcgagaccaagtacgtgagcgacgccaccgtggccatcttcgtggccaccctgctgttcatcgtgcccagccagaagcccaagttcaacttcagaagccagaccgaggaggagagaaagacccccttctaccccccccccctgctggactggaaggtgacccaggagaaggtgccctggggcatcgtgctgctgctgggcggcggcttcgccctggccaagggcagcgaggccagcggcctgagcgtgtggatgggcaagcagatggagcccctgcacgccgtgccccccgccgccatcaccctgatcctgagcctgctggtggccgtgttcaccgagtgcaccagcaacgtggccaccaccaccctgttcctgcccatcttcgccagcatgagcagaagcatcggcctgaaccccctgtacatcatgctgccctgcaccctgagcgccagcttcgccttcatgctgcccgtggccaccccccccaacgccatcgtgttcacctacggccacctgaaggtggccgacatggtgaagaccggcgtgatcatgaacatcatcggcgtgttctgcgtgttcctggccgtgaacacctggggcagagccatcttcgacctggaccacttccccgactgggccaacgtgacccacatcgagacctag

SEQ ID NO: 99407 - DNA, 1578 bp, synthetic construct
  misc_feature 1..1578: note = Description of Artificial Sequence: Synthetic coding sequence
  source 1..1578: mol_type = other DNA
atggccagcgccctgagctacgtgagcaagttcaagagcttcgtgatcctgttcgtgacccccctgctgctgctgcccctggtgatcctgatgcccgccaaggtgtgcgtgcagtacatgaaggacaccaacatgctgttcctgggcggcctgatcgtggccgtggccgtggagagatggaacctgcacaagagaatcgccctgagaaccctgctgtgggtgggcgccaagcccgccagactgatgctgggcttcatgggcgtgaccgccctgctgagcatgtggatcagcaacaccgccaccaccgccatgatggtgcccatcgtggaggccatcctgcagcagatggaggccaccagcgccgccaccgaggccggcctggagctggtggacaagggcaaggccaaggagctgcccggcagccaggtgatcttcgagggccccaccctgggccagcaggaggaccaggagagaaagagactgtgcaaggccatgaccctgtgcatctgctacgccgccagcatcggcggcaccgccaccctgaccggcaccggccccaacgtggtgctgctgggccagatgaacgagctgttccccgacagcaaggacctggtgaacttcgccagctggttcgccttcgccttccccaacatgctggtgatgctgctgttcgcctggctgtggctgcagttcgtgtacatgagattcaacttcaagaagagctggggctgcggcctggagagcaagaagaacgagaaggccgccctgaaggtgctgcaggaggagtacagaaagctgggccccctgagcttcgccgagatcaacgtgctgatctgcttcttcctgctggtgatcctgtggttcagcagagaccccggcttcatgcccggctggctgaccgtggcctgggtggagggcgagaccaagtacgtgagcgacgccaccgtggccatcttcgtggccaccctgctgttcatcgtgcccagccagaagcccaagttcaacttcagaagccagaccgaggaggagagaaagacccccttctaccccccccccctgctggactggaaggtgacccaggagaaggtgccctggggcatcgtgctgctgctgggcggcggcttcgccctggccaagggcagcgaggccagcggcctgagcgtgtggatgggcaagcagatggagcccctgcacgccgtgccccccgccgccatcaccctgatcctgagcctgctggtggccgtgttcaccgagtgcaccagcaacgtggccaccaccaccctgttcctgcccatcttcgccagcatgagcagaagcatcggcctgaaccccctgtacatcatgctgccctgcaccctgagcgccagcttcgccttcatgctgcccgtggccaccccccccaacgccatcgtgttcacctacggccacctgaaggtggccgacatggtgaagaccggcgtgatcatgaacatcatcggcgtgttctgcgtgttcctggccgtgaacacctggggcagagccatcttcgacctggaccacttccccgactgggccaacgtgacccacatcgagacctag

SEQ ID NO: 99408 - DNA, 1569 bp, synthetic construct; identical to SEQ ID NO: 99405
  misc_feature 1..1569: note = Description of Artificial Sequence: Synthetic coding sequence
  source 1..1569: mol_type = other DNA

SEQ ID NO: 99409 - DNA, 1779 bp, synthetic construct
  misc_feature 1..1779: note = Description of Artificial Sequence: Synthetic coding sequence
  source 1..1779: mol_type = other DNA
atggccacctgctggcaggccctgtgggcctacagaagctacctgatcgtgttcttcgtgcccatcctgctgctgcccctgcccatcctggtgcccagcaaggaggcctactgcgcctacgccatcatcctgatggccctgttctggtgcaccgaggccctgcccctggccgtgaccgccctgttccccctgatcctgttccccatgatgggcatcgtggacgccagcgaggtggccgtggagtacctgaaggacagcaacctgctgttcttcggcggcctgctggtggccatcgccgtggagcactggaacctgcacaagagaatcgccctgagagtgctgctgatcgtgggcgtgagacccgcccccctgatcctgggcttcatgctggtgaccgccttcctgagcatgtggatcagcaacaccgccaccagcgccatgatggtgcccatcgcccacgccgtgctggaccagctgcacagcagccaggccagcagcaacgtggaggagggcagcaacaaccccaccttcgagctgcaggagcccagcccccagaaggaggtgaccaagctggacaacggccaggccctgcccgtgaccagcgccagcagcgagggcagagcccacctgagccagaagcacctgcacctgacccagtgcatgagcctgtgcgtgtgctacagcgccagcatcggcggcatcgccaccctgaccggcaccgcccccaacctggtgctgcagggccagatcaacagcctgttcccccagaacggcaacgtggtgaacttcgccagctggttcagcttcgccttccccaccatggtgatcctgctgctgctggcctggctgtggctgcagatcctgttcctgggcttcaacttcagaaagaacttcggcatcggcgagaagatgcaggagcagcagcaggccgcctactgcgtgatccagaccgagcacagactgctgggccccatgaccttcgccgagaaggccatcagcatcctgttcgtgatcctggtgctgctgtggttcaccagagagcccggcttcttcctgggctggggcaacctggccttccccaacgccaagggcgagagcatggtgagcgacggcaccgtggccatcttcatcggcatcatcatgttcatcatccccagcaagttccccggcctgacccaggaccccgagaaccccggcaagctgaaggcccccctgggcctgctggactggaagaccgtgaaccagaagatgccctggaacatcgtgctgctgctgggcggcggctacgccctggccaagggcagcgagagaagcggcctgagcgagtggctgggcaacaagctgacccccctgcagagcgtgcccgcccccgccatcgccatcatcctgagcctgctggtggccaccttcaccgagtgcaccagcaacgtggccaccaccaccatcttcctgcccatcctggccagcatggcccaggccatctgcctgcaccccctgtacgtgatgctgccctgcaccctggccaccagcctggccttcatgctgcccgtggccaccccccccaacgccatcgtgttcagcttcggcgacctgaaggtgctggacatggccagagccggcttcctgctgaacatcatcggcgtgctgatcatcgccctggccatcaacagctggggcatccccctgttcagcctgcacagcttccccagctgggcccagagcaacaccaccgcccagtgcctgcccagcctggccaacaccaccacccccagcccctag

SEQ ID NO: 99410 - DNA, 1926 bp, synthetic construct
  misc_feature 1..1926: note = Description of Artificial Sequence: Synthetic coding sequence
  source 1..1926: mol_type = other DNA
atggccacctgctggcaggccctgtgggcctacagaagctacctgatcgtgttcttcgtgcccatcctgctgctgcccctgcccatcctggtgcccagcaaggaggcctactgcgcctacgccatcatcctgatggccctgttctggtgcaccgaggccctgcccctggccgtgaccgccctgttccccctgatcctgttccccatgatgggcatcgtggacgccagcgagatcatccagagacccttccccagcagcttcgagagccccggcgagtgccagagcgtgggcatgagcgtgaccgccagccacaacctgggcggcaccgtgggcgacagcagagtgttcccccccctgagccacgtgagcacctgccaggtggccgtggagtacctgaaggacagcaacctgctgttcttcggcggcctgctggtggccatcgccgtggagcactggaacctgcacaagagaatcgccctgagagtgctgctgatcgtgggcgtgagacccgcccccctgatcctgggcttcatgctggtgaccgccttcctgagcatgtggatcagcaacaccgccaccagcgccatgatggtgcccatcgcccacgccgtgctggaccagctgcacagcagccaggccagcagcaacgtggaggagggcagcaacaaccccaccttcgagctgcaggagcccagcccccagaaggaggtgaccaagctggacaacggccaggccctgcccgtgaccagcgccagcagcgagggcagagcccacctgagccagaagcacctgcacctgacccagtgcatgagcctgtgcgtgtgctacagcgccagcatcggcggcatcgccaccctgaccggcaccgcccccaacctggtgctgcagggccagatcaacagcctgttcccccagaacggcaacgtggtgaacttcgccagctggttcagcttcgccttccccaccatggtgatcctgctgctgctggcctggctgtggctgcagatcctgttcctgggcttcaacttcagaaagaacttcggcatcggcgagaagatgcaggagcagcagcaggccgcctactgcgtgatccagaccgagcacagactgctgggccccatgaccttcgccgagaaggccatcagcatcctgttcgtgatcctggtgctgctgtggttcaccagagagcccggcttcttcctgggctggggcaacctggccttccccaacgccaagggcgagagcatggtgagcgacggcaccgtggccatcttcatcggcatcatcatgttcatcatccccagcaagttccccggcctgacccaggaccccgagaaccccggcaagctgaaggcccccctgggcctgctggactggaagaccgtgaaccagaagatgccctggaacatcgtgctgctgctgggcggcggctacgccctggccaagggcagcgagagaagcggcctgagcgagtggctgggcaacaagctgacccccctgcagagcgtgcccgcccccgccatcgccatcatcctgagcctgctggtggccaccttcaccgagtgcaccagcaacgtggccaccaccaccatcttcctgcccatcctggccagcatggcccaggccatctgcctgcaccccctgtacgtgatgctgccctgcaccctggccaccagcctggccttcatgctgcccgtggccaccccccccaacgccatcgtgttcagcttcggcgacctgaaggtgctggacatggccagagccggcttcctgctgaacatcatcggcgtgctgatcatcgccctggccatcaacagctggggcatccccctgttcagcctgcacagcttccccagctgggcccagagcaacaccaccgcccagtgcctgcccagcctggccaacaccaccacccccagcccctag

SEQ ID NO: 99411 - DNA, 1566 bp, synthetic construct
  misc_feature 1..1566: note = Description of Artificial Sequence: Synthetic coding sequence
  source 1..1566: mol_type = other DNA
atgcccgtgtgcggcaacgtggccgtggagtacctgaaggacagcaacctgctgttcttcggcggcctgctggtggccatcgccgtggagcactggaacctgcacaagagaatcgccctgagagtgctgctgatcgtgggcgtgagacccgcccccctgatcctgggcttcatgctggtgaccgccttcctgagcatgtggatcagcaacaccgccaccagcgccatgatggtgcccatcgcccacgccgtgctggaccagctgcacagcagccaggccagcagcaacgtggaggagggcagcaacaaccccaccttcgagctgcaggagcccagcccccagaaggaggtgaccaagctggacaacggccaggccctgcccgtgaccagcgccagcagcgagggcagagcccacctgagccagaagcacctgcacctgacccagtgcatgagcctgtgcgtgtgctacagcgccagcatcggcggcatcgccaccctgaccggcaccgcccccaacctggtgctgcagggccagatcaacagcctgttcccccagaacggcaacgtggtgaacttcgccagctggttcagcttcgccttccccaccatggtgatcctgctgctgctggcctggctgtggctgcagatcctgttcctgggcttcaacttcagaaagaacttcggcatcggcgagaagatgcaggagcagcagcaggccgcctactgcgtgatccagaccgagcacagactgctgggccccatgaccttcgccgagaaggccatcagcatcctgttcgtgatcctggtgctgctgtggttcaccagagagcccggcttcttcctgggctggggcaacctggccttccccaacgccaagggcgagagcatggtgagcgacggcaccgtggccatcttcatcggcatcatcatgttcatcatccccagcaagttccccggcctgacccaggaccccgagaaccccggcaagctgaaggcccccctgggcctgctggactggaagaccgtgaaccagaagatgccctggaacatcgtgctgctgctgggcggcggctacgccctggccaagggcagcgagagaagcggcctgagcgagtggctgggcaacaagctgacccccctgcagagcgtgcccgcccccgccatcgccatcatcctgagcctgctggtggccaccttcaccgagtgcaccagcaacgtggccaccaccaccatcttcctgcccatcctggccagcatggcccaggccatctgcctgcaccccctgtacgtgatgctgccctgcaccctggccaccagcctggccttcatgctgcccgtggccaccccccccaacgccatcgtgttcagcttcggcgacctgaaggtgctggacatggccagagccggcttcctgctgaacatcatcggcgtgctgatcatcgccctggccatcaacagctggggcatccccctgttcagcctgcacagcttccccagctgggcccagagcaacaccaccgcccagtgcctgcccagcctggccaacaccaccacccccagcccctag

SEQ ID NO: 99412 - DNA, 1035 bp, synthetic construct
  misc_feature 1..1035: note = Description of Artificial Sequence: Synthetic coding sequence
  source 1..1035: mol_type = other DNA
atggccctgttctggtgcaccgaggccctgcccctggccgtgaccgccctgttccccctgatcctgttccccatgatgggcatcgtggacgccagcgaggtggccgtggagtacctgaaggacagcaacctgctgttcttcggcggcctgctggtggccatcgccgtggagcactggaacctgcacaagagaatcgccctgagagtgctgctgatcgtgggcgtgagacccgcccccctgatcctgggcttcatgctggtgaccgccttcctgagcatgtggatcagcaacaccgccaccagcgccatgatggtgcccatcgcccacgccgtgctggaccagctgcacagcagccaggccagcagcaacgtggaggagggcagcaacaaccccaccttcgagctgcaggagcccagcccccagaaggaggtgaccaagctggacaacggccaggccctgcccgtgaccagcgccagcagcgagggcagagcccacctgagccagaagcacctgcacctgacccagtgcatgagcctgtgcgtgtgctacagcgccagcatcggcggcatcgccaccctgaccggcaccgcccccaacctggtgctgcagggccagatcaacagcctgttcccccagaacggcaacgtggtgaacttcgccagctggttcagcttcgccttccccaccatggtgatcctgctgctgctggcctggctgtggctgcagatcctgttcctgggcttcaacttcagaaagaacttcggcatcggcgagaagatgcaggagcagcagcaggccgcctactgcgtgatccagaccgagcacagactgctgggccccatgaccttcgccgagaaggccatcagcatcctgttcgtgatcctggtgctgctgtggttcaccagagagcccggcttcttctggctgggccagttcggcttcagccagtgccagggcggcgaggtgagagtggccggcgtgggcagaagaacccacctgggcctgacctgcagcggcagaagagagggctactag

SEQ ID NO: 99413 - DNA, 1650 bp, synthetic construct
  misc_feature 1..1650: note = Description of Artificial Sequence: Synthetic coding sequence
  source 1..1650: mol_type = other DNA
atggccacctgctggcaggccctgtgggcctacagaagctacctgatcgtgttcttcgtgcccatcctgctgctgcccctgcccatcctggtgcccagcaaggtggccgtggagtacctgaaggacagcaacctgctgttcttcggcggcctgctggtggccatcgccgtggagcactggaacctgcacaagagaatcgccctgagagtgctgctgatcgtgggcgtgagacccgcccccctgatcctgggcttcatgctggtgaccgccttcctgagcatgtggatcagcaacaccgccaccagcgccatgatggtgcccatcgcccacgccgtgctggaccagctgcacagcagccaggccagcagcaacgtggaggagggcagcaacaaccccaccttcgagctgcaggagcccagcccccagaaggaggtgaccaagctggacaacggccaggccctgcccgtgaccagcgccagcagcgagggcagagcccacctgagccagaagcacctgcacctgacccagtgcatgagcctgtgcgtgtgctacagcgccagcatcggcggcatcgccaccctgaccggcaccgcccccaacctggtgctgcagggccagatcaacagcctgttcccccagaacggcaacgtggtgaacttcgccagctggttcagcttcgccttccccaccatggtgatcctgctgctgctggcctggctgtggctgcagatcctgttcctgggcttcaacttcagaaagaacttcggcatcggcgagaagatgcaggagcagcagcaggccgcctactgcgtgatccagaccgagcacagactgctgggccccatgaccttcgccgagaaggccatcagcatcctgttcgtgatcctggtgctgctgtggttcaccagagagcccggcttcttcctgggctggggcaacctggccttccccaacgccaagggcgagagcatggtgagcgacggcaccgtggccatcttcatcggcatcatcatgttcatcatccccagcaagttccccggcctgacccaggaccccgagaaccccggcaagctgaaggcccccctgggcctgctggactggaagaccgtgaaccagaagatgccctggaacatcgtgctgctgctgggcggcggctacgccctggccaagggcagcgagagaagcggcctgagcgagtggctgggcaacaagctgacccccctgcagagcgtgcccgcccccgccatcgccatcatcctgagcctgctggtggccaccttcaccgagtgcaccagcaacgtggccaccaccaccatcttcctgcccatcctggccagcatggcccaggccatctgcctgcaccccctgtacgtgatgctgccctgcaccctggccaccagcctggccttcatgctgcccgtggccaccccccccaacgccatcgtgttcagcttcggcgacctgaaggtgctggacatggccagagccggcttcctgctgaacatcatcggcgtgctgatcatcgccctggccatcaacagctggggcatccccctgttcagcctgcacagcttccccagctgggcccagagcaacaccaccgcccagtgcctgcccagcctggccaacaccaccacccccagcccctag

SEQ ID NO: 99414 - DNA, 1809 bp, synthetic construct
  misc_feature 1..1809: note = Description of Artificial Sequence: Synthetic coding sequence
  source 1..1809: mol_type = other DNA
atggccgccctggccgccgccgccaagaaggtgtggagcgccagaagactgctggtgctgctgttcacccccctggccctgctgcccgtggtgttcgccctgccccccaaggagggcagatgcctgttcgtgatcctgctgatggccgtgtactggtgcaccgaggccctgcccctgagcgtgaccgccctgctgcccatcgtgctgttccccttcatgggcatcctgcccagcaacaaggtgtgcccccagtacttcctggacaccaacttcctgttcctgagcggcctgatcatggccagcgccatcgaggagtggaacctgcacagaagaatcgccctgaagatcctgatgctggtgggcgtgcagcccgccagactgatcctgggcatgatggtgaccaccagcttcctgagcatgtggctgagcaacaccgccagcaccgccatgatgctgcccatcgccaacgccatcctgaagagcctgttcggccagaaggaggtgagaaaggaccccagccaggagagcgaggagaacaccgccgccgtgagaagaaacggcctgcacaccgtgcccaccgagatgcagttcctggccagcaccgaggccaaggaccaccccggcgagaccgaggtgcccctggacctgcccgccgacagcagaaaggaggacgagtacagaagaaacatctggaagggcttcctgatcagcatcccctacagcgccagcatcggcggcaccgccaccctgaccggcaccgcccccaacctgatcctgctgggccagctgaagagcttcttcccccagtgcgacgtggtgaacttcggcagctggttcatcttcgccttccccctgatgctgctgttcctgctggccggctggctgtggatcagcttcctgtacggcggcctgagcttcagaggctggagaaagaacaagagcgagatcagaaccaacgccgaggacagagccagagccgtgatcagagaggagtaccagaacctgggccccatcaagttcgccgagcaggccgtgttcatcctgttctgcatgttcgccatcctgctgttcaccagagaccccaagttcatccccggctgggccagcctgttcaaccccggcttcctgagcgacgccgtgaccggcgtggccatcgtgaccatcctgttcttcttccccagccagagacccagcctgaagtggtggttcgacttcaaggcccccaacaccgagaccgagcccctgctgacctggaagaaggcccaggagaccgtgccctggaacatcatcctgctgctgggcggcggcttcgccatggccaagggctgcgaggagagcggcctgagcgtgtggatcggcggccagctgcaccccctggagaacgtgccccccgccctggccgtgctgctgatcaccgtggtgatcgccttcttcaccgagttcgccagcaacaccgccaccatcatcatcttcctgcccgtgctggccgagctggccatcagactgagagtgcaccccctgtacctgatgatccccggcaccgtgggctgcagcttcgccttcatgctgcccgtgagcaccccccccaacagcatcgccttcgccagcggccacctgctggtgaaggacatggtgagaaccggcctgctgatgaacctgatgggcgtgctgctgctgagcctggccatgaacacctgggcccagaccatcttccagctgggcaccttccccgactgggccgacatgtacagcgtgaacgtgaccgccctgccccccaccctggccaacgacaccttcagaaccctgtag

SEQ ID NO: 99415 - DNA, 1668 bp, synthetic construct
  misc_feature 1..1668: note = Description of Artificial Sequence: Synthetic coding sequence
  source 1..1668: mol_type = other DNA
atggccgtgtactggtgcaccgaggccctgcccctgagcgtgaccgccctgctgcccatcgtgctgttccccttcatgggcatcctgcccagcaacaaggtgtgcccccagtacttcctggacaccaacttcctgttcctgagcggcctgatcatggccagcgccatcgaggagtggaacctgcacagaagaatcgccctgaagatcctgatgctggtgggcgtgcagcccgccagactgatcctgggcatgatggtgaccaccagcttcctgagcatgtggctgagcaacaccgccagcaccgccatgatgctgcccatcgccaacgccatcctgaagagcctgttcggccagaaggaggtgagaaaggaccccagccaggagagcgaggagaacaccgccgccgtgagaagaaacggcctgcacaccgtgcccaccgagatgcagttcctggccagcaccgaggccaaggaccaccccggcgagaccgaggtgcccctggacctgcccgccgacagcagaaaggaggacgagtacagaagaaacatctggaagggcttcctgatcagcatcccctacagcgccagcatcggcggcaccgccaccctgaccggcaccgcccccaacctgatcctgctgggccagctgaagagcttcttcccccagtgcgacgtggtgaacttcggcagctggttcatcttcgccttccccctgatgctgctgttcctgctggccggctggctgtggatcagcttcctgtacggcggcctgagcttcagaggctggagaaagaacaagagcgagatcagaaccaacgccgaggacagagccagagccgtgatcagagaggagtaccagaacctgggccccatcaagttcgccgagcaggccgtgttcatcctgttctgcatgttcgccatcctgctgttcaccagagaccccaagttcatccccggctgggccagcctgttcaaccccggcttcctgagcgacgccgtgaccggcgtggccatcgtgaccatcctgttcttcttccccagccagagacccagcctgaagtggtggttcgacttcaaggcccccaacaccgagaccgagcccctgctgacctggaagaaggcccaggagaccgtgccctggaacatcatcctgctgctgggcggcggcttcgccatggccaagggctgcgaggagagcggcctgagcgtgtggatcggcggccagctgcaccccctggagaacgtgccccccgccctggccgtgctgctgatcaccgtggtgatcgccttcttcaccgagttcgccagcaacaccgccaccatcatcatcttcctgcccgtgctggccgagctggccatcagactgagagtgcaccccctgtacctgatgatccccggcaccgtgggctgcagcttcgccttcatgctgcccgtgagcaccccccccaacagcatcgccttcgccagcggccacctgctggtgaaggacatggtgagaaccggcctgctgatgaacctgatgggcgtgctgctgctgagcctggccatgaacacctgggcccagaccatcttccagctgggcaccttccccgactgggccgacatgtacagcgtgaacgtgaccgccctgccccccaccctggccaacgacaccttcagaaccctgtag

SEQ ID NO: 99416 - DNA, 699 bp, synthetic construct
  misc_feature 1..699: note = Description of Artificial Sequence: Synthetic coding sequence
  source 1..699: mol_type = other DNA
atggccgccctggccgccgccgccaagaaggtgtggagcgccagaagactgctggtgctgctgttcacccccctggccctgctgcccgtggtgttcgccctgccccccaaggagggcagatgcctgttcgtgatcctgctgatggccgtgtactggtgcaccgaggccctgcccctgagcgtgaccgccctgctgcccatcgtgctgttccccttcatgggcatcctgcccagcaacaaggtgtgcccccagtacttcctggacaccaacttcctgttcctgagcggcctgatcatggccagcgccatcgaggagtggaacctgcacagaagaatcgccctgaagatcctgatgctggtgggcgtgcagcccgccagactgatcctgggcatgatggtgaccaccagcttcctgagcatgtggctgagcaacaccgccagcaccgccatgatgctgcccatcgccaacgccatcctgaagagcctgttcggccagaaggaggtgagaaaggaccccagccaggagagcgaggagaacaccggcatcgagcccaacaccttcctgagcgaggagagactgaagctgcaggcccccctggtgatcagactgggccagatcaccgagagcggccagtggaacatgagcggcaacgacgtgtgcaacttcagagtgctgagcttcctgcccggcggcatgtag

SEQ ID NO: 99417 - DNA, 1017 bp, synthetic construct
  misc_feature 1..1017: note = Description of Artificial Sequence: Synthetic coding sequence
  source 1..1017: mol_type = other DNA
atggccgccctggccgccgccgccaagaaggtgtggagcgccagaagactgctggtgctgctgttcacccccctggccctgctgcccgtggtgttcgccctgccccccaaggagggcagatgcctgttcgtgatcctgctgatggccgtgtactggtgcaccgaggccctgcccctgagcgtgaccgccctgctgcccatcgtgctgttccccttcatgggcatcctgcccagcaacaaggtgtgcccccagtacttcctggacaccaacttcctgttcctgagcggcctgatcatggccagcgccatcgaggagtggaacctgcacagaagaatcgccctgaagatcctgatgctggtgggcgtgcagcccgccagactgatcctgggcatgatggtgaccaccagcttcctgagcatgtggctgagcaacaccgccagcaccgccatgatgctgcccatcgccaacgccatcctgaagagcctgttcggccagaaggaggtgagaaaggaccccagccaggagagcgaggagaacaccgccaagaccaccctgggcagacagagattccactggatctgcagactgacccccggcagaagaatgaacatcgtgggcaccagcggcagagccagcagcagccccagccccacccagcccgtgctgggcgcccagccccacagcagagcccagcccctgaccagcagctgcctggccagcagcagaggctggctgtggatcagcttcctgtacggcggcctgagcttcagaggctggagaaagaacaagagcgagatcagaaccaacgccgaggacagagccagagccgtgatcagagaggagtaccagaacctgggccccatcaagttcgccgagcaggccgtgttcatcctgttctgcatgttcgccatcctgctgttcaccagagaccccaagttcatccccggctgggccagcctgttcaaccccggctgcaagatgggcatcatcagcatcagcaccatccagaagatgtag

SEQ ID NO: 99418 - DNA, 1563 bp, synthetic construct
  misc_feature 1..1563: note = Description of Artificial Sequence: Synthetic coding sequence
  source 1..1563: mol_type = other DNA
atggccgtgtactggtgcaccgaggccctgcccctgagcgtgaccgccctgctgcccatcgtgctgttccccttcatgggcatcctgcccagcaacaaggtgtgcccccagtacttcctggacaccaacttcctgttcctgagcggcctgatcatggccagcgccatcgaggagtggaacctgcacagaagaatcgccctgaagatcctgatgctggtgggcgtgcagcccgccagactgatcctgggcatgatggtgaccaccagcttcctgagcatgtggctgagcaacaccgccagcaccgccatgatgctgcccatcgccaacgccatcctgaagagcctgttcggccagaaggaggtgagaaaggaccccagccaggagagcgaggagaacaccgccgccgtgagaagaaacggcctgcacaccgtgcccaccgagatgcagttcctggccagcaccgaggccaaggaccaccccggcgagaccgaggtgcccctggacctgcccgccgacagcagaaaggaggacgagtacagaagaaacatctggaagggcttcctgatcagcatcccctacagcgccagcatcggcggcaccgccaccctgaccggcaccgcccccaacctgatcctgctgggccagctgaagagcttcttcccccagtgcgacgtggtgaacttcggcagctggttcatcttcgccttccccctgatgctgctgttcctgctggccggctggctgtggatcagcttcctgtacggcggcctgagcttcagaggctggagaaagaacaagagcgagatcagaaccaacgccgaggacagagccagagccgtgatcagagaggagtaccagaacctgggccccatcaagttcctgagcgacgccgtgaccggcgtggccatcgtgaccatcctgttcttcttccccagccagagacccagcctgaagtggtggttcgacttcaaggcccccaacaccgagaccgagcccctgctgacctggaagaaggcccaggagaccgtgccctggaacatcatcctgctgctgggcggcggcttcgccatggccaagggctgcgaggagagcggcctgagcgtgtggatcggcggccagctgcaccccctggagaacgtgccccccgccctggccgtgctgctgatcaccgtggtgatcgccttcttcaccgagttcgccagcaacaccgccaccatcatcatcttcctgcccgtgctggccgagctggccatcagactgagagtgcaccccctgtacctgatgatccccggcaccgtgggctgcagcttcgccttcatgctgcccgtgagcaccccccccaacagcatcgccttcgccagcggccacctgctggtgaaggacatggtgagaaccggcctgctgatgaacctgatgggcgtgctgctgctgagcctggccatgaacacctgggcccagaccatcttccagctgggcaccttccccgactgggccgacatgtacagcgtgaacgtgaccgccctgccccccaccctggccaacgacaccttcagaaccctgtag

SEQ ID NO: 99419 - DNA, 1659 bp, synthetic construct
  misc_feature 1..1659: note = Description of Artificial Sequence: Synthetic coding sequence
  source 1..1659: mol_type = other DNA
atggccgccctggccgccgccgccaagaaggtgtggagcgccagaagactgctggtgctgctgttcacccccctggccctgctgcccgtggtgttcgccctgccccccaaggagggcagatgcctgttcgtgatcctgctgatggccgtgtactggtgcaccgaggccctgcccctgagcgtgaccgccctgctgcccatcgtgctgttccccttcatgggcatcctgcccagcaacaaggtgtgcccccagtacttcctggacaccaacttcctgttcctgagcggcctgatcatggccagcgccatcgaggagtggaacctgcacagaagaatcgccctgaagatcctgatgctggtgggcgtgcagcccgccagactgatcctgggcatgatggtgaccaccagcttcctgagcatgtggctgagcaacaccgccagcaccgccatgatgctgcccatcgccaacgccatcctgaagagcctgttcggccagaaggaggtgagaaaggaccccagccaggagagcgaggagaacaccgccaagaccaccctgggcagacagagattccactggatctgcagactgacccccggcagaagaatgaacatcgtgggcaccagcggcagagccagcagcagccccagccccacccagcccgtgctgggcgcccagccccacagcagagcccagcccctgaccagcagctgcctggccagcagcagaggctggctgtggatcagcttcctgtacggcggcctgagcttcagaggctggagaaagaacaagagcgagatcagaaccaacgccgaggacagagccagagccgtgatcagagaggagtaccagaacctgggccccatcaagttcgccgagcaggccgtgttcatcctgttctgcatgttcgccatcctgctgttcaccagagaccccaagttcatccccggctgggccagcctgttcaaccccggcttcctgagcgacgccgtgaccggcgtggccatcgtgaccatcctgttcttcttccccagccagagacccagcctgaagtggtggttcgacttcaaggcccccaacaccgagaccgagcccctgctgacctggaagaaggcccaggagaccgtgccctggaacatcatcctgctgctgggcggcggcttcgccatggccaagggctgcgaggagagcggcctgagcgtgtggatcggcggccagctgcaccccctggagaacgtgccccccgccctggccgtgctgctgatcaccgtggtgatcgccttcttcaccgagttcgccagcaacaccgccaccatcatcatcttcctgcccgtgctggccgagctggccatcagactgagagtgcaccccctgtacctgatgatccccggcaccgtgggctgcagcttcgccttcatgctgcccgtgagcaccccccccaacagcatcgccttcgccagcggccacctgctggtgaaggacatggtgagaaccggcctgctgatgaacctgatgggcgtgctgctgctgagcctggccatgaacacctgggcccagaccatcttccagctgggcaccttccccgactgggccgacatgtacagcgtgaacgtgaccgccctgccccccaccctggccaacgacaccttcagaaccctgtag

SEQ ID NO: 99420 - DNA, 558 bp, synthetic construct
  misc_feature 1..558: note = Description of Artificial Sequence: Synthetic coding sequence
  source 1..558: mol_type = other DNA
atggccgtgtactggtgcaccgaggccctgcccctgagcgtgaccgccctgctgcccatcgtgctgttccccttcatgggcatcctgcccagcaacaaggtgtgcccccagtacttcctggacaccaacttcctgttcctgagcggcctgatcatggccagcgccatcgaggagtggaacctgcacagaagaatcgccctgaagatcctgatgctggtgggcgtgcagcccgccagactgatcctgggcatgatggtgaccaccagcttcctgagcatgtggctgagcaacaccgccagcaccgccatgatgctgcccatcgccaacgccatcctgaagagcctgttcggccagaaggaggtgagaaaggaccccagccaggagagcgaggagaacaccggcatcgagcccaacaccttcctgagcgaggagagactgaagctgcaggcccccctggtgatcagactgggccagatcaccgagagcggccagtggaacatgagcggcaacgacgtgtgcaacttcagagtgctgagcttcctgcccggcggcatgtag

SEQ ID NO: 99421 - DNA, 564 bp, synthetic construct
  misc_feature 1..564: note = Description of Artificial Sequence: Synthetic coding sequence
  source 1..564: mol_type = other DNA
atgctgagccccgcctggctgctgagccccagctgcagcagcagcagacccaagggccccctgagcagcggcggcctgaccagcaaggagagcggcctgagcgtgtggatcggcggccagctgcaccccctggagaacgtgccccccgccctggccgtgctgctgatcaccgtggtgatcgccttcttcaccgagttcgccagcaacaccgccaccatcatcatcttcctgcccgtgctggccgagctggccatcagactgagagtgcaccccctgtacctgatgatccccggcaccgtgggctgcagcttcgccttcatgctgcccgtgagcaccccccccaacagcatcgccttcgccagcggccacctgctggtgaaggacatggtgagaaccggcctgctgatgaacctgatgggcgtgctgctgctgagcctggccatgaacacctgggcccagaccatcttccagctgggcaccttccccgactgggccgacatgtacagcgtgaacgtgaccgccctgccccccaccctggccaacgacaccttcagaaccctgtag

SEQ ID NO: 99422 - DNA, 1230 bp, synthetic construct
  misc_feature 1..1230: note = Description of Artificial Sequence: Synthetic coding sequence
  source 1..1230: mol_type = other DNA
atggccgtgtactggtgcaccgaggccctgcccctgagcgtgaccgccctgctgcccatcgtgctgttccccttcatgggcatcctgcccagcaacaaggtgtgcccccagtacttcctggacaccaacttcctgttcctgagcggcctgatcatggccagcgccatcgaggagtggaacctgcacagaagaatcgccctgaagatcctgatgctggtgggcgtgcagcccgccagactgatcctgggcatgatggtgaccaccagcttcctgagcatgtggctgagcaacaccgccagcaccgccatgatgctgcccatcgccaacgccatcctgaagagcctgttcggccagaaggaggtgagaaaggaccccagccaggagagcgaggagaacaccgccgccgtgagaagaaacggcctgcacaccgtgcccaccgagatgcagttcctggccagcaccgaggccaaggaccaccccggcgagaccgaggtgcccctggacctgcccgccgacagcagaaaggaggacgagtacagaagaaacatctggaagggcttcctgatcagcatcccctacagcgccagcatcggcggcaccgccaccctgaccggcaccgcccccaacctgatcctgctgggccagctgaagagcttcttcccccagtgcgacgtggtgaacttcggcagctggttcatcttcgccttccccctgatgctgctgttcctgctggccggctggctgtggatcagcttcctgtacggcggcctgagcttcagaggctggagaaagaacaagagcgagatcagaaccaacgccgaggacagagccagagccgtgatcagagaggagtaccagaacctgggccccatcaagttcgccgagcaggccgtgttcatcctgttctgcatgttcgccatcctgctgttcaccagagaccccaagttcatccccggctgggccagcctgttcaaccccggcttcctgagcgacgccgtgaccggcgtggccatcgtgaccatcctgttcttcttccccagccagagacccagcctgaagtggtggttcgacttcaaggcccccaacaccgagaccgagcccctgctgacctggaagaaggcccaggagaccgtgccctggaacatcatcctgctgctgggcggcggcttcgccatggccaagggctgcgaggagagcggcctgagcgtgtggatcggcggccagctgtag

SEQ ID NO: 99423 - DNA, 1668 bp, synthetic construct; identical to SEQ ID NO: 99415
  misc_feature 1..1668: note = Description of Artificial Sequence: Synthetic coding sequence
  source 1..1668: mol_type = other DNA

SEQ ID NO: 99424 - DNA, 2763 bp, synthetic construct
  misc_feature 1..2763: note = Description of Artificial Sequence: Synthetic coding sequence
  source 1..2763: mol_type = other DNA
atgagcgacccccacagcagccccctgctgcccgagcccctgagcagcagatacaagctgtacgaggccgagttcaccagccccagctggcccagcaccagccccgacacccaccccgccctgcccctgctggagatgcccgaggagaaggacctgagaagcagcaacgaggacagccacatcgtgaagatcgagaagctgaacgagagaagcaagagaaaggacgacggcgtggcccacagagacagcgccggccagagatgcatctgcctgagcaaggccgtgggctacctgaccggcgacatgaaggagtacagaatctggctgaaggacaagcacctggccctgcagttcatcgactgggtgctgagaggcaccgcccaggtgatgttcatcaacaaccccctgagcggcctgatcatcttcatcggcctgctgatccagaacccctggtggaccatcaccggcggcctgggcaccgtggtgagcaccctgaccgccctggccctgggccaggacagaagcgccatcgccagcggcctgcacggctacaacggcatgctggtgggcctgctgatggccgtgttcagcgagaagctggactactactggtggctgctgttccccgtgaccttcaccgccatgagctgccccgtgctgagcagcgccctgaacagcatcttcagcaagtgggacctgcccgtgttcaccctgcccttcaacatcgccgtgaccctgtacctggccgccaccggccactacaacctgttcttccccaccaccctggtggagcccgtgagcagcgtgcccaacatcacctggaccgagatggagatgcccctgctgctgcaggccatccccgtgggcgtgggccaggtgtacggctgcgacaacccctggaccggcggcgtgttcctggtggccctgttcatcagcagccccctgatctgcctgcacgccgccatcggcagcatcgtgggcctgctggccgccctgagcgtggccacccccttcgagaccatctacaccggcctgtggagctacaactgcgtgctgagctgcatcgccatcggcggcatgttctacgccctgacctggcagacccacctgctggccctgatctgcgccctgttctgcgcctacatggaggccgccatcagcaacatcatgagcgtggtgggcgtgccccccggcacctgggccttctgcctggccaccatcatcttcctgctgctgaccaccaacaaccccgccatcttcagactgcccctgagcaaggtgacctaccccgaggccaacagaatctactacctgaccgtgaagagcggcgaggaggagaaggcccccagcggcggcggcggcgagcacccccccaccgccggccccaaggtggaggagggcagcgaggccgtgctgagcaagcacagaagcgtgttccacatcgagtggagcagcatcagaagaagaagcaaggtgttcggcaagggcgagcaccaggagagacagaacaaggaccccttcccctacagatacagaaagcccaccgtggagctgctggacctggacaccatggaggagagcagcgagatcaaggtggagaccaacatcagcaagaccagctggatcagaagcagcatggccgccagcggcaagagagtgagcaaggccctgagctacatcaccggcgagatgaaggagtgcggcgagggcctgaaggacaagagccccgtgttccagttcttcgactgggtgctgagaggcaccagccaggtgatgttcgtgaacaaccccctgagcggcatcctgatcatcctgggcctgttcatccagaacccctggtgggccatcagcggctgcctgggcaccatcatgagcaccctgaccgccctgatcctgagccaggacaagagcgccatcgccgccggcttccacggctacaacggcgtgctggtgggcctgctgatggccgtgttcagcgacaagggcgactactactggtggctgctgctgcccgtgatcatcatgagcatgagctgccccatcctgagcagcgccctgggcaccatcttcagcaagtgggacctgcccgtgttcaccctgcccttcaacatcaccgtgaccctgtacctggccgccaccggccactacaacctgttcttccccaccaccctgctgcagcccgccagcgccatgcccaacatcacctggagcgaggtgcaggtgcccctgctgctgagagccatccccgtgggcatcggccaggtgtacggctgcgacaacccctggaccggcggcatcttcctgatcgccctgttcatcagcagccccctgatctgcctgcacgccgccatcggcagcaccatgggcatgctggccgccctgaccatcgccacccccttcgacagcatctacttcggcctgtgcggcttcaacagcaccctggcctgcatcgccatcggcggcatgttctacgtgatcacctggcagacccacctgctggccatcgcctgcgccctgttcgccgcctacctgggcgccgccctggccaacatgctgagcgtgttcggcctgcccccctgcacctggcccttctgcctgagcgccctgaccttcctgctgctgaccaccaacaaccccgccatctacaagctgcccctgagcaaggtgacctaccccgaggccaacagaatctactacctgagccaggagagaaacagaagagccagcatcatcaccaagtaccaggcctacgacgtgagctag

SEQ ID NO: 99425 - DNA, 1170 bp, synthetic construct
  misc_feature 1..1170: note = Description of Artificial Sequence: Synthetic coding sequence
  source 1..1170: mol_type = other DNA
atggaggacagccccaccatggtgagagtggacagccccaccatggtgagaggcgagaaccaggtgagcccctgccagggcagaagatgcttccccaaggccctgggctacgtgaccggcgacatgaaggagctggccaaccagctgaaggacaagcccgtggtgctgcagttcatcgactggatcctgagaggcatcagccaggtggtgttcgtgaacaaccccgtgagcggcatcctgatcctggtgggcctgctggtgcagaacccctggtgggccctgaccggctggctgggcaccgtggtgagcaccctgatggccctgctgctgagccaggacagaagcctgatcgccagcggcctgtacggctacaacgccaccctggtgggcgtgctgatggccgtgttcagcgacaagggcgactacttctggtggctgctgctgcccgtgtgcgccatgagcatgacctgccccatcttcagcagcgccctgaacagcatgctgagcaagtgggacctgcccgtgttcaccctgcccttcaacatggccctgagcatgtacctgagcgccaccggccactacaaccccttcttccccgccaagctggtgatccccatcaccaccgcccccaacatcagctggagcgacctgagcgccctggagctgctgaagagcatccccgtgggcgtgggccagatctacggctgcgacaacccctggaccggcggcatcttcctgggcgccatcctgctgagcagccccctgatgtgcctgcacgccgccatcggcagcctgctgggcatcgccgccggcctgagcctgagcgcccccttcgaggacatctacttcggcctgtggggcttcaacagcagcctggcctgcatcgccatgggcggcatgttcatggccctgacctggcagacccacctgctggccctgggctgcgccctgttcaccgcctacctgggcgtgggcatggccaacttcatggccgaggtgggcctgcccgcctgcacctggcccttctgcctggccaccctgctgttcctgatcatgaccaccaagaacagcaacatctacaagatgcccctgagcaaggtgacctaccccgaggagaacagaatcttctacctgcaggccaagaagagaatggtggagagccccctgtag

SEQ ID NO: 99426 - DNA, 855 bp, synthetic construct
  misc_feature 1..855: note = Description of Artificial Sequence: Synthetic coding sequence
  source 1..855: mol_type = other DNA
atggccctgctgctgagccaggacagaagcctgatcgccagcggcctgtacggctacaacgccaccctggtgggcgtgctgatggccgtgttcagcgacaagggcgactacttctggtggctgctgctgcccgtgtgcgccatgagcatgacctgccccatcttcagcagcgccctgaacagcatgctgagcaagtgggacctgcccgtgttcaccctgcccttcaacatggccctgagcatgtacctgagcgccaccggccactacaaccccttcttccccgccaagctggtgatccccatcaccaccgcccccaacatcagctggagcgacctgagcgccctggagctgctgaagagcatccccgtgggcgtgggccagatctacggctgcgacaacccctggaccggcggcatcttcctgggcgccatcctgctgagcagccccctgatgtgcctgcacgccgccatcggcagcctgctgggcatcgccgccggcctgagcctgagcgcccccttcgaggacatctacttcggcctgtggggcttcaacagcagcctggcctgcatcgccatgggcggcatgttcatggccctgacctggcagacccacctgctggccctgggctgcgccctgttcaccgcctacctgggcgtgggcatggccaacttcatggccgaggtgggcctgcccgcctgcacctggcccttctgcctggccaccctgctgttcctgatcatgaccaccaagaacagcaacatctacaagatgcccctgagcaaggtgacctaccccgaggagaacagaatcttctacctgcaggccaagaagagaatggtggagagccccctgtag

SEQ ID NO: 99427 - DNA, 1338 bp, synthetic construct
  misc_feature 1..1338: note = Description of Artificial Sequence: Synthetic coding sequence
  source 1..1338: mol_type = other DNA
atgaacggcagaagcctgatcggcggcgccggcgacgccagacacggccccgtgtggaaggaccccttcggcaccaaggccggcgacgccgccagaagaggcatcgccagactgagcctggccctggccgacggcagccaggagcaggagcccgaggaggagatcgccatggaggacagccccaccatggtgagagtggacagccccaccatggtgagaggcgagaaccaggtgagcccctgccagggcagaagatgcttccccaaggccctgggctacgtgaccggcgacatgaaggagctggccaaccagctgaaggacaagcccgtggtgctgcagttcatcgactggatcctgagaggcatcagccaggtggtgttcgtgaacaaccccgtgagcggcatcctgatcctggtgggcctgctggtgcagaacccctggtgggccctgaccggctggctgggcaccgtggtgagcaccctgatggccctgctgctgagccaggacagaagcctgatcgccagcggcctgtacggctacaacgccaccctggtgggcgtgctgatggccgtgttcagcgacaagggcgactacttctggtggctgctgctgcccgtgtgcgccatgagcatgacctgccccatcttcagcagcgccctgaacagcatgctgagcaagtgggacctgcccgtgttcaccctgcccttcaacatggccctgagcatgtacctgagcgccaccggccactacaaccccttcttccccgccaagctggtgatccccatcaccaccgcccccaacatcagctggagcgacctgagcgccctggagctgctgaagagcatccccgtgggcgtgggccagatctacggctgcgacaacccctggaccggcggcatcttcctgggcgccatcctgctgagcagccccctgatgtgcctgcacgccgccatcggcagcctgctgggcatcgccgccggcctgagcctgagcgcccccttcgaggacatctacttcggcctgtggggcttcaacagcagcctggcctgcatcgccatgggcggcatgttcatggccctgacctggcagacccacctgctggccctgggctgcgccctgttcaccgcctacctgggcgtgggcatggccaacttcatggccgaggtgggcctgcccgcctgcacctggcccttctgcctggccaccctgctgttcctgatcatgaccaccaagaacagcaacatctacaagatgcccctgagcaaggtgacctaccccgaggagaacagaatcttctacctgcaggccaagaagagaatggtggagagccccctgtag

SEQ ID NO: 99428 - DNA, 1338 bp, synthetic construct; identical to SEQ ID NO: 99427
  misc_feature 1..1338: note = Description of Artificial Sequence: Synthetic coding sequence
  source 1..1338: mol_type = other DNA

SEQ ID NO: 99429 - DNA, 645 bp, synthetic construct
  misc_feature 1..645: note = Description of Artificial Sequence: Synthetic coding sequence
  source 1..645: mol_type = other DNA
atgaacggcagaagcctgatcggcggcgccggcgacgccagacacggccccgtgtggaaggaccccttcggcaccaaggccggcgacgccgccagaagaggcatcgccagactgagcctggccctggccgacggcagccaggagcaggagcccgaggaggagatcgccatggaggacagccccaccatggtgagagtggacagccccaccatggtgagaggcgagaaccaggtgagcccctgccagggcagaagatgcttccccaaggccctgggctacgtgaccggcgacatgaaggagctggccaaccagctgaaggacaagcccgtggtgctgcagttcatcgactggatcctgagaggcatcagccaggtggtgttcgtgaacaaccccgtgagcggcatcctgatcctggtgggcctgctggtgcagaacccctggtgggccctgaccggctggctgggcaccgtggtgagcaccctgatggccctgctgctgagccaggacagaagcctgatcgccagcggcctgtacggctacaacgccaccctggtgggcgtgctgatggccgtgttcagcgacaagggcgactacttctggtggctgctgctgcccgtgtgcgccatgagcatgacctgctgctag

SEQ ID NO: 99430 - DNA, 846 bp, synthetic construct
  misc_feature 1..846: note = Description of Artificial Sequence: Synthetic coding sequence
  source 1..846: mol_type = other DNA
atgggcagaagaaacagaagcctgatcgccagcggcctgtacggctacaacgccaccctggtgggcgtgctgatggccgtgttcagcgacaagggcgactacttctggtggctgctgctgcccgtgtgcgccatgagcatgacctgccccatcttcagcagcgccctgaacagcatgctgagcaagtgggacctgcccgtgttcaccctgcccttcaacatggccctgagcatgtacctgagcgccaccggccactacaaccccttcttccccgccaagctggtgatccccatcaccaccgcccccaacatcagctggagcgacctgagcgccctggagctgctgaagagcatccccgtgggcgtgggccagatctacggctgcgacaacccctggaccggcggcatcttcctgggcgccatcctgctgagcagccccctgatgtgcctgcacgccgccatcggcagcctgctgggcatcgccgccggcctgagcctgagcgcccccttcgaggacatctacttcggcctgtggggcttcaacagcagcctggcctgcatcgccatgggcggcatgttcatggccctgacctggcagacccacctgctggccctgggctgcgccctgttcaccgcctacctgggcgtgggcatggccaacttcatggccgaggtgggcctgcccgcctgcacctggcccttctgcctggccaccctgctgttcctgatcatgaccaccaagaacagcaacatctacaagatgcccctgagcaaggtgacctaccccgaggagaacagaatcttctacctgcaggccaagaagagaatggtggagagccccctgtag

SEQ ID NO: 99431 - DNA, 774 bp, synthetic construct
  misc_feature 1..774: note = Description of Artificial Sequence: Synthetic coding sequence
  source 1..774: mol_type = other DNA
atggccgtgttcagcgacaagggcgactacttctggtggctgctgctgcccgtgtgcgccatgagcatgacctgccccatcttcagcagcgccctgaacagcatgctgagcaagtgggacctgcccgtgttcaccctgcccttcaacatggccctgagcatgtacctgagcgccaccggccactacaaccccttcttccccgccaagctggtgatccccatcaccaccgcccccaacatcagctggagcgacctgagcgccctggagctgctgaagagcatccccgtgggcgtgggccagatctacggctgcgacaacccctggaccggcggcatcttcctgggcgccatcctgctgagcagccccctgatgtgcctgcacgccgccatcggcagcctgctgggcatcgccgccggcctgagcctgagcgcccccttcgaggacatctacttcggcctgtggggcttcaacagcagcctggcctgcatcgccatgggcggcatgttcatggccctgacctggcagacccacctgctggccctgggctgcgccctgttcaccgcctacctgggcgtgggcatggccaacttcatggccgaggtgggcctgcccgcctgcacctggcccttctgcctggccaccctgctgttcctgatcatgaccaccaagaacagcaacatctacaagatgcccctgagcaaggtgacctaccccgaggagaacagaatcttctacctgcaggccaagaagagaatggtggagagccccctgtag

SEQ ID NO: 99432 - DNA, 2763 bp, synthetic construct; identical to SEQ ID NO: 99424
  misc_feature 1..2763: note = Description of Artificial Sequence: Synthetic coding sequence
  source 1..2763: mol_type = other DNA

SEQ ID NO: 99433 - DNA, 708 bp, synthetic construct
  misc_feature 1..708: note = Description of Artificial Sequence: Synthetic coding sequence
  source 1..708: mol_type = other DNA
atgagcgacccccacagcagccccctgctgcccgagcccctgagcagcagatacaagctgtacgaggccgagttcaccagccccagctggcccagcaccagccccgacacccaccccgccctgcccctgctggagatgcccgaggagaaggacctgagaagcagcaacgaggacagccacatcgtgaagatcgagaagctgaacgagagaagcaagagaaaggacgacggcgtggcccacagagacagcgccggccagagatgcatctgcctgagcaaggccgtgggctacctgaccggcgacatgaaggagtacagaatctggctgaaggacaagcacctggccctgcagttcatcgactgggtgctgagaggcaccgcccaggtgatgttcatcaacaaccccctgagcggcctgatcatcttcatcggcctgctgatccagaacccctggtggaccatcaccggcggcctgggcaccgtggtgagcaccctgaccgccctggccctgggccaggacagaagcgccatcgccagcggcctgcacggctacaacggcatgctggtgggcctgctgatggccgtgttcagcgagaagctggactactactggtggctgctgttccccgtgaccttcaccgccatgagctggatggagaccgacttcaactggagcaagagcggctgctggaagcacctgctgcagtag

SEQ ID NO: 99434 - DNA, 627 bp, synthetic construct
  misc_feature 1..627: note = Description of Artificial Sequence: Synthetic coding sequence
  source 1..627: mol_type = other DNA
atggaccagtggggcgtgtacttcaaccccgtgctggtgagcttctgccagagcttcttcggctaccccctgagcatcttcttcatcgtggtgaacgagttctgcgagagattcagctactacggcatgagagccatcctgatcctgtacttcaccaacttcatcagctgggacgacaacctgagcaccgccatctaccacaccttcgtggccctgtgctacctgacccccatcctgggcgccctgatcgccgacagctggctgggcaagttcaagaccatcgtgagcctgagcatcgtgtacaccatcggccaggccgtgaccagcgtgagcagcatcaacgacctgaccgaccacaaccacgacggcacccccgacagcctgcccgtgcacgtggtgctgagcctgatcggcctggccctgatcgccctgggcaccggcggcatcaagccctgcgtgagcgccttcggcggcgaccagttcgaggagggccaggagaagcagagaaacagattcttcagcatcttctacctggccatcaacgccggcagcctgctgagcaccatcatcacccccatgctgagaggcaagagatacctgaagggcaccagcgtgggcctgttctag

SEQ ID NO: 99435 - DNA, 849 bp, synthetic construct
  misc_feature 1..849: note = Description of Artificial Sequence: Synthetic coding sequence
  source 1..849: mol_type = other DNA
atgagagccatcctgatcctgtacttcaccaacttcatcagctgggacgacaacctgagcaccgccatctaccacaccttcgtggccctgtgctacctgacccccatcctgggcgccctgatcgccgacagctggctgggcaagttcaagaccatcgtgagcctgagcatcgtgtacaccatcggccaggccgtgaccagcgtgagcagcatcaacgacctgaccgaccacaaccacgacggcacccccgacagcctgcccgtgcacgtggtgctgagcctgatcggcctggccctgatcgccctgggcaccggcggcatcaagccctgcgtgagcgccttcggcggcgaccagttcgaggagggccaggagaagcagagaaacagattcttcagcatcttctacctggccatcaacgccggcagcctgctgagcaccatcatcacccccatgctgagaggcaagagatacctgaagggcaccagcgtgggcctgttcctggtgagacccagcccctgcctgctgagattcgtgctgttcttccccagcgccctgttcagcagctgccagctgcacgccggcatgcacgtgggcatctggagcaagtgcttcctgccctgcgagttccacctgctgttcgtgctgttcaagagcctgatccccgtgaccaccggcgagagcaagcccagcctggcctgggccagcatcttcctgaactgctacagctgcaaggtgatgctggtggtgagaggcaagagacaggagagatgcctgggcagccaggccggcggcagaagctgccacttcagcctgcaggccctgctgcccagcgacatcagcgtgacctag

SEQ ID NO: 99436 - DNA, 2127 bp, synthetic construct
  misc_feature 1..2127: note = Description of Artificial Sequence: Synthetic coding sequence
  source 1..2127: mol_type = other DNA
atgggcatgagcaagagccacagcttcttcggctaccccctgagcatcttcttcatcgtggtgaacgagttctgcgagagattcagctactacggcatgagagccatcctgatcctgtacttcaccaacttcatcagctgggacgacaacctgagcaccgccatctaccacaccttcgtggccctgtgctacctgacccccatcctgggcgccctgatcgccgacagctggctgggcaagttcaagaccatcgtgagcctgagcatcgtgtacaccatcggccaggccgtgaccagcgtgagcagcatcaacgacctgaccgaccacaaccacgacggcacccccgacagcctgcccgtgcacgtggtgctgagcctgatcggcctggccctgatcgccctgggcaccggcggcatcaagccctgcgtgagcgccttcggcggcgaccagttcgaggagggccaggagaagcagagaaacagattcttcagcatcttctacctggccatcaacgccggcagcctgctgagcaccatcatcacccccatgctgagagtgcagcagtgcggcatccacagcaagcaggcctgctaccccctggccttcggcgtgcccgccgccctgatggccgtggccctgatcgtgttcgtgctgggcagcggcatgtacaagaagttcaagccccagggcaacatcatgggcaaggtggccaagtgcatcggcttcgccatcaagaacagattcagacacagaagcaaggccttccccaagagagagcactggctggactgggccaaggagaagtacgacgagagactgatcagccagatcaagatggtgaccagagtgatgttcctgtacatccccctgcccatgttctgggccctgttcgaccagcagggcagcagatggaccctgcaggccaccaccatgagcggcaagatcggcgccctggagatccagcccgaccagatgcagaccgtgaacgccatcctgatcgtgatcatggtgcccatcttcgacgccgtgctgtaccccctgatcgccaagtgcggcttcaacttcaccagcctgaagaagatggccgtgggcatggtgctggccagcatggccttcgtggtggccgccatcgtgcaggtggagatcgacaagaccctgcccgtgttccccaagggcaacgaggtgcagatcaaggtgctgaacatcggcaacaacaccatgaacatcagcctgcccggcgagatggtgaccctgggccccatgagccagaccaacgccttcatgaccttcgacgtgaacaagctgaccagaatcaacatcagcagccccggcagccccgtgaccgccgtgaccgacgacttcaagcagggccagagacacaccctgctggtgtgggcccccaaccactaccaggtggtgaaggacggcctgaaccagaagcccgagaagggcgagaacggcatcagattcgtgaacaccttcaacgagctgatcaccatcaccatgagcggcaaggtgtacgccaacatcagcagctacaacgccagcacctaccagttcttccccagcggcatcaagggcttcaccatcagcagcaccgagatccccccccagtgccagcccaacttcaacaccttctacctggagttcggcagcgcctacacctacatcgtgcagagaaagaacgacagctgccccgaggtgaaggtgttcgaggacatcagcgccaacaccgtgaacatggccctgcagatcccccagtacttcctgctgacctgcggcgaggtggtgttcagcgtgaccggcctggagttcagctacagccaggcccccagcaacatgaagagcgtgctgcaggccggctggctgctgaccgtggccgtgggcaacatcatcgtgctgatcgtggccggcgccggccagttcagcaagcagtgggccgagtacatcctgttcgccgccctgctgctggtggtgtgcgtgatcttcgccatcatggccagattctacacctacatcaaccccgccgagatcgaggcccagttcgacgaggacgagaagaagaacagactggagaagagcaacccctacttcatgagcggcgccaacagccagaagcagatgtag

SEQ ID NO: 99437 - DNA, 1503 bp, synthetic construct
  misc_feature 1..1503: note = Description of Artificial Sequence: Synthetic coding sequence
  source 1..1503: mol_type = other DNA
atgccccccgccgtgggcggccccgtgggctacaccccccccgacggcggctggggctgggccgtggtgatcggcgccttcatcagcatcggcttcagctacgccttccccaagagcatcaccgtgttcttcaaggagatcgagggcatcttccacgccaccaccagcgaggtgagctggatcagcagcatcatgctggccgtgatgtacggcggcggccccatcagcagcatcctggtgaacaagtacggcagcagaatcgtgatgatcgtgggcggctgcctgagcggctgcggcctgatcgccgccagcttctgcaacaccgtgcagcagctgtacgtgtgcatcggcgtgatcggcggcctgggcctggccttcaacctgaaccccgccctgaccatgatcggcaagtacttctacaagagaagacccctggccaacggcctggccatggccggcagccccgtgttcctgtgcaccctggcccccctgaaccaggtgttcttcggcatcttcggctggagaggcagcttcctgatcctgggcggcctgctgctgaactgctgcgtggccggcgccctgatgagacccatcggccccaagcccaccaaggccggcaaggacaagagcaaggccagcctggagaaggccggcaagagcggcgtgaagaaggacctgcacgacgccaacaccgacctgatcggcagacaccccaagcaggagaagagaagcgtgttccagaccatcaaccagttcctggacctgaccctgttcacccacagaggcttcctgctgtacctgagcggcaacgtgatcatgttcttcggcctgttcgcccccctggtgttcctgagcagctacggcaagagccagcactacagcagcgagaagagcgccttcctgctgagcatcctggccttcgtggacatggtggccagacccagcatgggcctggtggccaacaccaagcccatcagacccagaatccagtacttcttcgccgccagcgtggtggccaacggcgtgtgccacatgctggcccccctgagcaccacctacgtgggcttctgcgtgtacgccggcttcttcggcttcgccttcggctggctgagcagcgtgctgttcgagaccctgatggacctggtgggcccccagagattcagcagcgccgtgggcctggtgaccatcgtggagtgctgccccgtgctgctgggcccccccctgctgggcagactgaacgacatgtacggcgactacaagtacacctactgggcctgcggcgtggtgctgatcatcagcggcatctacctgttcatcggcatgggcatcaactacagactgctggccaaggagcagaaggccaacgagcagaagaaggagagcaaggaggaggagaccagcatcgacgtggccggcaagcccaacgaggtgaccaaggccgccgagagccccgaccagaaggacaccgacggcggccccaaggaggaggagagccccgtgtag

SEQ ID NO: 99438 - DNA, 648 bp, synthetic construct
  misc_feature 1..648: note = Description of Artificial Sequence: Synthetic coding sequence
  source 1..648: mol_type = other DNA
atgccccccgccgtgggcggccccgtgggctacaccccccccgacggcggctggggctgggccgtggtgatcggcgccttcatcagcatcggcttcagctacgccttccccaagagcatcaccgtgttcttcaaggagatcgagggcatcttccacgccaccaccagcgaggtgagctggatcagcagcatcatgctggccgtgatgtacggcggcggccccatcagcagcatcctggtgaacaagtacggcagcagaatcgtgatgatcgtgggcggctgcctgagcggctgcggcctgatcgccgccagcttctgcaacaccgtgcagcagctgtacgtgtgcatcggcgtgatcggcggcctgggcctggccttcaacctgaaccccgccctgaccatgatcggcaagtacttctacaagagaagacccctggccaacggcctggccatggccggcagccccgtgttcctgtgcaccctggcccccctgaaccaggtgttcttcggcatcttcggctggagaggcagcttcctgatcctgggcggcctgctgctgaactgctgcgtggccggcgccctgatgagacccatcggccccaagcccaccaaggccggcaaggacaagagcaaggccagcctggagtag

SEQ ID NO: 99439 - DNA, 1293 bp, synthetic construct
  misc_feature 1..1293: note = Description of Artificial Sequence: Synthetic coding sequence
  source 1..1293: mol_type = other DNA
atgccccccgccgtgggcggccccgtgggctacaccccccccgacggcggctggggctgggccgtggtgatcggcgccttcatcagcatcggcttcagctacgccttccccaagagcatcaccgtgttcttcaaggagatcgagggcatcttccacgccaccaccagcgaggtgagctggatcagcagcatcatgctggccgtgatgtacggcggcggccccatcagcagcatcctggtgaacaagtacggcagcagaatcgtgatgatcgtgggcggctgcctgagcggctgcggcctgatcgccgccagcttctgcaacaccgtgcagcagctgtacgtgtgcatcggcgtgatcggcggcctgggcctggccttcaacctgaaccccgccctgaccatgatcggcaagtacttctacaagagaagacccctggccaacggcctggccatggccggcagccccgtgttcctgtgcaccctggcccccctgaaccaggtgttcttcggcatcttcggctggagaggcagcttcctgatcctgggcggcctgctgctgaactgctgcgtggccggcgccctgatgagacccatcggccccaagcccaccaaggccggcaaggacaagagcaaggccagcctggagaaggccggcaagagcggcgtgaagaaggacctgcacgacgccaacaccgacctgatcggcagacaccccaagcaggagaagagaagcgtgttccagaccatcaaccagttcctggacctgaccctgttcacccacagaggcttcctgctgtacctgagcggcaacgtgatcatgttcttcggcctgttcgcccccctggtgttcctgagcagctacggcaagagccagcactacagcagcgagaagagcgccttcctgctgagcatcctggccttcgtggacatggtggccagacccagcatgggcctggtggccaacaccaagcccatcagacccagaatccagtacttcttcgccgccagcgtggtggccaacggcgtgtgccacatgctggcccccctgagcaccacctacgtgggcttctgcgtgtacgccggcttcttcggcttcgccttcggctggctgagcagcgtgctgttcgagaccctgatggacctggtgggcccccagagattcagcagcgccgtgggcctggtgaccatcgtggagtgctgccccgtgctgctgggcccccccctgctgggcatcgtgtacctgcccaccaacgtgggcctgctgcagaacaagcacgtgagatgggagtgctag

SEQ ID NO: 99440 - DNA, 891 bp, synthetic construct
  misc_feature 1..891: note = Description of Artificial Sequence: Synthetic coding sequence
  source 1..891: mol_type = other DNA
atgccccccgccgtgggcggccccgtgggctacaccccccccgacggcggctggggctgggccgtggtgatcggcgccttcatcagcatcggcttcagctacgccttccccaagagcatcaccgtgttcttcaaggagatcgagggcatcttccacgccaccaccagcgaggtgagctggatcagcagcatcatgctggccgtgatgtacggcggcggccccatcagcagcatcctggtgaacaagtacggcagcagaatcgtgatgatcgtgggcggctgcctgagcggctgcggcctgatcgccgccagcttctgcaacaccgtgcagcagctgtacgtgtgcatcggcgtgatcggcggcctgggcctggccttcaacctgaaccccgccctgaccatgatcggcaagtacttctacaagagaagacccctggccaacggcctggccatggccggcagccccgtgttcctgtgcaccctggcccccctgaaccaggtgttcttcggcatcttcggctggagaggcagcttcctgatcctgggcggcctgctgctgaactgctgcgtggccggcgccctgatgagacccatcggccccaagcccaccaaggccggcaaggacaagagcaaggccagcctggagaaggccggcaagagcggcgtgaagaaggacctgcacgacgccaacaccgacctgatcggcagacaccccaagcaggagaagagaagcgtgttccagaccatcaaccagttcctggacctgaccctgttcacccacagaggcttcctgctgtacctgagcggcaacgtgatcatgttcttcggcctgttcgcccccctggtgttcctgagcagctacggcaagagccagcactacagcagcgagtag

SEQ ID NO: 99441 - DNA, 1371 bp, synthetic construct
  misc_feature 1..1371: note = Description of Artificial Sequence: Synthetic coding sequence
  source 1..1371: mol_type = other DNA
atgccccccgccgtgggcggccccgtgggctacaccccccccgacggcggctggggctgggccgtggtgatcggcgccttcatcagcatcggcttcagctacgccttccccaagagcatcaccgtgttcttcaaggagatcgagggcatcttccacgccaccaccagcgaggtgagctggatcagcagcatcatgctggccgtgatgtacggcggcggccccatcagcagcatcctggtgaacaagtacggcagcagaatcgtgatgatcgtgggcggctgcctgagcggctgcggcctgatcgccgccagcttctgcaacaccgtgcagcagctgtacgtgtgcatcggcgtgatcggcggcctgggcctggccttcaacctgaaccccgccctgaccatgatcggcaagtacttctacaagagaagacccctggccaacggcctggccatggccggcagccccgtgttcctgtgcaccctggcccccctgaaccaggtgttcttcggcatcttcggctggagaggcagcttcctgatcctgggcggcctgctgctgaactgctgcgtggccggcgccctgatgagacccatcggccccaagcccaccaaggccggcaaggacaagagcaaggccagcctggagaaggccggcaagagcggcgtgaagaaggacctgcacgacgccaacaccgacctgatcggcagacaccccaagcaggagaagagaagcgtgttccagaccatcaaccagttcctggacctgaccctgttcacccacagaggcttcctgctgtacctgagcggcaacgtgatcatgttcttcggcctgttcgcccccctggtgttcctgagcagctacggcaagagccagcactacagcagcgagaagagcgccttcctgctgagcatcctggccttcgtggacatggtggccagacccagcatgggcctggtggccaacaccaagcccatcagacccagaatccagtacttcttcgccgccagcgtggtggccaacggcgtgtgccacatgctggcccccctgagcaccacctacgtgggcttctgcgtgtacgccggcttcttcggcttcgccttcggctggctgagcagcgtgctgttcgagaccctgatggacctggtgggcccccagagattcagcagcgccgtgggcctggtgaccatcgtggagtgctgccccgtgctgctgggcccccccctgctgggcagactgaacgacatgtacggcgactacaagtacacctactgggcctgcggcgtggtgctgatcatcagcggcatctacctgttcatcggcatgggcatcaactacagactgctggccaaggagcagaaggccaacgagtag

SEQ ID NO: 99442 - DNA, 1503 bp, synthetic construct; identical to SEQ ID NO: 99437
  misc_feature 1..1503: note = Description of Artificial Sequence: Synthetic coding sequence
  source 1..1503: mol_type = other DNA

SEQ ID NO: 99443 - DNA, 606 bp, synthetic construct
  misc_feature 1..606: note = Description of Artificial Sequence: Synthetic coding sequence
  source 1..606: mol_type = other DNA
atgaagcacgtgaacgagagattccaggacgagaagaacaaggaggtggtgctgatgtgcatcggcgtgaccagcggcgtgggcagactgctgttcggcagaatcgccgactacgtgcccggcgtgaagaaggtgtacctgcaggtgctgagcttcttcttcatcggcctgatgagcatgatgatccccctgtgcagcatcttcggcgccctgatcgccgtgtgcctgatcatgggcctgttcgacggctgcttcatcagcatcatggcccccatcgccttcgagctggtgggcgcccaggacgtgagccaggccatcggcttcctgctgggcttcatgagcatccccatgaccgtgggcccccccatcgccggcctgctgagagacaagctgggcagctacgacgtggccttctacctggccggcgtgccccccctgatcggcggcgccgtgctgtgcttcatcccctggatccacagcaagaagcagagagagatcagcaagaccaccggcaaggagaagatggagaagatgctggagaaccagaacagcctgctgagcagcagcagcggcatgttcaagaaggagagcgacagcatcatctag

SEQ ID NO: 99444 - DNA, 1548 bp, synthetic construct
  misc_feature 1..1548: note = Description of Artificial Sequence: Synthetic coding sequence
  source 1..1548: mol_type = other DNA
atggtgctgagccaggaggagcccgacagcgccagaggcaccagcgaggcccagcccctgggccccgcccccaccggcgccgcccccccccccggccccggccccagcgacagccccgaggccgccgtggagaaggtggaggtggagctggccggccccgccaccgccgagccccacgagccccccgagccccccgagggcggctggggctggctggtgatgctggccgccatgtggtgcaacggcagcgtgttcggcatccagaacgcctgcggcgtgctgttcgtgagcatgctggagaccttcggcagcaaggacgacgacaagatggtgttcaagaccgcctgggtgggcagcctgagcatgggcatgatcttcttctgctgccccatcgtgagcgtgttcaccgacctgttcggctgcagaaagaccgccgtggtgggcgccgccgtgggcttcgtgggcctgatgagcagcagcttcgtgagcagcatcgagcccctgtacctgacctacggcatcatcttcgcctgcggctgcagcttcgcctaccagcccagcctggtgatcctgggccactacttcaagaagagactgggcctggtgaacggcatcgtgaccgccggcagcagcgtgttcaccatcctgctgcccctgctgctgagagtgctgatcgacagcgtgggcctgttctacaccctgagagtgctgtgcatcttcatgttcgtgctgttcctggccggcttcacctacagacccctggccaccagcaccaaggacaaggagagcggcggcagcggcagcagcctgttcagcagaaagaagttcagcccccccaagaagatcttcaacttcgccatcttcaaggtgaccgcctacgccgtgtgggccgtgggcatccccctggccctgttcggctacttcgtgccctacgtgcacctgatgaagcacgtgaacgagagattccaggacgagaagaacaaggaggtggtgctgatgtgcatcggcgtgaccagcggcgtgggcagactgctgttcggcagaatcgccgactacgtgcccggcgtgaagaaggtgtacctgcaggtgctgagcttcttcttcatcggcctgatgagcatgatgatccccctgtgcagcatcttcggcgccctgatcgccgtgtgcctgatcatgggcctgttcgacggctgcttcatcagcatcatggcccccatcgccttcgagctggtgggcgcccaggacgtgagccaggccatcggcttcctgctgggcttcatgagcatccccatgaccgtgggcccccccatcgccggcctgctgagagacaagctgggcagctacgacgtggccttctacctggccggcgtgccccccctgatcggcggcgccgtgctgtgcttcatcccctggatccacagcaagaagcagagagagatcagcaagaccaccggcaaggagaagatggagaagatgctggagaaccagaacagcctgctgagcagcagcagcggcatgttcaagaaggagagcgacagcatcatctag

SEQ ID NO: 99445 - DNA, 651 bp, synthetic construct
  misc_feature 1..651: note = Description of Artificial Sequence: Synthetic coding sequence
  source 1..651: mol_type = other DNA
atggtgttcaagaccgcctgggtgggcagcctgagcatgggcatgatcttcttctgctgccccatcgtgagcgtgttcaccgacctgttcggctgcagaaagaccgccgtggtgggcgccgccgtgggcttcgtgggcctgatgagcagcagcttcgtgagcagcatcgagcccctgtacctgacctacggcatcatcttcgcctgcggctgcagcttcgcctaccagcccagcctggtgatcctgggccactacttcaagaagagactgggcctggtgaacggcatcgtgaccgccggcagcagcgtgttcaccatcctgctgcccctgctgctgagagtgctgatcgacagcgtgggcctgttctacaccctgagagtgctgtgcatcttcatgttcgtgctgttcctggccggcttcacctacagacccctggccaccagcaccaaggacaaggagagcggcggcagcggcagcagcctgttcagcagaaagaagttcagcccccccaagaagatcttcaacttcgccatcttcaaggtgaccgcctacgccgtgtgggccgtgggcatccccctggccctgttcggctacttcgtgccctacgtgcacctggccaagttcagcttcgtgatcctgaagtacgagtag

SEQ ID NO: 99446 - DNA, 636 bp, synthetic construct
  misc_feature 1..636: note = Description of Artificial Sequence: Synthetic coding sequence
  source 1..636: mol_type = other DNA
tgatgggtgggcagcctgagcatgggcatgatcttcttctgctgccccatcgtgagcgtgttcaccgacctgttcggctgcagaaagaccgccgtggtgggcgccgccgtgggcttcgtgggcctgatgagcagcagcttcgtgagcagcatcgagcccctgtacctgacctacggcatcatcttcgcctgcggctgcagcttcgcctaccagcccagcctggtgatcctgggccactacttcaagaagagactgggcctggtgaacggcatcgtgaccgccggcagcagcgtgttcaccatcctgctgcccctgctgctgagagtgctgatcgacagcgtgggcctgttctacaccctgagagtgctgtgcatcttcatgttcgtgctgttcctggccggcttcacctacagacccctggccaccagcaccaaggacaaggagagcggcggcagcggcagcagcctgttcagcagaaagaagttcagcccccccaagaagatcttcaacttcgccatcttcaaggtgaccgcctacgccgtgtgggccgtgggcatccccctggccctgttcggctacttcgtgccctacgtgcacctggccaagttcagcttcgtgatcctgaagtacgagtag

SEQ ID NO: 99447 - DNA, 621 bp, synthetic construct
  misc_feature 1..621: note = Description of Artificial Sequence: Synthetic coding sequence
  source 1..621: mol_type = other DNA
tgatgggtgggcagcctgagcatgggcatgatcttcttctgctgccccatcgtgagcgtgttcaccgacctgttcggctgcagaaagaccgccgtggtgggcgccgccgtgggcttcgtgggcctgatgagcagcagcttcgtgagcagcatcgagcccctgtacctgacctacggcatcatcttcgcctgcggctgcagcttcgcctaccagcccagcctggtgatcctgggccactacttcaagaagagactgggcctggtgaacggcatcgtgaccgccggcagcagcgtgttcaccatcctgctgcccctgctgctgagagtgctgatcgacagcgtgggcctgttctacaccctgagagtgctgtgcatcttcatgttcgtgctgttcctggccggcttcacctacagacccctggccaccagcaccaaggacaaggagagcggcggcagcggcagcagcctgttcagcagaaagaagttcagcccccccaagaagatcttcaacttcgccatcttcaaggtgaccgcctacgccgtgtgggccgtgggcatccccctggccctgttcggctacttcgtgccctacgtgcacctggtgagcatgctgctgcactag

SEQ ID NO: 99448 - DNA, 981 bp, synthetic construct
  misc_feature 1..981: note = Description of Artificial Sequence: Synthetic coding sequence
  source 1..981: mol_type = other DNA
atggtgctgagccaggaggagcccgacagcgccagaggcaccagcgaggcccagcccctgggccccgcccccaccggcgccgcccccccccccggccccggccccagcgacagccccgaggccgccgtggagaaggtggaggtggagctggccggccccgccaccgccgagccccacgagccccccgagccccccgagggcggctggggctggctggtgatgctggccgccatgtggtgcaacggcagcgtgttcggcatccagaacgcctgcggcgtgctgttcgtgagcatgctggagaccttcggcagcaaggacgacgacaagatggtgttcaagaccgcctgggtgggcagcctgagcatgggcatgatcttcttctgctgccccatcgtgagcgtgttcaccgacctgttcggctgcagaaagaccgccgtggtgggcgccgccgtgggcttcgtgggcctgatgagcagcagcttcgtgagcagcatcgagcccctgtacctgacctacggcatcatcttcgcctgcggctgcagcttcgcctaccagcccagcctggtgatcctgggccactacttcaagaagagactgggcctggtgaacggcatcgtgaccgccggcagcagcgtgttcaccatcctgctgcccctgctgctgagagtgctgatcgacagcgtgggcctgttctacaccctgagagtgctgtgcatcttcatgttcgtgctgttcctggccggcttcacctacagacccctggccaccagcaccaaggacaaggagagcggcggcagcggcagcagcctgttcagcagaaagaagttcagcccccccaagaacttccagttctgccacctgcagggcgacagcctgtgcagcgtgggcagctggaacaccacctgcaccttctggatcctgtgcgccctgtgcagcctgggcgagtacgcccccagcctgatcatgaacatcaccatctag

SEQ ID NO: 99449 - DNA, 1461 bp, synthetic construct
  misc_feature 1..1461: note = Description of Artificial Sequence: Synthetic coding sequence
  source 1..1461: mol_type = other DNA
atggccaaggtgaacagagccagaagcaccagcccccccgacggcggctggggctggatgatcgtggccggctgcttcctggtgaccatctgcaccagagccgtgaccagatgcatcagcatcttcttcgtggagttccagacctacttcacccaggactacgcccagaccgcctggatccacagcatcgtggactgcgtgaccatgctgtgcgcccccctgggcagcgtggtgagcaaccacctgagctgccaggtgggcatcatgctgggcggcctgctggccagcaccggcctgatcctgagcagcttcgccaccagcctgaagcacctgtacctgaccctgggcgtgctgaccggcctgggcttcgccctgtgctacagccccgccatcgccatggtgggcaagtacttcagcagaagaaaggccctggcctacggcatcgccatgagcggcagcggcatcggcaccttcatcctggcccccgtggtgcagctgctgatcgagcagttcagctggagaggcgccctgctgatcctgggcggcttcgtgctgaacctgtgcgtgtgcggcgccctgatgagacccatcaccctgaaggaggaccacaccacccccgagcagaaccacgtgtgcagaacccagaaggaggacatcaagagagtgagcccctacagcagcctgaccaaggagtgggcccagacctgcctgtgctgctgcctgcagcaggagtacagcttcctgctgatgagcgacttcgtggtgctggccgtgagcgtgctgttcatggcctacggctgcagccccctgttcgtgtacctggtgccctacgccctgagcgtgggcgtgagccaccagcaggccgccttcctgatgagcatcctgggcgtgatcgacatcatcggcaacatcaccttcggctggctgaccgacagaagatgcctgaagaactaccagtacgtgtgctacctgttcgccgtgggcatggacggcctgtgctacctgtgcctgcccatgctgcagagcctgcccctgctggtgcccttcagctgcaccttcggctacttcgacggcgcctacgtgaccctgatccccgtggtgaccaccgagatcgtgggcaccaccagcctgagcagcgccctgggcgtggtgtacttcctgcacgccgtgccctacctggtgagcccccccatcgccggcagactggtggacaccaccggcagctacaccgccgccttcctgctgtgcggcttcagcatgatcttcagcagcgtgctgctgggcttcgccagactgatcaagagaatgagaaagacccagctgcagttcatcgccaaggagagcgaccccaagctgcagctgtggaccaacggcagcgtggcctacagcgtggccagagagctggaccagaagcacggcgagcccgtggccaccgccgtgcccggctacagcctgacctag

SEQ ID NO: 99450 - DNA, 1551 bp, synthetic construct
  misc_feature 1..1551: note = Description of Artificial Sequence: Synthetic coding sequence
  source 1..1551: mol_type = other DNA
atgcccagcggcagccactggaccgccaacagcagcaagatcatcacctggctgctggagcagcccggcaaggaggagaagagaaagaccatggccaaggtgaacagagccagaagcaccagcccccccgacggcggctggggctggatgatcgtggccggctgcttcctggtgaccatctgcaccagagccgtgaccagatgcatcagcatcttcttcgtggagttccagacctacttcacccaggactacgcccagaccgcctggatccacagcatcgtggactgcgtgaccatgctgtgcgcccccctgggcagcgtggtgagcaaccacctgagctgccaggtgggcatcatgctgggcggcctgctggccagcaccggcctgatcctgagcagcttcgccaccagcctgaagcacctgtacctgaccctgggcgtgctgaccggcctgggcttcgccctgtgctacagccccgccatcgccatggtgggcaagtacttcagcagaagaaaggccctggcctacggcatcgccatgagcggcagcggcatcggcaccttcatcctggcccccgtggtgcagctgctgatcgagcagttcagctggagaggcgccctgctgatcctgggcggcttcgtgctgaacctgtgcgtgtgcggcgccctgatgagacccatcaccctgaaggaggaccacaccacccccgagcagaaccacgtgtgcagaacccagaaggaggacatcaagagagtgagcccctacagcagcctgaccaaggagtgggcccagacctgcctgtgctgctgcctgcagcaggagtacagcttcctgctgatgagcgacttcgtggtgctggccgtgagcgtgctgttcatggcctacggctgcagccccctgttcgtgtacctggtgccctacgccctgagcgtgggcgtgagccaccagcaggccgccttcctgatgagcatcctgggcgtgatcgacatcatcggcaacatcaccttcggctggctgaccgacagaagatgcctgaagaactaccagtacgtgtgctacctgttcgccgtgggcatggacggcctgtgctacctgtgcctgcccatgctgcagagcctgcccctgctggtgcccttcagctgcaccttcggctacttcgacggcgcctacgtgaccctgatccccgtggtgaccaccgagatcgtgggcaccaccagcctgagcagcgccctgggcgtggtgtacttcctgcacgccgtgccctacctggtgagcccccccatcgccggcagactggtggacaccaccggcagctacaccgccgccttcctgctgtgcggcttcagcatgatcttcagcagcgtgctgctgggcttcgccagactgatcaagagaatgagaaagacccagctgcagttcatcgccaaggagagcgaccccaagctgcagctgtggaccaacggcagcgtggcctacagcgtggccagagagctggaccagaagcacggcgagcccgtggccaccgccgtgcccggctacagcctgacctag

SEQ ID NO: 99451 - DNA, 78 bp, synthetic construct
  misc_feature 1..78: note = Description of Artificial Sequence: Synthetic coding sequence
  source 1..78: mol_type = other DNA
atgcccagcggcagccactggaccgccaacagcagcaagatcatcacctggctgctggagcagcccggcaaggagtag

SEQ ID NO: 99452 - DNA, 453 bp, synthetic construct
  misc_feature 1..453: note = Description of Artificial Sequence: Synthetic coding sequence
  source 1..453: mol_type = other DNA
atgagacccatcaccctgaaggaggaccacaccacccccgagcagaaccacgtgtgcagaacccagaaggaggacatcaagagagtgagcccctacagcagcctgaccaaggagtgggcccagacctgcctgtgctgctgcctgcagcaggagtacagcttcctgctgatgagcgacttcgtggtgctggccgtgagcgtgctgttcatggcctacggctgcagccccctgttcgtgtacctggtgccctacgccctgagcgtgggcgtgagccaccagcaggccgccttcctgatgagcatcctgggcgtgatcgacatcatcggcaacatcaccttcggctggctgaccgacagaagattctgcatcaagaccttcggcatcttcagaaagagcgtgagaaagatgtacatcctgagaagcaccatcctgcacttctacaccgagttctag

SEQ ID NO: 99453 - DNA, 1842 bp, synthetic construct
  misc_feature 1..1842: note = Description of Artificial Sequence: Synthetic coding sequence
  source 1..1842: mol_type = other DNA
atgggcagaggcggcggcggcctggacgtgggcggcggcggcgagggcagcagagacagactgagcagagacggcctggccagctggggcgccgagcccggcggcggcggcagcggcagcggcagcagcagcccccccagcagcagcagctgcagcagcagaaacaagtaccagccccagagcggcagcagcggccccagcagccacagcccccccgccgccatggccctgcagagccaggccagcgaggaggccaagggcccctggcaggaggccgaccaggagcagcaggagcccgtgggcagccccgagcccgagagcgagcccgagcccgagcccgagcccgagcccgtgcccgtgcccccccccgagccccagcccgagccccagcccctgcccgaccccgcccccctgcccgagctggagttcgagagcgagagagtgcacgagcccgagcccacccccaccgtggagaccagaggcaccgccagaggcttccagccccccgagggcggcttcggctgggtggtggtgttcgccgccacctggtgcaacggcagcatcttcggcatccacaacagcgtgggcatcctgtacagcatgctgctggaggaggagaaggagaagaacagacaggtggagttccaggccgcctgggtgggcgccctggccatgggcatgatcttcttctgcagccccatcgtgagcatcttcaccgacagactgggctgcagaatcaccgccaccgccggcgccgccgtggccttcatcggcctgcacaccagcagcttcaccagcagcctgagcctgagatacttcacctacggcatcctgttcggctgcggctgcagcttcgccttccagcccagcctggtgatcctgggccactacttccagagaagactgggcctggccaacggcgtggtgagcgccggcagcagcatcttcagcatgagcttccccttcctgatcagaatgctgggcgacaagatcaagctggcccagaccttccaggtgctgagcaccttcatgttcgtgctgatgctgctgagcctgacctacagacccctgctgcccagcagccaggacacccccagcaagagaggcgtgagaaccctgcaccagagattcctggcccagctgagaaagtacttcaacatgagagtgttcagacagagaacctacagaatctgggccttcggcatcgccgccgccgccctgggctacttcgtgccctacgtgcacctgatgaagtacgtggaggaggagttcagcgagatcaaggagacctgggtgctgctggtgtgcatcggcgccaccagcggcctgggcagactggtgagcggccacatcagcgacagcatccccggcctgaagaagatctacctgcaggtgctgagcttcctgctgctgggcctgatgagcatgatgatccccctgtgcagagacttcggcggcctgatcgtggtgtgcctgttcctgggcctgtgcgacggcttcttcatcaccatcatggcccccatcgccttcgagctggtgggccccatgcaggccagccaggccatcggctacctgctgggcatgatggccctgcccatgatcgccggcccccccatcgccggcctgctgagaaactgcttcggcgactaccacgtggccttctacttcgccggcgtgccccccatcatcggcgccgtgatcctgttcttcgtgcccctgatgcaccagagaatgttcaagaaggagcagagagacagcagcaaggacaagatgctggcccccgaccccgaccccaacggcgagctgctgcccggcagccccaaccccgaggagcccatctag

SEQ ID NO: 99454 - DNA, 1437 bp, synthetic construct
  misc_feature 1..1437: note = Description of Artificial Sequence: Synthetic coding sequence
  source 1..1437: mol_type = other DNA
atgccccccatgcccagcgccccccccgtgcaccccccccccgacggcggctggggctggatcgtggtgggcgccgccttcatcagcatcggcttcagctacgccttccccaaggccgtgaccgtgttcttcaaggagatccagcagatcttccacaccacctacagcgagatcgcctggatcagcagcatcatgctggccgtgatgtacgccggcggccccgtgagcagcgtgctggtgaacaagtacggcagcagacccgtggtgatcgccggcggcctgctgtgctgcctgggcatggtgctggccagcttcagcagcagcgtggtgcagctgtacctgaccatgggcttcatcaccggcctgggcctggccttcaacctgcagcccgccctgaccatcatcggcaagtacttctacagaaagagacccatggccaacggcctggccatggccggcagccccgtgttcctgagcagcctggcccccttcaaccagtacctgttcaacaccttcggctggaagggcagcttcctgatcctgggcagcctgctgctgaacgcctgcgtggccggcagcctgatgagacccctgggccccaaccagaccaccagcaagagcaagaacaagaccggcaagaccgaggacgacagcagccccaagaagatcaagaccaagaagagcacctgggagaaggtgaacaagtacctggacttcagcctgttcaagcacagaggcttcctgatctacctgagcggcaacgtgatcatgttcctgggcttcttcgcccccatcatcttcctggccccctacgccaaggaccagggcatcgacgagtacagcgccgccttcctgctgagcgtgatggccttcgtggacatgttcgccagacccagcgtgggcctgatcgccaacagcaagtacatcagacccagaatccagtacttcttcagcttcgccatcatgttcaacggcgtgtgccacctgctgtgccccctggcccaggactacaccagcctggtgctgtacgccgtgttcttcggcctgggcttcggcagcgtgagcagcgtgctgttcgagaccctgatggacctggtgggcgcccccagattcagcagcgccgtgggcctggtgaccatcgtggagtgcggccccgtgctgctgggcccccccctggccggcaagctggtggacctgaccggcgagtacaagtacatgtacatgagctgcggcgccatcgtggtggccgccagcgtgtggctgctgatcggcaacgccatcaactacagactgctggccaaggagagaaaggaggagaacgccagacagaagaccagagagagcgagcccctgagcaagagcaagcacagcgaggacgtgaacgtgaaggtgagcaacgcccagagcgtgaccagcgagagagagaccaacatctag

SEQ ID NO: 99455 - DNA, 1140 bp, synthetic construct
  misc_feature 1..1140: note = Description of Artificial Sequence: Synthetic coding sequence
  source 1..1140: mol_type = other DNA
atggtgctggccagcttcagcagcagcgtggtgcagctgtacctgaccatgggcttcatcaccggcctgggcctggccttcaacctgcagcccgccctgaccatcatcggcaagtacttctacagaaagagacccatggccaacggcctggccatggccggcagccccgtgttcctgagcagcctggcccccttcaaccagtacctgttcaacaccttcggctggaagggcagcttcctgatcctgggcagcctgctgctgaacgcctgcgtggccggcagcctgatgagacccctgggccccaaccagaccaccagcaagagcaagaacaagaccggcaagaccgaggacgacagcagccccaagaagatcaagaccaagaagagcacctgggagaaggtgaacaagtacctggacttcagcctgttcaagcacagaggcttcctgatctacctgagcggcaacgtgatcatgttcctgggcttcttcgcccccatcatcttcctggccccctacgccaaggaccagggcatcgacgagtacagcgccgccttcctgctgagcgtgatggccttcgtggacatgttcgccagacccagcgtgggcctgatcgccaacagcaagtacatcagacccagaatccagtacttcttcagcttcgccatcatgttcaacggcgtgtgccacctgctgtgccccctggcccaggactacaccagcctggtgctgtacgccgtgttcttcggcctgggcttcggcagcgtgagcagcgtgctgttcgagaccctgatggacctggtgggcgcccccagattcagcagcgccgtgggcctggtgaccatcgtggagtgcggccccgtgctgctgggcccccccctggccggcaagctggtggacctgaccggcgagtacaagtacatgtacatgagctgcggcgccatcgtggtggccgccagcgtgtggctgctgatcggcaacgccatcaactacagactgctggccaaggagagaaaggaggagaacgccagacagaagaccagagagagcgagcccctgagcaagagcaagcacagcgaggacgtgaacgtgaaggtgagcaacgcccagagcgtgaccagcgagagagagaccaacatctag

SEQ ID NO: 99456 - DNA, 1437 bp, synthetic construct; identical to SEQ ID NO: 99454
  misc_feature 1..1437: note = Description of Artificial Sequence: Synthetic coding sequence
  source 1..1437: mol_type = other DNA

SEQ ID NO: 99457 - DNA, 1437 bp, synthetic construct; identical to SEQ ID NO: 99454
  misc_feature 1..1437: note = Description of Artificial Sequence: Synthetic coding sequence
  source 1..1437: mol_type = other DNA

SEQ ID NO: 99458 - DNA, 1437 bp, synthetic construct; identical to SEQ ID NO: 99454
  misc_feature 1..1437: note = Description of Artificial Sequence: Synthetic coding sequence
  source 1..1437: mol_type = other DNA

SEQ ID NO: 99459 - DNA, 1530 bp, synthetic construct
  misc_feature 1..1530: note = Description of Artificial Sequence: Synthetic coding sequence
  source 1..1530: mol_type = other DNA
atggagctgaagaagagccccgacggcggctggggctgggtgatcgtgttcgtgagcttcctgacccagttcctgtgctacggcagccccctggccgtgggcgtgctgtacatcgagtggctggacgccttcggcgagggcaagggcaagaccgcctgggtgggcagcctggccagcggcgtgggcctgctggccagccccgtgtgcagcctgtgcgtgagcagcttcggcgccagacccgtgaccatcttcagcggcttcatggtggccggcggcctgatgctgagcagcttcgcccccaacatctacttcctgttcttcagctacggcatcgtggtgggcctgggctgcggcctgctgtacaccgccaccgtgaccatcacctgccagtacttcgacgacagaagaggcctggccctgggcctgatcagcaccggcagcagcgtgggcctgttcatctacgccgccctgcagagaatgctggtggagttctacggcctggacggctgcctgctgatcgtgggcgccctggccctgaacatcctggcctgcggcagcctgatgagacccctgcagagcagcgactgccccctgcccaagaagatcgcccccgaggacctgcccgacaagtacagcatctacaacgagaagggcaagaacctggaggagaacatcaacatcctggacaagagctacagcagcgaggagaagtgcagaatcaccctggccaacggcgactggaagcaggacagcctgctgcacaagaaccccaccgtgacccacaccaaggagcccgagacctacaagaagaaggtggccgagcagacctacttctgcaagcagctggccaagagaaagtggcagctgtacaagaactactgcggcgagaccgtggccctgttcaagaacaaggtgttcagcgccctgttcatcgccatcctgctgttcgacatcggcggcttcccccccagcctgctgatggaggacgtggccagaagcagcaacgtgaaggaggaggagttcatcatgcccctgatcagcatcatcggcatcatgaccgccgtgggcaagctgctgctgggcatcctggccgacttcaagtggatcaacaccctgtacctgtacgtggccaccctgatcatcatgggcctggccctgtgcgccatccccttcgccaagagctacgtgaccctggccctgctgagcggcatcctgggcttcctgaccggcaactggagcatcttcccctacgtgaccaccaagaccgtgggcatcgagaagctggcccacgcctacggcatcctgatgttcttcgccggcctgggcaacagcctgggcccccccatcgtgggctggttctacgactggacccagacctacgacatcgccttctacttcagcggcttctgcgtgctgctgggcggcttcatcctgctgctggccgccctgcccagctgggacacctgcaacaagcagctgcccaagcccgcccccaccaccttcctgtacaaggtggccagcaacgtgtag

SEQ ID NO: 99460 - DNA, 1530 bp, synthetic construct; identical to SEQ ID NO: 99459
  misc_feature 1..1530: note = Description of Artificial Sequence: Synthetic coding sequence
  source 1..1530: mol_type = other DNA

SEQ ID NO: 99461 - DNA, 198 bp, synthetic construct
  misc_feature 1..198: note = Description of Artificial Sequence: Synthetic coding sequence
  source 1..198: mol_type = other DNA
atggagctgaagaagagccccgacggcggctggggctgggtgatcgtgttcgtgagcttcctgacccagttcctgtgctacggcagccccctggccgtgggcgtgctgtacatcgagtggctggacgccttcggcgagggcaagggcaagaccgcctgggtgggcagcctggccagcggcgtgggcctgctggcctag

SEQ ID NO: 99462 - DNA, 1488 bp, synthetic construct
  misc_feature 1..1488: note = Description of Artificial Sequence: Synthetic coding sequence
  source 1..1488: mol_type = other DNA
atgagaagccccgtgagagacctggccagaaacgacggcgaggagagcaccgacagaacccccctgctgcccggcgcccccagagccgaggccgcccccgtgtgctgcagcgccagatacaacctggccatcctggccttcttcggcttcttcatcgtgtacgccctgagagtgaacctgagcgtggccctggtggacatggtggacagcaacaccaccctggaggacaacagaaccagcaaggcctgccccgagcacagcgcccccatcaaggtgcaccacaaccagaccggcaagaagtaccagtgggacgccgagacccagggctggatcctgggcagcttcttctacggctacatcatcacccagatccccggcggctacgtggccagcaagatcggcggcaagatgctgctgggcttcggcatcctgggcaccgccgtgctgaccctgttcacccccatcgccgccgacctgggcgtgggccccctgatcgtgctgagagccctggagggcctgggcgagggcgtgaccttccccgccatgcacgccatgtggagcagctgggccccccccctggagagaagcaagctgctgagcatcagctacgccggcgcccagctgggcaccgtgatcagcctgcccctgagcggcatcatctgctactacatgaactggacctacgtgttctacttcttcggcaccatcggcatcttctggttcctgctgtggatctggctggtgagcgacaccccccagaagcacaagagaatcagccactacgagaaggagtacatcctgagcagcctgagaaaccagctgagcagccagaagagcgtgccctgggtgcccatcctgaagagcctgcccctgtgggccatcgtggtggcccacttcagctacaactggaccttctacaccctgctgaccctgctgcccacctacatgaaggagatcctgagattcaacgtgcaggagaacggcttcctgagcagcctgccctacctgggcagctggctgtgcatgatcctgagcggccaggccgccgacaacctgagagccaagtggaacttcagcaccctgtgcgtgagaagaatcttcagcctgatcggcatgatcggccccgccgtgttcctggtggccgccggcttcatcggctgcgactacagcctggccgtggccttcctgaccatcagcaccaccctgggcggcttctgcagcagcggcttcagcatcaaccacctggacatcgcccccagctacgccggcatcctgctgggcatcaccaacaccttcgccaccatccccggcatggtgggccccgtgatcgccaagagcctgacccccgacaacaccgtgggcgagtggcagaccgtgttctacatcgccgccgccatcaacgtgttcggcgccatcttcttcaccctgttcgccaagggcgaggtgcagaactgggccctgaacgaccaccacggccacagacactag

SEQ ID NO: 99463 - DNA, 546 bp, synthetic construct
  misc_feature 1..546: note = Description of Artificial Sequence: Synthetic coding sequence
  source 1..546: mol_type = other DNA
atgagaagccccgtgagagacctggccagaaacgacggcgaggagagcaccgacagaacccccctgctgcccggcgcccccagagccgaggccgcccccgtgtgctgcagcgccagatacaacctggccatcctggccttcttcggcttcttcatcgtgtacgccctgagagtgaacctgagcgtggccctggtggacatggtggacagcaacaccaccctggaggacaacagaaccagcaaggcctgccccgagcacagcgcccccatcaaggtgcaccacaaccagaccggcaagaagtaccagtgggacgccgagacccagggctggatcctgggcagcttcttctacggctacatcatcacccagatccccggcggctacgtggccagcaagatcggcggcaagatgctgctgggcttcggcatcctgggcaccgccgtgctgaccctgttcacccccatcgccgccgacctgggcgtgggccccctgatcgtgctgagagccctggagggcctgggcgaggagcacagcctgggccagtag

SEQ ID NO: 99464 - DNA, 1404 bp, synthetic construct
  misc_feature 1..1404: note = Description of Artificial Sequence: Synthetic coding sequence
  source 1..1404: mol_type = other DNA
atgcagatggacaacagactgccccccaagaaggtgcccggcttctgcagcttcagatacggcctgagcttcctggtgcactgctgcaacgtgatcatcaccgcccagagagcctgcctgaacctgaccatggtggtgatggtgaacagcaccgacccccacggcctgcccaacaccagcaccaagaagctgctggacaacatcaagaaccccatgtacaactggagccccgacatccagggcatcatcctgagcagcaccagctacggcgtgatcatcatccaggtgcccgtgggctacttcagcggcatctacagcaccaagaagatgatcggcttcgccctgtgcctgagcagcgtgctgagcctgctgatcccccccgccgccggcatcggcgtggcctgggtggtggtgtgcagagccgtgcagggcgccgcccagggcatcgtggccaccgcccagttcgagatctacgtgaagtgggccccccccctggagagaggcagactgaccagcatgagcaccagcggcttcctgctgggccccttcatcgtgctgctggtgaccggcgtgatctgcgagagcctgggctggcccatggtgttctacatcttcggcgcctgcggctgcgccgtgtgcctgctgtggttcgtgctgttctacgacgaccccaaggaccacccctgcatcagcatcagcgagaaggagtacatcaccagcagcctggtgcagcaggtgagcagcagcagacagagcctgcccatcaaggccatcctgaagagcctgcccgtgtgggccatcagcaccggcagcttcaccttcttctggagccacaacatcatgaccctgtacacccccatgttcatcaacagcatgctgcacgtgaacatcaaggagaacggcttcctgagcagcctgccctacctgttcgcctggatctgcggcaacctggccggccagctgagcgacttcttcctgaccagaaacatcctgagcgtgatcgccgtgagaaagctgttcaccgccgccggcttcctgctgcccgccatcttcggcgtgtgcctgccctacctgagcagcaccttctacagcatcgtgatcttcctgatcctggccggcgccaccggcagcttctgcctgggcggcgtgttcatcaacggcctggacatcgcccccagatacttcggcttcatcaaggcctgcagcaccctgaccggcatgatcggcggcctgatcgccagcaccctgaccggcctgatcctgaagcaggaccccgagagcgcctggttcaagaccttcatcctgatggccgccatcaacgtgaccggcctgatcttctacctgatcgtggccaccgccgagatccaggactgggccaaggagaagcagcacaccagactgtag

SEQ ID NO: 99465 - DNA, 630 bp, synthetic construct
  misc_feature 1..630: note = Description of Artificial Sequence: Synthetic coding sequence
  source 1..630: mol_type = other DNA
atgcagatggacaacagactgccccccaagaaggtgcccggcttctgcagcttcagatacggcctgagcttcctggtgcactgctgcaacgtgatcatcaccgcccagagagcctgcctgaacctgaccatggtggtgatggtgaacagcaccgacccccacggcctgcccaacaccagcaccaagaagctgctggacaacatcaagaaccccatgtacaactggagccccgacatccagggcatcatcctgagcagcaccagctacggcgtgatcatcatccaggtgcccgtgggctacttcagcggcatctacagcaccaagaagatgatcggcttcgccctgtgcctgagcagcgtgctgagcctgctgatcccccccgccgccggcatcggcgtggcctgggtggtggtgtgcagagccgtgcagggcgccgcccagggcatcgtggccaccgcccagttcgagatctacgtgaagtgggccccccccctggagagaggcagactgaccagcatgagcaccagcggcttcctgctgggccccttcatcgtgctgctggtgaccggcgtgatctgcgagagcctgggctggcccatggtgttctacatcttcggccagttcaagtag

SEQ ID NO: 99466 - DNA, 1242 bp, synthetic construct
  misc_feature 1..1242: note = Description of Artificial Sequence: Synthetic coding sequence
  source 1..1242: mol_type = other DNA
atgcagatggacaacagactgccccccaagaaggtgcccggcttctgcagcttcagatacggcctgagcttcctggtgcactgctgcaacgtgatcatcaccgcccagagagcctgcctgaacctgaccatggtggtgatggtgaacagcaccgacccccacggcctgcccaacaccagcaccaagaagctgctggacaacatcaagaaccccatgtacaactggagccccgacatccagggcatcatcctgagcagcaccagctacggcgtgatcatcatccaggtgcccgtgggctacttcagcggcatctacagcaccaagaagatgatcggcttcgccctgtgcctgagcagcgtgctgagcctgctgatcccccccgccgccggcatcggcgtggcctgggtggtggtgtgcagagccgtgcagggcgccgcccagggcatcgtggccaccgcccagttcgagatctacgtgaagtgggccccccccctggagagaggcagactgaccagcatgagcaccagcggcttcctgctgggccccttcatcgtgctgctggtgaccggcgtgatctgcgagagcctgggctggcccatggtgttctacatcttcggcgcctgcggctgcgccgtgtgcctgctgtggttcgtgctgttctacgacgaccccaaggaccacccctgcatcagcatcagcgagaaggagtacatcaccagcagcctggtgcagcagaacggcttcctgagcagcctgccctacctgttcgcctggatctgcggcaacctggccggccagctgagcgacttcttcctgaccagaaacatcctgagcgtgatcgccgtgagaaagctgttcaccgccgccggcttcctgctgcccgccatcttcggcgtgtgcctgccctacctgagcagcaccttctacagcatcgtgatcttcctgatcctggccggcgccaccggcagcttctgcctgggcggcgtgttcatcaacggcctggacatcgcccccagatacttcggcttcatcaaggcctgcagcaccctgaccggcatgatcggcggcctgatcgccagcaccctgaccggcctgatcctgaagcaggaccccgagagcgcctggttcaagaccttcatcctgatggccgccatcaacgtgaccggcctgatcttctacctgatcgtggccaccgccgagatccaggactgggccaaggagaagcagcacaccagactgtag

SEQ ID NO: 99467 - DNA, 1242 bp, synthetic construct; identical to SEQ ID NO: 99466
  misc_feature 1..1242: note = Description of Artificial Sequence: Synthetic coding sequence
  source 1..1242: mol_type = other DNA

SEQ ID NO: 99468 - DNA, 1404 bp, synthetic construct; identical to SEQ ID NO: 99464
  misc_feature 1..1404: note = Description of Artificial Sequence: Synthetic coding sequence
  source 1..1404: mol_type = other DNA

SEQ ID NO: 99469 - DNA, 1320 bp, synthetic construct
  misc_feature 1..1320: note = Description of Artificial Sequence: Synthetic coding sequence
  source 1..1320: mol_type = other DNA
atggacggcaagcccgccaccagaaagggccccgacttctgcagcctgagatacggcctggccctgatcatgcacttcagcaacttcaccatgatcacccagagagtgagcctgagcatcgccatcatcgccatggtgaacaccacccagcagcagggcctgagcaacgccagcaccgagggccccgtggccgacgccttcaacaacagcagcatcagcatcaaggagttcgacaccaaggccagcgtgtaccagtggagccccgagacccagggcatcatcttcagcagcatcaactacggcatcatcctgaccctgatccccagcggctacctggccggcatcttcggcgccaagaagatgctgggcgccggcctgctgatcagcagcctgctgaccctgttcacccccctggccgccgacttcggcgtgatcctggtgatcatggtgagaaccgtgcagggcatggcccagggcatggcctggaccggccagttcaccatctgggccaagtgggccccccccctggagagaagcaagctgaccaccatcgccggcagcggcagcgccttcggcagcttcatcatcctgtgcgtgggcggcctgatcagccaggccctgagctggcccttcatcttctacatcttcggcagcaccggctgcgtgtgctgcctgctgtggttcaccgtgatctacgacgaccccatgcaccacccctgcatcagcgtgagagagaaggagcacatcctgagcagcctggcccagcagcccagcagccccggcagagccgtgcccatcaaggccatggtgacctgcctgcccctgtgggccatcttcctgggcttcttcagccacttctggctgtgcaccatcatcctgacctacctgcccacctacatcagcaccctgctgcacgtgaacatcagagacagcggcgtgctgagcagcctgcccttcatcgccgccgccagctgcaccatcctgggcggccagctggccgacttcctgctgagcagaaacctgctgagactgatcaccgtgagaaagctgttcagcagcctgggcctgctgctgcccagcatctgcgccgtggccctgcccttcgtggccagcagctacgtgatcaccatcatcctgctgatcctgatccccggcaccagcaacctgtgcgacagcggcttcatcatcaacaccctggacatcgcccccagatacgccagcttcctgatgggcatcagcagaggcttcggcctgatcgccggcatcatcagcagcaccgccaccggcttcctgatcagccaggtgggccccgtgtactag

SEQ ID NO: 99470 - DNA, 1311 bp, synthetic construct
  misc_feature 1..1311: note = Description of Artificial Sequence: Synthetic coding sequence
  source 1..1311: mol_type = other DNA
atggacggcaagcccgccaccagaaagggccccgacttctgcagcctgagatacggcctggccctgatcatgcacttcagcaacttcaccatgatcacccagagagtgagcctgagcatcgccatcatcgccatggtgaacaccacccagcagcagggcctgagcaacgccagcaccgagggccccgtggccgacgccttcaacaacagcagcatcagcatcaaggagttcgacaccaaggccagcgtgtaccagtggagccccgagacccagggcatcatcttcagcagcatcaactacggcatcatcctgaccctgatccccagcggctacctggccggcatcttcggcgccaagaagatgctgggcgccggcctgctgatcagcagcctgctgaccctgttcacccccctggccgccgacttcggcgtgatcctggtgatcatggtgagaaccgtgcagggcatggcccagggcatggcctggaccggccagttcaccatctgggccaagtgggccccccccctggagagaagcaagctgaccaccatcgccggcagcggcagcgccttcggcagcttcatcatcctgtgcgtgggcggcctgatcagccaggccctgagctggcccttcatcttctacatcttcggcagcaccggctgcgtgtgctgcctgctgtggttcaccgtgatctacgacgaccccatgcaccacccctgcatcagcgtgagagagaaggagcacatcctgagcagcctggcccagcagcccagcagccccggcagagccgtgcccatcaaggccatggtgacctgcctgcccctgtgggccatcttcctgggcttcttcagccacttctggctgtgcaccatcatcctgacctacctgcccacctacatcagcaccctgctgcacgtgaacatcagagacagcggcgtgctgagcagcctgcccttcatcgccgccgccagctgcaccatcctgggcggccagctggccgacttcctgctgagcagaaacctgctgagactgatcaccgtgagaaagctgttcagcagcctggacatgcaggtgagcagctgggagagccagggcgacctgggcagcagccaggagagcagcctgcccctgcccctggacagcagcagcgtgagaatcctgagcctggtgggcggcatgagcttcagctgcctgctgcagagcacctgcctggcctggagcttcaccagcagactggacaagcagaacttcaagaccggccccaagagaggccccctgcccgccagcgaggacatcaagctgcagacctag

SEQ ID NO: 99471 - DNA, 1437 bp, synthetic construct
  misc_feature 1..1437: note = Description of Artificial Sequence: Synthetic coding sequence
  source 1..1437: mol_type = other DNA
atggacggcaagcccgccaccagaaagggccccgacttctgcagcctgagatacggcctggccctgatcatgcacttcagcaacttcaccatgatcacccagagagtgagcctgagcatcgccatcatcgccatggtgaacaccacccagcagcagggcctgagcaacgccagcaccgagggccccgtggccgacgccttcaacaacagcagcatcagcatcaaggagttcgacaccaaggccagcgtgtaccagtggagccccgagacccagggcatcatcttcagcagcatcaactacggcatcatcctgaccctgatccccagcggctacctggccggcatcttcggcgccaagaagatgctgggcgccggcctgctgatcagcagcctgctgaccctgttcacccccctggccgccgacttcggcgtgatcctggtgatcatggtgagaaccgtgcagggcatggcccagggcatggcctggaccggccagttcaccatctgggccaagtgggccccccccctggagagaagcaagctgaccaccatcgccggcagcggcagcgccttcggcagcttcatcatcctgtgcgtgggcggcctgatcagccaggccctgagctggcccttcatcttctacatcttcggcagcaccggctgcgtgtgctgcctgctgtggttcaccgtgatctacgacgaccccatgcaccacccctgcatcagcgtgagagagaaggagcacatcctgagcagcctggcccagcagcccagcagccccggcagagccgtgcccatcaaggccatggtgacctgcctgcccctgtgggccatcttcctgggcttcttcagccacttctggctgtgcaccatcatcctgacctacctgcccacctacatcagcaccctgctgcacgtgaacatcagagacagcggcgtgctgagcagcctgcccttcatcgccgccgccagctgcaccatcctgggcggccagctggccgacttcctgctgagcagaaacctgctgagactgatcaccgtgagaaagctgttcagcagcctgggcctgctgctgcccagcatctgcgccgtggccctgcccttcgtggccagcagctacgtgatcaccatcatcctgctgatcctgatccccggcaccagcaacctgtgcgacagcggcttcatcatcaacaccctggacatcgcccccagatacgccagcttcctgatgggcatcagcagaggcttcggcctgatcgccggcatcatcagcagcaccgccaccggcttcctgatcagccaggacttcgagagcggctggagaaacgtgttcttcctgagcgccgccgtgaacatgttcggcctggtgttctacctgaccttcggccaggccgagctgcaggactgggccaaggagagaaccctgaccagactgtag

SEQ ID NO: 99472 - DNA, 1263 bp, synthetic construct
  misc_feature 1..1263: note = Description of Artificial Sequence: Synthetic coding sequence
  source 1..1263: mol_type = other DNA
atggccaccaagaccgagctgagccccaccgccagagagagcaagaacgcccaggacatgcaggtggacgagaccctgatccccagaaaggtgcccagcctgtgcagcgccagatacggcatcgccctggtgctgcacttctgcaacttcaccaccatcgcccagaacgtgatcatgaacatcaccatggtggccatggtgaacagcaccagcccccagagccagctgaacgacagcagcgaggtgctgcccgtggacagcttcggcggcctgagcaaggcccccaagagcctgcccgccaagagcagcatcctgggcggccagttcgccatctgggagaagtggggccccccccaggagagaagcagactgtgcagcatcgccctgagcggcatgctgctgggctgcttcaccgccatcctgatcggcggcttcatcagcgagaccctgggctggcccttcgtgttctacatcttcggcggcgtgggctgcgtgtgctgcctgctgtggttcgtggtgatctacgacgaccccgtgagctacccctggatcagcaccagcgagaaggagtacatcatcagcagcctgaagcagcaggtgggcagcagcaagcagcccctgcccatcaaggccatgctgagaagcctgcccatctggagcatctgcctgggctgcttcagccaccagtggctggtgagcaccatggtggtgtacatccccacctacatcagcagcgtgtaccacgtgaacatcagagacaacggcctgctgagcgccctgcccttcatcgtggcctgggtgatcggcatggtgggcggctacctggccgacttcctgctgaccaagaagttcagactgatcaccgtgagaaagatcgccaccatcctgggcagcctgcccagcagcgccctgatcgtgagcctgccctacctgaacagcggctacatcaccgccaccgccctgctgaccctgagctgcggcctgagcaccctgtgccagagcggcatctacatcaacgtgctggacatcgcccccagatacagcagcttcctgatgggcgccagcagaggcttcagcagcatcgcccccgtgatcgtgcccaccgtgagcggcttcctgctgagccaggaccccgagttcggctggagaaacgtgttcttcctgctgttcgccgtgaacctgctgggcctgctgttctacctgatcttcggcgaggccgacgtgcaggagtgggccaaggagagaaagctgaccagactgtag

SEQ ID NO: 99473 - DNA, 1263 bp, synthetic construct; identical to SEQ ID NO: 99472
  misc_feature 1..1263: note = Description of Artificial Sequence: Synthetic coding sequence
  source 1..1263: mol_type = other DNA

SEQ ID NO: 99474 - DNA, 1497 bp, synthetic construct
  misc_feature 1..1497: note = Description of Artificial Sequence: Synthetic coding sequence
  source 1..1497: mol_type = other DNA
atggccaccaagaccgagctgagccccaccgccagagagagcaagaacgcccaggacatgcaggtggacgagaccctgatccccagaaaggtgcccagcctgtgcagcgccagatacggcatcgccctggtgctgcacttctgcaacttcaccaccatcgcccagaacgtgatcatgaacatcaccatggtggccatggtgaacagcaccagcccccagagccagctgaacgacagcagcgaggtgctgcccgtggacagcttcggcggcctgagcaaggcccccaagagcctgcccgccaaggcccccgtgtacgactggagcccccagatccagggcatcatcttcggcgccgtgggctacggcggcatcctgaccatggcccccagcggctacctggccggcagagtgggcaccaagagagtggtgggcatcagcctgttcgccaccagcttcctgaccctgtgcatccccctggccaccgacttcggcatcgtgctgctgatcgtgaccagaatcgtgcagggcctgagccagagcagcatcctgggcggccagttcgccatctgggagaagtggggccccccccaggagagaagcagactgtgcagcatcgccctgagcggcatgctgctgggctgcttcaccgccatcctgatcggcggcttcatcagcgagaccctgggctggcccttcgtgttctacatcttcggcggcgtgggctgcgtgtgctgcctgctgtggttcgtggtgatctacgacgaccccgtgagctacccctggatcagcaccagcgagaaggagtacatcatcagcagcctgaagcagcaggtgggcagcagcaagcagcccctgcccatcaaggccatgctgagaagcctgcccatctggagcatctgcctgggctgcttcagccaccagtggctggtgagcaccatggtggtgtacatccccacctacatcagcagcgtgtaccacgtgaacatcagagacaacggcctgctgagcgccctgcccttcatcgtggcctgggtgatcggcatggtgggcggctacctggccgacttcctgctgaccaagaagttcagactgatcaccgtgagaaagatcgccaccatcctgggcagcctgcccagcagcgccctgatcgtgagcctgccctacctgaacagcggctacatcaccgccaccgccctgctgaccctgagctgcggcctgagcaccctgtgccagagcggcatctacatcaacgtgctggacatcgcccccagatacagcagcttcctgatgggcgccagcagaggcttcagcagcatcgcccccgtgatcgtgcccaccgtgagcggcttcctgctgagccaggaccccgagttcggctggagaaacgtgttcttcctgctgttcgccgtgaacctgctgggcctgctgttctacctgatcttcggcgaggccgacgtgcaggagtgggccaaggagagaaagctgaccagactgtag

SEQ ID NO: 99475 - DNA, 300 bp, synthetic construct
  misc_feature 1..300: note = Description of Artificial Sequence: Synthetic coding sequence
  source 1..300: mol_type = other DNA
tgaaccctgagctgcggcctgagcaccctgtgccagagcggcatctacatcaacgtgctggacatcgcccccagatacagcagcttcctgatgggcgccagcagaggcttcagcagcatcgcccccgtgatcgtgcccaccgtgagcggcttcctgctgagccaggaccccgagttcggctggagaaacgtgttcttcctgctgttcgccgtgaacctgctgggcctgctgttctacctgatcttcggcgaggccgacgtgcaggagtgggccaaggagagaaagctgaccagactgtag

SEQ ID NO: 99476 - DNA, 156 bp, synthetic construct
  misc_feature 1..156: note = Description of Artificial Sequence: Synthetic coding sequence
  source 1..156: mol_type = other DNA
agcggcttcctgctgagccaggaccccgagttcggctggagaaacgtgttcttcctgctgttcgccgtgaacctgctgggcctgctgttctacctgatcttcggcgaggccgacgtgcaggagtgggccaaggagagaaagctgaccagactgtag

SEQ ID NO: 99477 - DNA, 1494 bp, synthetic construct
  misc_feature 1..1494: note = Description of Artificial Sequence: Synthetic coding sequence
  source 1..1494: mol_type = other DNA
atgagcaccggccccgacgtgaaggccaccgtgggcgacatcagcagcgacggcaacctgaacgtggcccaggaggagtgcagcagaaagggcttctgcagcgtgagacacggcctggccctgatcctgcagctgtgcaacttcagcatctacacccagcagatgaacctgagcatcgccatccccgccatggtgaacaacaccgccccccccagccagcccaacgccagcaccgagagacccagcaccgacagccagggctactggaacgagaccctgaaggagttcaaggccatggcccccgcctacgactggagccccgagatccagggcatcatcctgagcagcctgaactacggcagcttcctggcccccatccccagcggctacgtggccggcatcttcggcgccaagtacgtggtgggcgccggcctgttcatcagcagcttcctgaccctgttcatccccctggccgccaacgccggcgtggccctgctgatcgtgctgagaatcgtgcagggcatcgcccaggtgatggtgctgaccggccagtacagcatctgggtgaagtgggccccccccctggagagaagccagctgaccaccatcgccggcagcggcagcatgctgggcagcttcatcgtgctgctggccggcggcctgctgtgccagaccatcggctggccctacgtgttctacatcttcggcggcatcggctgcgcctgctgccccctgtggttccccctgatctacgacgaccccgtgaaccaccccttcatcagcgccggcgagaagagatacatcgtgtgcagcctggcccagcaggactgcagccccggctggagcctgcccatcagagccatgatcaagagcctgcccctgtgggccatcctggtgagctacttctgcgagtactggctgttctacaccatcatggcctacacccccacctacatcagcagcgtgctgcaggccaacctgagagacagcggcatcctgagcgccctgcccttcgtggtgggctgcatctgcatcatcctgggcggcctgctggccgacttcctgctgagcagaaagatcctgagactgatcaccatcagaaagctgttcaccgccatcggcgtgctgttccccagcgtgatcctggtgagcctgccctgggtgagaagcagccacagcatgaccatgaccttcctggtgctgagcagcgccatcagcagcttctgcgagagcggcgccctggtgaacttcctggacatcgcccccagatacaccggcttcctgaagggcctgctgcaggtgttcgcccacatcgccggcgccatcagccccaccgccgccggcttcttcatcagccaggacagcgagttcggctggagaaacgtgttcctgctgagcgccgccgtgaacatcagcggcctggtgttctacctgatcttcggcagagccgacgtgcaggactgggccaaggagcagaccttcacccacctgtag

SEQ ID NO: 99478 - DNA, 666 bp, synthetic construct
  misc_feature 1..666: note = Description of Artificial Sequence: Synthetic coding sequence
  source 1..666: mol_type = other DNA
atgaacctgagcatcgccatccccgccatggtgaacaacaccgccccccccagccagcccaacgccagcaccgagagacccagcaccgacagccagggctactggaacgagaccctgaaggagttcaaggccatggactgcagccccggctggagcctgcccatcagagccatgatcaagagcctgcccctgtgggccatcctggtgagctacttctgcgagtactggctgttctacaccatcatggcctacacccccacctacatcagcagcgtgctgcaggccaacctgagagacagcggcatcctgagcgccctgcccttcgtggtgggctgcatctgcatcatcctgggcggcctgctggccgacttcctgctgagcagaaagatcctgagactgatcaccatcagaaagctgttcaccgccatcggcaagggcgagaccggccacagaggcgagagaggcaagctgagagccgccttcagcctgctgtgcgtgtgcccccccacccccggcgtgctgttccccagcgtgatcctggtgagcctgccctgggtgagaagcagccacagcatgaccatgaccttcctggtgctgagcagcgccatcagcagcttctgcgagagcggcgccctggtgaacttcctggacatcgcccccagatag

SEQ ID NO: 99479 - DNA, 804 bp, synthetic construct
  misc_feature 1..804: note = Description of Artificial Sequence: Synthetic coding sequence
  source 1..804: mol_type = other DNA
atgagcaccggccccgacgtgaaggccaccgtgggcgacatcagcagcgacggcaacctgaacgtggcccaggaggagtgcagcagaaagggcttctgcagcgtgagacacggcctggccctgatcctgcagctgtgcaacttcagcatctacacccagcagatgaacctgagcatcgccatccccgccatggtgaacaacaccgccccccccagccagcccaacgccagcaccgagagacccagcaccgacagccagggctactggaacgagaccctgaaggagttcaaggccatgagcggcatcctgagcgccctgcccttcgtggtgggctgcatctgcatcatcctgggcggcctgctggccgacttcctgctgagcagaaagatcctgagactgatcaccatcagaaagctgttcaccgccatcggcgtgctgttccccagcgtgatcctggtgagcctgccctgggtgagaagcagccacagcatgaccatgaccttcctggtgctgagcagcgccatcagcagcttctgcgagagcggcgccctggtgaacttcctggacatcgcccccagatacaccggcttcctgaagggcctgctgcaggtgttcgcccacatcgccggcgccatcagccccaccgccgccggcttcttcatcagccaggacagcgagttcggctggagaaacgtgttcctgctgagcgccgccgtgaacatcagcggcctggtgttctacctgatcttcggcagagccgacgtgcaggactgggccaaggagcagaccttcacccacctgtag

SEQ ID NO: 99480 - DNA, 1749 bp, synthetic construct
  misc_feature 1..1749: note = Description of Artificial Sequence: Synthetic coding sequence
  source 1..1749: mol_type = other DNA
atggagagcgtgaagcagagaatcctggcccccggcaaggagggcctgaagaacttcgccggcaagagcctgggccagatctacagagtgctggagaagaagcaggacaccggcgagaccatcgagctgaccgaggacggcaagcccctggaggtgcccgagagaaaggcccccctgtgcgactgcacctgcttcggcctgcccagaagatacatcatcgccatcatgagcggcctgggcttctgcatcagcttcggcatcagatgcaacctgggcgtggccatcgtggacatggtgaacaacagcaccatccacagaggcggcaaggtgatcaaggagaaggccaagttcaactgggaccccgagaccgtgggcatgatccacggcagcttcttctggggctacatcatcacccagatccccggcggctacatcgccagcagactggccgccaacagagtgttcggcgccgccatcctgctgaccagcaccctgaacatgctgatccccagcgccgccagagtgcactacggctgcgtgatcttcgtgagaatcctgcagggcctggtggagggcgtgacctaccccgcctgccacggcatctggagcaagtgggccccccccctggagagaagcagactggccaccaccagcttctgcggcagctacgccggcgccgtgatcgccatgcccctggccggcatcctggtgcagtacaccggctggagcagcgtgttctacgtgtacggcagcttcggcatggtgtggtacatgttctggctgctggtgagctacgagagccccgccaagcaccccaccatcaccgacgaggagagaagatacatcgaggagagcatcggcgagagcgccaacctgctgggcgccatggagaagttcaagaccccctggagaaagttcttcaccagcatgcccgtgtacgccatcatcgtggccaacttctgcagaagctggaccttctacctgctgctgatcagccagcccgcctacttcgaggaggtgttcggcttcgagatcagcaaggtgggcatgctgagcgccgtgccccacctggtgatgaccatcatcgtgcccatcggcggccagatcgccgacttcctgagaagcaagcagatcctgagcaccaccaccgtgagaaagatcatgaactgcggcggcttcggcatggaggccaccctgctgctggtggtgggctacagccacaccagaggcgtggccatcagcttcctggtgctggccgtgggcttcagcggcttcgccatcagcggcttcaacgtgaaccacctggacatcgcccccagatacgccagcatcctgatgggcatcagcaacggcgtgggcaccctgagcggcatggtgtgccccatcatcgtgggcgccatgaccaagaacaagagcagagaggagtggcagtacgtgttcctgatcgccgccctggtgcactacggcggcgtgatcttctacgccatcttcgccagcggcgagaagcagccctgggccgaccccgaggagaccagcgaggagaagtgcggcttcatccacgaggacgagctggacgaggagaccggcgacatcacccagaactacatcaactacggcaccaccaagagctacggcgccaccacccaggccaacggcggctggcccagcggctgggagaagaaggaggagttcgtgcagggcgaggtgcaggacagccacagctacaaggacagagtggactacagctag

SEQ ID NO: 99481 - DNA, 1413 bp, synthetic construct
  misc_feature 1..1413: note = Description of Artificial Sequence: Synthetic coding sequence
  source 1..1413: mol_type = other DNA
atgaaggccaagttcaactgggaccccgagaccgtgggcatgatccacggcagcttcttctggggctacatcatcacccagatccccggcggctacatcgccagcagactggccgccaacagagtgttcggcgccgccatcctgctgaccagcaccctgaacatgctgatccccagcgccgccagagtgcactacggctgcgtgatcttcgtgagaatcctgcagggcctggtggagggcgtgacctaccccgcctgccacggcatctggagcaagtgggccccccccctggagagaagcagactggccaccaccagcttctgcggcagctacgccggcgccgtgatcgccatgcccctggccggcatcctggtgcagtacaccggctggagcagcgtgttctacgtgtacggcagcttcggcatggtgtggtacatgttctggctgctggtgagctacgagagccccgccaagcaccccaccatcaccgacgaggagagaagatacatcgaggagagcatcggcgagagcgccaacctgctgggcgccatggagaagttcaagaccccctggagaaagttcttcaccagcatgcccgtgtacgccatcatcgtggccaacttctgcagaagctggaccttctacctgctgctgatcagccagcccgcctacttcgaggaggtgttcggcttcgagatcagcaaggtgggcatgctgagcgccgtgccccacctggtgatgaccatcatcgtgcccatcggcggccagatcgccgacttcctgagaagcaagcagatcctgagcaccaccaccgtgagaaagatcatgaactgcggcggcttcggcatggaggccaccctgctgctggtggtgggctacagccacaccagaggcgtggccatcagcttcctggtgctggccgtgggcttcagcggcttcgccatcagcggcttcaacgtgaaccacctggacatcgcccccagatacgccagcatcctgatgggcatcagcaacggcgtgggcaccctgagcggcatggtgtgccccatcatcgtgggcgccatgaccaagaacaagagcagagaggagtggcagtacgtgttcctgatcgccgccctggtgcactacggcggcgtgatcttctacgccatcttcgccagcggcgagaagcagccctgggccgaccccgaggagaccagcgaggagaagtgcggcttcatccacgaggacgagctggacgaggagaccggcgacatcacccagaactacatcaactacggcaccaccaagagctacggcgccaccacccaggccaacggcggctggcccagcggctgggagaagaaggaggagttcgtgcagggcgaggtgcaggacagccacagctacaaggacagagtggactacagctag

SEQ ID NO: 99482 - DNA, 5223 bp, synthetic construct
  misc_feature 1..5223: note = Description of Artificial Sequence: Synthetic coding sequence
  source 1..5223: mol_type = other DNA
atgggcgagaagctggagctgagactgaagagccccgtgggcgccgagcccgccgtgtacccctggcccctgcccgtgtacgacaagcaccacgacgccgcccacgagatcatcgagaccatcagatgggtgtgcgaggagatccccgacctgaagctggccatggagaactacgtgctgatcgactacgacaccaagagcttcgagagcatgcagagactgtgcgacaagtacaacagagccatcgacagcatccaccagctgtggaagggcaccacccagcccatgaagctgaacaccagacccagcaccggcctgctgagacacatcctgcagcaggtgtacaaccacagcgtgaccgaccccgagaagctgaacaactacgagcccttcagccccgaggtgtacggcgagaccagcttcgacctggtggcccagatgatcgacgagatcaagatgaccgacgacgacctgttcgtggacctgggcagcggcgtgggccaggtggtgctgcaggtggccgccgccaccaactgcaagcaccactacggcgtggagaaggccgacatccccgccaagtacgccgagaccatggacagagagttcagaaagtggatgaagtggtacggcaagaagcacgccgagtacaccctggagagaggcgacttcctgagcgaggagtggagagagagaatcgccaacaccagcgtgatcttcgtgaacaacttcgccttcggccccgaggtggaccaccagctgaaggagagattcgccaacatgaaggagggcggcagaatcgtgagcagcaagcccttcgcccccctgaacttcagaatcaacagcagaaacctgagcgacatcggcaccatcatgagagtggtggagctgagccccctgaagggcagcgtgagctggaccggcaagcccgtgagctactacctgcacaccatcgacagaaccatcctggagaactacttcagcagcctgaagaaccccaagctgagagaggagcaggaggccgccagaagaagacagcagagagagagcaagagcaacgccgccacccccaccaagggccccgagggcaaggtggccggccccgccgacgcccccatggacagcggcgccgaggaggagaaggccggcgccgccaccgtgaagaagcccagccccagcaaggccagaaagaagaagctgaacaagaagggcagaaagatggccggcagaaagagaggcagacccaagaagatgaacaccgccaaccccgagagaaagcccaagaagaaccagaccgccctggacgccctgcacgcccagaccgtgagccagaccgccgccagcagcccccaggacgcctacagaagcccccacagccccttctaccagctgccccccagcgtgcagagacacagccccaaccccctgctggtggcccccaccccccccgccctgcagaagctgctggagagcttcaagatccagtacctgcagttcctggcctacaccaagaccccccagtacaaggccagcctgcaggagctgctgggccaggagaaggagaagaacgcccagctgctgggcgccgcccagcagctgctgagccactgccaggcccagaaggaggagatcagaagactgttccagcagaagctggacgagctgggcgtgaaggccctgacctacaacgacctgatccaggcccagaaggagatcagcgcccacaaccagcagctgagagagcagagcgagcagctggagcaggacaacagagccctgagaggccagagcctgcagctgctgaaggccagatgcgaggagctgcagctggactgggccaccctgagcctggagaagctgctgaaggagaagcaggccctgaagagccagatcagcgagaagcagagacactgcctggagctgcagatcagcatcgtggagctggagaagagccagagacagcaggagctgctgcagctgaagagctgcgtgccccccgacgacgccctgagcctgcacctgagaggcaagggcgccctgggcagagagctggagcccgacgccagcagactgcacctggagctggactgcaccaagttcagcctgccccacctgagcagcatgagccccgagctgagcatgaacggccaggccgccggctacgagctgtgcggcgtgctgagcagacccagcagcaagcagaacaccccccagtacctggccagccccctggaccaggaggtggtgccctgcacccccagccacgtgggcagacccagactggagaagctgagcggcctggccgcccccgactacaccagactgagccccgccaagatcgtgctgagaagacacctgagccaggaccacaccgtgcccggcagacccgccgccagcgagctgcacagcagagccgagcacaccaaggagaacggcctgccctaccagagccccagcgtgcccggcagcatgaagctgagcccccaggaccccagacccctgagccccggcgccctgcagctggccggcgagaagagcagcgagaagggcctgagagagagagcctacggcagcagcggcgagctgatcaccagcctgcccatcagcatccccctgagcaccgtgcagcccaacaagctgcccgtgagcatccccctggccagcgtggtgctgcccagcagagccgagagagccagaagcacccccagccccgtgctgcagcccagagaccccagcagcaccctggagaagcagatcggcgccaacgcccacggcgccggcagcagaagcctggccctggcccccgccggcttcagctacgccggcagcgtggccatcagcggcgccctggccggcagccccgccagcctgacccccggcgccgagcccgccaccctggacgagagcagcagcagcggcagcctgttcgccaccgtgggcagcagaagcagcaccccccagcaccccctgctgctggcccagcccagaaacagcctgcccgccagccccgcccaccagctgagcagcagccccagactgggcggcgccgcccagggccccctgcccgaggccagcaagggcgacctgcccagcgacagcggcttcagcgaccccgagagcgaggccaagagaagaatcgtgttcaccatcaccaccggcgccggcagcgccaagcagagccccagcagcaagcacagccccctgaccgccagcgccagaggcgactgcgtgcccagccacggccaggacagcagaagaagaggcagaagaaagagagccagcgccggcacccccagcctgagcgccggcgtgagccccaagagaagagccctgcccagcgtggccggcctgttcacccagcccagcggcagccccctgaacctgaacagcatggtgagcaacatcaaccagcccctggagatcaccgccatcagcagccccgagaccagcctgaagagcagccccgtgccctaccaggaccacgaccagccccccgtgctgaagaaggagagacccctgagccagaccaacggcgcccactacagccccctgaccagcgacgaggagcccggcagcgaggacgagcccagcagcgccagaatcgagagaaagatcgccaccatcagcctggagagcaagagcccccccaagaccctggagaacggcggcggcctggccggcagaaagcccgcccccgccggcgagcccgtgaacagcagcaagtggaagagcaccttcagccccatcagcgacatcggcctggccaagagcgccgacagccccctgcaggccagcagcgccctgagccagaacagcctgttcaccttcagacccgccctggaggagcccagcgccgacgccaagctggccgcccaccccagaaagggcttccccggcagcctgagcggcgccgacggcctgagccccggcaccaaccccgccaacggctgcaccttcggcggcggcctggccgccgacctgagcctgcacagcttcagcgacggcgccagcctgccccacaagggccccgaggccgccggcctgagcagccccctgagcttccccagccagagaggcaaggagggcagcgacgccaaccccttcctgagcaagagacagctggacggcctggccggcctgaagggcgagggcagcagaggcaaggaggccggcgagggcggcctgcccctgtgcggccccaccgacaagacccccctgctgagcggcaaggccgccaaggccagagacagagaggtggacctgaagaacggccacaacctgttcatcagcgccgccgccgtgccccccggcagcctgctgagcggccccggcctggcccccgccgccagcagcgccggcggcgccgccagcagcgcccagacccacagaagcttcctgggccccttcccccccggcccccagttcgccctgggccccatgagcctgcaggccaacctgggcagcgtggccggcagcagcgtgctgcagagcctgttcagcagcgtgcccgccgccgccggcctggtgcacgtgagcagcgccgccaccagactgaccaacagccacgccatgggcagcttcagcggcgtggccggcggcaccgtgggcgccggcggcgtgttcaaccacgccgtgcccagcgccagcgcccaccccttcggcgccagagtgggcagaggcgccgcctgcggcagcgccaccctgggccccagccccctgcaggccgccgccagcgccagcgccagcagcttccaggcccccgccagcgtggagaccagacccccccccccccccccccccccccccccccccctgcccccccccgcccacctgggcagaagccccgccggcccccccgtgctgcacgccccccccccccccaacgccgccctgccccccccccccaccctgctggccagcaaccccgagcccgccctgctgcagagcctggccagcctgccccccaaccaggccttcctgccccccaccagcgccgccagcctgccccccgccaacgccagcctgagcatcaagctgaccagcctgccccacaagggcgccagacccagcttcaccgtgcaccaccagcccctgcccagactggccctggcccaggccgcccccggcatcccccaggccagcgccaccggccccagcgccgtgtgggtgagcctgggcatgccccccccctacgccgcccacctgagcggcgtgaagcccagatag

SEQ ID NO: 99483 - DNA, 1647 bp, synthetic construct
  misc_feature 1..1647: note = Description of Artificial Sequence: Synthetic coding sequence
  source 1..1647: mol_type = other DNA
atgggcagccagctggccctggccggcctgctggagaagagacaggagggcgccgagaccctggagctgagcgccgacggcagacccgtgaccacccagaccagagacccccccgtggtggactgcacctgcttcggcctgcccagaagatacatcatcgccatcatgagcggcctgggcttctgcatcagcttcggcatcagatgcaacctgggcgtggccatcgtgagcatggtgaacaacagcaccacccacagaggcggccacgtggtggtgcagaaggcccagttcagctgggaccccgagaccgtgggcctgatccacggcagcttcttctggggctacatcgtgacccagatccccggcggcttcatctgccagaagttcgccgccaacagagtgttcggcttcgccatcgtggccaccagcaccctgaacatgctgatccccagcgccgccagagtgcactacggctgcgtgatcttcgtgagaatcctgcagggcctggtggagggcgtgacctaccccgcctgccacggcatctggagcaagtgggccccccccctggagagaagcagactggccaccaccgccttctgcggcagctacgccggcgccgtggtggccatgcccctggccggcgtgctggtgcagtacagcggctggagcagcgtgttctacgtgtacggcagcttcggcatcttctggtacctgttctggctgctggtgagctacgagagccccgccctgcaccccagcatcagcgaggaggagagaaagtacatcgaggacgccatcggcgagagcgccaagctgatgaaccccctgaccaagttcagcaccccctggagaagattcttcaccagcatgcccgtgtacgccatcatcgtggccaacttctgcagaagctggaccttctacctgctgctgatcagccagcccgcctacttcgaggaggtgttcggcttcgagatcagcaaggtgggcctggtgagcgccctgccccacctggtgatgaccatcatcgtgcccatcggcggccagatcgccgacttcctgagaagcagaagaatcatgagcaccaccaacgtgagaaagctgatgaactgcggcggcttcggcatggaggccaccctgctgctggtggtgggctacagccacagcaagggcgtggccatcagcttcctggtgctggccgtgggcttcagcggcttcgccatcagcggcttcaacgtgaaccacctggacatcgcccccagatacgccagcatcctgatgggcatcagcaacggcgtgggcaccctgagcggcatggtgtgccccatcatcgtgggcgccatgaccaagcacaagaccagagaggagtggcagtacgtgttcctgatcgccagcctggtgcactacggcggcgtgatcttctacggcgtgttcgccagcggcgagaagcagccctgggccgagcccgaggagatgagcgaggagaagtgcggcttcgtgggccacgaccagctggccggcagcgacgacagcgagatggaggacgaggccgagccccccggcgccccccccgcccccccccccagctacggcgccacccacagcaccttccagccccccagaccccccccccccgtgagagactactag

SEQ ID NO: 99484 - DNA, 1770 bp, synthetic construct
  misc_feature 1..1770: note = Description of Artificial Sequence: Synthetic coding sequence
  source 1..1770: mol_type = other DNA
atgcccttcaaggccttcgacaccttcaaggagaagatcctgaagcccggcaaggagggcgtgaagaacgccgtgggcgacagcctgggcatcctgcagagaaagatcgacggcaccaccgaggaggaggacaacatcgagctgaacgaggagggcagacccgtgcagaccagcagacccagcccccccctgtgcgactgccactgctgcggcctgcccaagagatacatcatcgccatcatgagcggcctgggcttctgcatcagcttcggcatcagatgcaacctgggcgtggccatcgtggagatggtgaacaacagcaccgtgtacgtggacggcaagcccgagatccagaccgcccagttcaactgggaccccgagaccgtgggcctgatccacggcagcttcttctggggctacatcatgacccagatccccggcggcttcatcagcaacaagttcgccgccaacagagtgttcggcgccgccatcttcctgaccagcaccctgaacatgttcatccccagcgccgccagagtgcactacggctgcgtgatgtgcgtgagaatcctgcagggcctggtggagggcgtgacctaccccgcctgccacggcatgtggagcaagtgggccccccccctggagagaagcagactggccaccaccagcttctgcggcagctacgccggcgccgtggtggccatgcccctggccggcgtgctggtgcagtacatcggctggagcagcgtgttctacatctacggcatgttcggcatcatctggtacatgttctggctgctgcaggcctacgagtgccccgccgcccaccccaccatcagcaacgaggagaagacctacatcgagaccagcatcggcgagggcgccaacgtggtgagcctgagcaagttcagcaccccctggaagagattcttcaccagcctgcccgtgtacgccatcatcgtggccaacttctgcagaagctggaccttctacctgctgctgatcagccagcccgcctacttcgaggaggtgttcggcttcgccatcagcaaggtgggcctgctgagcgccgtgccccacatggtgatgaccatcgtggtgcccatcggcggccagctggccgactacctgagaagcagacagatcctgaccaccaccgccgtgagaaagatcatgaactgcggcggcttcggcatggaggccaccctgctgctggtggtgggcttcagccacaccaagggcgtggccatcagcttcctggtgctggccgtgggcttcagcggcttcgccatcagcggcttcaacgtgaaccacctggacatcgcccccagatacgccagcatcctgatgggcatcagcaacggcgtgggcaccctgagcggcatggtgtgccccctgatcgtgggcgccatgaccagacacaagaccagagaggagtggcagaacgtgttcctgatcgccgccctggtgcactacagcggcgtgatcttctacggcgtgttcgccagcggcgagaagcaggagtgggccgaccccgagaacctgagcgaggagaagtgcggcatcatcgaccaggacgagctggccgaggagatcgagctgaaccacgagagcttcgccagccccaagaagaagatgagctacggcgccaccagccagaactgcgaggtgcagaagaaggagtggaagggccagagaggcgccaccctggacgaggaggagctgaccagctaccagaacgaggagagaaacttcagcaccatcagctag

SEQ ID NO: 99485 - DNA, 1620 bp, synthetic construct
  misc_feature 1..1620: note = Description of Artificial Sequence: Synthetic coding sequence
  source 1..1620: mol_type = other DNA
atgcccttcaaggccttcgacaccttcaaggagaagatcctgaagcccggcaaggagggcgtgaagaacgccgtgggcgacagcctgggcatcctgcagagaaagatcgacggcaccaccgaggaggaggacaacatcgagctgaacgaggagggcagacccgtgcagaccagcagacccagcccccccctgtgcgactgccactgctgcggcctgcccaagagatacatcatcgccatcatgagcggcctgggcttctgcatcagcttcggcatcagatgcaacctgggcgtggccatcgtggagatggtgaacaacagcaccgtgtacgtggacggcaagcccgagatccagaccgcccagttcaactgggaccccgagaccgtgggcctgatccacggcagcttcttctggggctacatcatgacccagatccccggcggcttcatcagcaacaagttcgccgccaacagagtgttcggcgccgccatcttcctgaccagcaccctgaacatgttcatccccagcgccgccagagtgcactacggctgcgtgatgtgcgtgagaatcctgcagggcctggtggagggcgtgacctaccccgcctgccacggcatgtggagcaagtgggccccccccctggagagaagcagactggccaccaccagcttctgcggcagctacgccggcgccgtggtggccatgcccctggccggcgtgctggtgcagtacatcggctggagcagcgtgttctacatctacggcatgttcggcatcatctggtacatgttctggctgctgcaggcctacgagtgccccgccgcccaccccaccatcagcaacgaggagaagacctacatcgagaccagcatcggcgagggcgccaacgtggtgagcctgagcgtgggcctgctgagcgccgtgccccacatggtgatgaccatcgtggtgcccatcggcggccagctggccgactacctgagaagcagacagatcctgaccaccaccgccgtgagaaagatcatgaactgcggcggcttcggcatggaggccaccctgctgctggtggtgggcttcagccacaccaagggcgtggccatcagcttcctggtgctggccgtgggcttcagcggcttcgccatcagcggcttcaacgtgaaccacctggacatcgcccccagatacgccagcatcctgatgggcatcagcaacggcgtgggcaccctgagcggcatggtgtgccccctgatcgtgggcgccatgaccagacacaagaccagagaggagtggcagaacgtgttcctgatcgccgccctggtgcactacagcggcgtgatcttctacggcgtgttcgccagcggcgagaagcaggagtgggccgaccccgagaacctgagcgaggagaagtgcggcatcatcgaccaggacgagctggccgaggagatcgagctgaaccacgagagcttcgccagccccaagaagaagatgagctacggcgccaccagccagaactgcgaggtgcagaagaaggagtggaagggccagagaggcgccaccctggacgaggaggagctgaccagctaccagaacgaggagagaaacttcagcaccatcagctag

SEQ ID NO: 99486 - DNA, 1293 bp, synthetic construct
  misc_feature 1..1293: note = Description of Artificial Sequence: Synthetic coding sequence
  source 1..1293: mol_type = other DNA
atgaccctgaccagcagaagacaggacagccaggaggccagacccgagtgccaggcctggaccggcaccctgctgctgggcacctgcctgctgtactgcgccagaagcagcatgcccatctgcaccgtgagcatgagccaggacttcggctggaacaagaaggaggccggcatcgtgctgagcagcttcttctggggctactgcctgacccaggtggtgggcggccacctgggcgacagaatcggcggcgagaaggtgatcctgctgagcgccagcgcctggggcagcatcaccgccgtgacccccctgctggcccacctgagcagcgcccacctggccttcatgaccttcagcagaatcctgatgggcctgctgcagggcgtgtacttccccgccctgaccagcctgctgagccagaaggtgagagagagcgagagagccttcacctacagcatcgtgggcgccggcagccagttcggcaccctgctgaccggcgccgtgggcagcctgctgctggagtggtacggctggcagagcatcttctacttcagcggcggcctgaccctgctgtgggtgtggtacgtgtacagatacctgctgagcgagaaggacctgatcctggccctgggcgtgctggcccagagcagacccgtgagcagacacaacagagtgccctggagaagactgttcagaaagcccgccgtgtgggccgccgtggtgagccagctgagcgccgcctgcagcttcttcatcctgctgagctggctgcccaccttcttcgaggagaccttccccgacgccaagggctggatcttcaacgtggtgccctggctggtggccatccccgccagcctgttcagcggcttcctgagcgaccacctgatcaaccagggctacagagccatcaccgtgagaaagctgatgcagggcatgggcctgggcctgagcagcgtgttcgccctgtgcctgggccacaccagcagcttctgcgagagcgtggtgttcgccagcgccagcatcggcctgcagaccttcaaccacagcggcatcagcgtgaacatccaggacctggcccccagctgcgccggcttcctgttcggcgtggccaacaccgccggcgccctggccggcgtggtgggcgtgtgcctgggcggctacctgatggagaccaccggcagctggacctgcctgttcaacctggtggccatcatcagcaacctgggcctgtgcaccttcctggtgttcggccaggcccagagagtggacctgagcagcacccacgaggacctgtag

SEQ ID NO: 99487 - DNA, 1311 bp, synthetic construct
  misc_feature 1..1311: note = Description of Artificial Sequence: Synthetic coding sequence
  source 1..1311: mol_type = other DNA
atgcagcccccccccgacgaggccagaagagacatggccggcgacacccagtggagcagacccgagtgccaggcctggaccggcaccctgctgctgggcacctgcctgctgtactgcgccagaagcagcatgcccatctgcaccgtgagcatgagccaggacttcggctggaacaagaaggaggccggcatcgtgctgagcagcttcttctggggctactgcctgacccaggtggtgggcggccacctgggcgacagaatcggcggcgagaaggtgatcctgctgagcgccagcgcctggggcagcatcaccgccgtgacccccctgctggcccacctgagcagcgcccacctggccttcatgaccttcagcagaatcctgatgggcctgctgcagggcgtgtacttccccgccctgaccagcctgctgagccagaaggtgagagagagcgagagagccttcacctacagcatcgtgggcgccggcagccagttcggcaccctgctgaccggcgccgtgggcagcctgctgctggagtggtacggctggcagagcatcttctacttcagcggcggcctgaccctgctgtgggtgtggtacgtgtacagatacctgctgagcgagaaggacctgatcctggccctgggcgtgctggcccagagcagacccgtgagcagacacaacagagtgccctggagaagactgttcagaaagcccgccgtgtgggccgccgtggtgagccagctgagcgccgcctgcagcttcttcatcctgctgagctggctgcccaccttcttcgaggagaccttccccgacgccaagggctggatcttcaacgtggtgccctggctggtggccatccccgccagcctgttcagcggcttcctgagcgaccacctgatcaaccagggctacagagccatcaccgtgagaaagctgatgcagggcatgggcctgggcctgagcagcgtgttcgccctgtgcctgggccacaccagcagcttctgcgagagcgtggtgttcgccagcgccagcatcggcctgcagaccttcaaccacagcggcatcagcgtgaacatccaggacctggcccccagctgcgccggcttcctgttcggcgtggccaacaccgccggcgccctggccggcgtggtgggcgtgtgcctgggcggctacctgatggagaccaccggcagctggacctgcctgttcaacctggtggccatcatcagcaacctgggcctgtgcaccttcctggtgttcggccaggcccagagagtggacctgagcagcacccacgaggacctgtag

SEQ ID NO: 99488 - DNA, 459 bp, synthetic construct
  misc_feature 1..459: note = Description of Artificial Sequence: Synthetic coding sequence
  source 1..459: mol_type = other DNA
atgttccccagacccggcgccctgagctggaccgtgagaagacacacccccagacaggtggagcccccctgcgtgtgcatgaccctgaccagcagaagacaggacagccaggaggccagacccgagtgccaggcctggaccggcaccctgctgctgggcacctgcctgctgtactgcgccagaagcagcatgcccatctgcaccgtgagcatgagccaggacttcggctggaacaagaaggaggccggcatcgtgctgagcagcttcttctggggctactgcctgacccaggtggtgggcggccacctgggcgacagaatcggcggcgagaaggtgatcctgctgagcgccagcgcctggggcagcatcaccgccgtgacccccctgctggcccacctgagcagcgcccacctggccttcatgaccttcagcagaatcctgatgggcctgctgcagtag

SEQ ID NO: 99489 - DNA, 1599 bp, synthetic construct
  misc_feature 1..1599: note = Description of Artificial Sequence: Synthetic coding sequence
  source 1..1599: mol_type = other DNA
atggagagcgccgagcccgccggccaggccagagccgccgccaccaagctgagcgaggccgtgggcgccgccctgcaggagcccagaagacagagaagactggtgctggtgatcgtgtgcgtggccctgctgctggacaacatgctgtacatggtgatcgtgcccatcgtgcccgactacatcgcccacatgagaggcggcggcgagggccccaccagaacccccgaggtgtgggagcccaccctgcccctgcccacccccgccaacgccagcgcctacaccgccaacaccagcgccagccccaccgccgcctggcccgccggcagcgccctgagacccagataccccaccgagagcgaggacgtgaagatcggcgtgctgttcgccagcaaggccatcctgcagctgctggtgaaccccctgagcggccccttcatcgacagaatgagctacgacgtgcccctgctgatcggcctgggcgtgatgttcgccagcaccgtgctgttcgccttcgccgaggactacgccaccctgttcgccgccagaagcctgcagggcctgggcagcgccttcgccgacaccagcggcatcgccatgatcgccgacaagtaccccgaggagcccgagagaagcagagccctgggcgtggccctggccttcatcagcttcggcagcctggtggccccccccttcggcggcatcctgtacgagttcgccggcaagagagtgcccttcctggtgctggccgccgtgagcctgttcgacgccctgctgctgctggccgtggccaagcccttcagcgccgccgccagagccagagccaacctgcccgtgggcacccccatccacagactgatgctggacccctacatcgccgtggtggccggcgccctgaccacctgcaacatccccctggccttcctggagcccaccatcgccacctggatgaagcacaccatggccgccagcgagtgggagatgggcatggcctggctgcccgccttcgtgccccacgtgctgggcgtgtacctgaccgtgagactggccgccagatacccccacctgcagtggctgtacggcgccctgggcctggccgtgatcggcgccagcagctgcatcgtgcccgcctgcagaagcttcgcccccctggtggtgagcctgtgcggcctgtgcttcggcatcgccctggtggacaccgccctgctgcccaccctggccttcctggtggacgtgagacacgtgagcgtgtacggcagcgtgtacgccatcgccgacatcagctacagcgtggcctacgccctgggccccatcgtggccggccacatcgtgcacagcctgggcttcgagcagctgagcctgggcatgggcctggccaacctgctgtacgcccccgtgctgctgctgctgagaaacgtgggcctgctgaccagaagcagaagcgagagagacgtgctgctggacgagcccccccagggcctgtacgacgccgtgagactgagagagagacccgtgagcggccaggacggcgagcccagaagcccccccggccccttcgacgcctgcgaggacgactacaactactactacaccagaagctag

SEQ ID NO: 99490 - DNA, 1482 bp, synthetic construct
  misc_feature 1..1482: note = Description of Artificial Sequence: Synthetic coding sequence
  source 1..1482: mol_type = other DNA
atgctgagaaccatcctggacgccccccagagactgctgaaggagggcagagccagcagacagctggtgctggtggtggtgttcgtggccctgctgctggacaacatgctgttcaccgtggtggtgcccatcgtgcccaccttcctgtacgacatggagttcaaggaggtgaacagcagcctgcacctgggccacgccggcagcagcccccacgccctggccagccccgccttcagcaccatcttcagcttcttcaacaacaacaccgtggccgtggaggagagcgtgcccagcggcatcgcctggatgaacgacaccgccagcaccatccccccccccgccaccgaggccatcagcgcccacaagaacaactgcctgcagggcaccggcttcctggaggaggagatcaccagagtgggcgtgctgttcgccagcaaggccgtgatgcagctgctggtgaaccccttcgtgggccccctgaccaacagaatcggctaccacatccccatgttcgccggcttcgtgatcatgttcctgagcaccgtgatgttcgccttcagcggcacctacaccctgctgttcgtggccagaaccctgcagggcatcggcagcagcttcagcagcgtggccggcctgggcatgctggccagcgtgtacaccgacgaccacgagagaggcagagccatgggcaccgccctgggcggcctggccctgggcctgctggtgggcgcccccttcggcagcgtgatgtacgagttcgtgggcaagagcgcccccttcctgatcctggccttcctggccctgctggacggcgccctgcagctgtgcatcctgcagcccagcaaggtgagccccgagagcgccaagggcacccccctgttcatgctgctgaaggacccctacatcctggtggccgccggcctggccttcctgcccgccagcgtgagctacctgatcggcaccaacctgttcggcgtgctggccaacaagatgggcagatggctgtgcagcctgatcggcatgctggtggtgggcaccagcctgctgtgcgtgcccctggcccacaacatcttcggcctgatcggccccaacgccggcctgggcctggccatcggcatggtggacagcagcatgatgcccatcatgggccacctggtggacctgagacacaccagcgtgtacggcagcgtgtacgccatcgccgacgtggccttctgcatgggcttcgccatcggccccagcaccggcggcgccatcgtgaaggccatcggcttcccctggctgatggtgatcaccggcgtgatcaacatcgtgtacgcccccctgtgctactacctgagaagcccccccgccaaggaggagaagctggccatcctgagccaggactgccccatggagaccagaatgtacgccacccagaagcccaccaaggagttccccctgggcgaggacagcgacgaggagcccgaccacgaggagtag

SEQ ID NO: 99491 - DNA, 1578 bp, synthetic construct
  misc_feature 1..1578: note = Description of Artificial Sequence: Synthetic coding sequence
  source 1..1578: mol_type = other DNA
atgctgagaaccatcctggacgccccccagagactgctgaaggagggcagagccagcagacagctggtgctggtggtggtgttcgtggccctgctgctggacaacatgctgttcaccgtggtggtgcccatcgtgcccaccttcctgtacgacatggagttcaaggaggtgaacagcagcctgcacctgggccacgccggcagcagcccccacgccctggccagccccgccttcagcaccatcttcagcttcttcaacaacaacaccgtggccgtggaggagagcgtgcccagcggcatcgcctggatgaacgacaccgccagcaccatccccccccccgccaccgaggccatcagcgcccacaagaacaactgcctgcagggcaccggcttcctggaggaggagatcaccagagtgggcgtgctgttcgccagcaaggccgtgatgcagctgctggtgaaccccttcgtgggccccctgaccaacagaatcggctaccacatccccatgttcgccggcttcgtgatcatgttcctgagcaccgtgatgttcgccttcagcggcacctacaccctgctgttcgtggccagaaccctgcagggcatcggcagcagcttcagcagcgtggccggcctgggcatgctggccagcgtgtacaccgacgaccacgagagaggcagagccatgggcaccgccctgggcggcctggccctgggcctgctggtgggcgcccccttcggcagcgtgatgtacgagttcgtgggcaagagcgcccccttcctgatcctggccttcctggccctgctggacggcgccctgcagctgtgcatcctgcagcccagcaaggtgagccccgagagcgccaagggcacccccctgttcatgctgctgaaggacccctacatcctggtggccgccggcagcatctgcttcgccaacatgggcgtggccatcctggagcccaccctgcccatctggatgatgcagaccatgtgcagccccaagtggcagctgggcctggccttcctgcccgccagcgtgagctacctgatcggcaccaacctgttcggcgtgctggccaacaagatgggcagatggctgtgcagcctgatcggcatgctggtggtgggcaccagcctgctgtgcgtgcccctggcccacaacatcttcggcctgatcggccccaacgccggcctgggcctggccatcggcatggtggacagcagcatgatgcccatcatgggccacctggtggacctgagacacaccagcgtgtacggcagcgtgtacgccatcgccgacgtggccttctgcatgggcttcgccatcggccccagcaccggcggcgccatcgtgaaggccatcggcttcccctggctgatggtgatcaccggcgtgatcaacatcgtgtacgcccccctgtgctactacctgagaagcccccccgccaaggaggagaagctggccatcctgagccaggactgccccatggagaccagaatgtacgccacccagaagcccaccaaggagttccccctgggcgaggacagcgacgaggagcccgaccacgaggagtag

SEQ ID NO: 99492 - DNA, 1419 bp, synthetic construct
  misc_feature 1..1419: note = Description of Artificial Sequence: Synthetic coding sequence
  source 1..1419: mol_type = other DNA
atgctgagaaccatcctggacgccccccagagactgctgaaggagggcagagccagcagacagctggtgctggtggtggtgttcgtggccctgctgctggacaacatgctgttcaccgtggtggtgcccatcgtgcccaccttcctgtacgacatggagttcaaggaggtgaacagcagcctgcacctgggccacgccggcagcagcccccacgccctggccagccccgccttcagcaccatcttcagcttcttcaacaacaacaccgtggccgtggaggagagcgtgcccagcggcatcgcctggatgaacgacaccgccagcaccatccccccccccgccaccgaggccatcagcgcccacaagaacaactgcctgcagggcaccggcttcctggaggaggagatcaccagagtgggcgtgctgttcgccagcaaggccgtgatgcagctgctggtgaaccccttcgtgggccccctgaccaacagaatcggctaccacatccccatgttcgccggcttcgtgatcatgttcctgagcaccgtgatgttcgccttcagcggcacctacaccctgctgttcgtggccagaaccctgcagggcatcggcagcagcttcagcagcgtggccggcctgggcatgctggccagcgtgtacaccgacgaccacgagagaggcagagccatgggcaccgccctgggcggcctggccctgggcctgctggtgggcgcccccttcggcagcgtgatgtacgagttcgtgggcaagagcgcccccttcctgatcctggccttcctggccctgctggacggcgccctgcagctgtgcatcctgcagcccagcaaggtgagccccgagagcgccaagggcacccccctgttcatgctgctgaaggacccctacatcctggtggccgccggcagcatctgcttcgccaacatgggcgtggccatcctggagcccaccctgcccatctggatgatgcagaccatgtgcagccccaagtggcagctgggcctggccttcctgcccgccagcgtgagctacctgatcggcaccaacctgttcggcgtgctggccaacaagatgggcagatggctgtgcagcctgatcggcatgctggtggtgggcaccagcctgctgtgcgtgcccctggcccacaacatcttcggcctgatcggccccaacgccggcctgggcctggccatcggcatggtggacagcagcatgatgcccatcatgggccacctggtggacctgagacacaccagcgtgtacggcagcgtgtacgccatcgccgacgtggccttctgcatgggcttcgccatcggctacagcgagagcggcctgccccacggcgaccccgacgtgtgcaaccccgaggcccacgagggcatcagcagcggcggcggccagtag

SEQ ID NO: 99493 - DNA, 1578 bp, synthetic construct; identical to SEQ ID NO: 99491
  misc_feature 1..1578: note = Description of Artificial Sequence: Synthetic coding sequence
  source 1..1578: mol_type = other DNA

SEQ ID NO: 99494 - DNA, 1158 bp, synthetic construct
  misc_feature 1..1158: note = Description of Artificial Sequence: Synthetic coding sequence
  source 1..1158: mol_type = other DNA
atgctgagaaccatcctggacgccccccagagactgctgaaggagggcagagccagcagacagctggtgctggtggtggtgttcgtggccctgctgctggacaacatgctgttcaccgtggtggtgcccatcgtgcccaccttcctgtacgacatggagttcaaggaggtgaacagcagcctgcacctgggccacgccggcagcagcccccacgccctggccagccccgccttcagcaccatcttcagcttcttcaacaacaacaccgtggccgtggaggagagcgtgcccagcggcatcgcctggatgaacgacaccgccagcaccatccccccccccgccaccgaggccatcagcgcccacaagaacaactgcctgcagggcaccggcttcctggaggaggagatcaccagagtgggcgtgctgttcgccagcaaggccgtgatgcagctgctggtgaaccccttcgtgggccccctgaccaacagaatcggctaccacatccccatgttcgccggcttcgtgatcatgttcctgagcaccgtgatgttcgccttcagcggcacctacaccctgctgttcgtggccagaaccctgcagggcatcggcagcagcttcagcagcgtggccggcctgggcatgctggccagcgtgtacaccgacgaccacgagagaggcagagccatgggcaccgccctgggcggcctggccctgggcctgctggtgggcgcccccttcggcagcgtgatgtacgagttcgtgggcaagagcgcccccttcctgatcctggccttcctggccctgctggacggcgccctgcagctgtgcatcctgcagcccagcaaggtgagccccgagagcgccaagggcacccccctgttcatgctgctgaaggacccctacatcctggtggccgccggcagcatctgcttcgccaacatgggcgtggccatcctggagcccaccctgcccatctggatgatgcagaccatgtgcagccccaagtggcagctgggcctggccttcctgcccgccagcgtgagctacctgatcggcaccaacctgttcggcgtgctggccaacaagatgggcagatggctgtgcagcctgatcggcatgctggtggtgggcaccagcctgctgtgcctgcccagctag

SEQ ID NO: 99495 - DNA, 1482 bp, synthetic construct; identical to SEQ ID NO: 99490
  misc_feature 1..1482: note = Description of Artificial Sequence: Synthetic coding sequence
  source 1..1482: mol_type = other DNA

SEQ ID NO: 99496 - DNA, 1545 bp, synthetic construct
  misc_feature 1..1545: note = Description of Artificial Sequence: Synthetic coding sequence
  source 1..1545: mol_type = other DNA
atggccctgagcgagctggccctggtgagatggctgcaggagagcagaagaagcagaaagctgatcctgttcatcgtgttcctggccctgctgctggacaacatgctgctgaccgtggtggtgcccatcatccccagctacctgtacagcatcaagcacgagaagaacgccaccgagatccagaccgccagacccgtgcacaccgccagcatcagcgacagcttccagagcatcttcagctactacgacaacagcaccatggtgaccggcaacgccaccagagacctgaccctgcaccagaccgccacccagcacatggtgaccaacgccagcgccgtgcccagcgactgccccagcgaggacaaggacctgctgaacgagaacgtgcaggtgggcctgctgttcgccagcaaggccaccgtgcagctgatcaccaaccccttcatcggcctgctgaccaacagaatcggctaccccatccccatcttcgccggcttctgcatcatgttcgtgagcaccatcatgttcgccttcagcagcagctacgccttcctgctgatcgccagaagcctgcagggcatcggcagcagctgcagcagcgtggccggcatgggcatgctggccagcgtgtacaccgacgacgaggagagaggcaacgtgatgggcatcgccctgggcggcctggccatgggcgtgctggtgggcccccccttcggcagcgtgctgtacgagttcgtgggcaagaccgcccccttcctggtgctggccgccctggtgctgctggacggcgccatccagctgttcgtgctgcagcccagcagagtgcagcccgagagccagaagggcacccccctgaccaccctgctgaaggacccctacatcctgatcgccgccggcagcatctgcttcgccaacatgggcatcgccatgctggagcccgccctgcccatctggatgatggagaccatgtgcagcagaaagtggcagctgggcgtggccttcctgcccgccagcatcagctacctgatcggcaccaacatcttcggcatcctggcccacaagatgggcagatggctgtgcgccctgctgggcatgatcatcgtgggcgtgagcatcctgtgcatccccttcgccaagaacatctacggcctgatcgcccccaacttcggcgtgggcttcgccatcggcatggtggacagcagcatgatgcccatcatgggctacctggtggacctgagacacgtgagcgtgtacggcagcgtgtacgccatcgccgacgtggccttctgcatgggctacgccatcggccccagcgccggcggcgccatcgccaaggccatcggcttcccctggctgatgaccatcatcggcatcatcgacatcctgttcgcccccctgtgcttcttcctgagaagcccccccgccaaggaggagaagatggccatcctgatggaccacaactgccccatcaagaccaagatgtacacccagaacaacatccagagctaccccatcggcgaggacgaggagagcgagagcgactag

SEQ ID NO: 99497 - DNA, 1494 bp, synthetic construct
  misc_feature 1..1494: note = Description of Artificial Sequence: Synthetic coding sequence
  source 1..1494: mol_type = other DNA
atggacgtgcccggccccgtgagcagaagagccgccgccgccgccgccaccgtgctgctgagaaccgccagagtgagaagagagtgctggttcctgcccaccgccctgctgtgcgcctacggcttcttcgccagcctgagacccagcgagcccttcctgaccccctacctgctgggccccgacaagaacctgaccgagagagaggtgttcaacgagatctaccccgtgtggacctacagctacctggtgctgctgttccccgtgttcctggccaccgactacctgagatacaagcccgtggtgctgctgcagggcctgagcctgatcgtgacctggttcatgctgctgtacgcccagggcctgctggccatccagttcctggagttcttctacggcatcgccaccgccaccgagatcgcctactacagctacatctacagcgtggtggacctgggcatgtaccagaaggtgaccagctactgcagaagcgccaccctggtgggcttcaccgtgggcagcgtgctgggccagatcctggtgagcgtggccggctggagcctgttcagcctgaacgtgatcagcctgacctgcgtgagcgtggccttcgccgtggcctggttcctgcccatgccccagaagagcctgttcttccaccacatccccagcacctgccagagagtgaacggcatcaaggtgcagaacggcggcatcgtgaccgacacccccgccagcaaccacctgcccggctgggaggacatcgagagcaagatccccctgaacatggaggagccccccgtggaggagcccgagcccaagcccgacagactgctggtgctgaaggtgctgtggaacgacttcctgatgtgctacagcagcagacccctgctgtgctggagcgtgtggtgggccctgagcacctgcggctacttccaggtggtgaactacacccagggcctgtgggagaaggtgatgcccagcagatacgccgccatctacaacggcggcgtggaggccgtgagcaccctgctgggcgccgtggccgtgttcgccgtgggctacatcaagatcagctggagcacctggggcgagatgaccctgagcctgttcagcctgctgatcgccgccgccgtgtacatcatggacaccgtgggcaacatctgggtgtgctacgccagctacgtggtgttcagaatcatctacatgctgctgatcaccatcgccaccttccagatcgccgccaacctgagcatggagagatacgccctggtgttcggcgtgaacaccttcatcgccctggccctgcagaccctgctgaccctgatcgtggtggacgccagcggcctgggcctggagatcaccacccagttcctgatctacgccagctacttcgccctgatcgccgtggtgttcctggccagcggcgccgtgagcgtgatgaagaagtgcagaaagctggaggacccccagagcagcagccaggtgaccaccagctag

SEQ ID NO: 99498 - DNA, 1380 bp, synthetic construct
  misc_feature 1..1380: note = Description of Artificial Sequence: Synthetic coding sequence
  source 1..1380: mol_type = other DNA
atggacgtgcccggccccgtgagcagaagagccgccgccgccgccgccaccgtgctgctgagaaccgccagagtgagaagagagtgctggttcctgcccaccgccctgctgtgcgcctacggcttcttcgccagcctgagacccagcgagcccttcctgaccccctacctgctgggccccgacaagaacctgaccgagagagaggtgttcaacgagatctaccccgtgtggacctacagctacctggtgctgctgttccccgtgttcctggccaccgactacctgagatacaagcccgtggtgctgctgcagggcctgagcctgatcgtgacctggttcatgctgctgtacgcccagggcctgctggccatccagttcctggagttcttctacggcatcgccaccgccaccgagatcgcctactacagctacatctacagcgtggtggacctgggcatgtaccagaaggtgaccagctactgcagaagcgccaccctggtgggcttcaccgtgggcagcgtgctgggccagatcctggtgagcgtggccggctggagcctgttcagcctgaacgtgatcagcctgacctgcgtgagcgtggccttcgccgtggcctggttcctgcccatgccccagaagagcctgttcttccaccacatccccagcacctgccagagagtgaacggcatcaaggagcccaagcccgacagactgctggtgctgaaggtgctgtggaacgacttcctgatgtgctacagcagcagacccctgctgtgctggagcgtgtggtgggccctgagcacctgcggctacttccaggtggtgaactacacccagggcctgtgggagaaggtgatgcccagcagatacgccgccatctacaacggcggcgtggaggccgtgagcaccctgctgggcgccgtggccgtgttcgccgtgggctacatcaagatcagctggagcacctggggcgagatgaccctgagcctgttcagcctgctgatcgccgccgccgtgtacatcatggacaccgtgggcaacatctgggtgtgctacgccagctacgtggtgttcagaatcatctacatgctgctgatcaccatcgccaccttccagatcgccgccaacctgagcatggagagatacgccctggtgttcggcgtgaacaccttcatcgccctggccctgcagaccctgctgaccctgatcgtggtggacgccagcggcctgggcctggagatcaccacccagttcctgatctacgccagctacttcgccctgatcgccgtggtgttcctggccagcggcgccgtgagcgtgatgaagaagtgcagaaagctggaggacccccagagcagcagccaggtgaccaccagctag

SEQ ID NO: 99499 - DNA, 891 bp, synthetic construct
  misc_feature 1..891: note = Description of Artificial Sequence: Synthetic coding sequence
  source 1..891: mol_type = other DNA
atggacgtgcccggccccgtgagcagaagagccgccgccgccgccgccaccgtgctgctgagaaccgccagagtgagaagagagtgctggttcctgcccaccgccctgctgtgcgcctacggcttcttcgccagcctgagacccagcgagcccttcctgaccccctacctgctgggccccgacaagaacctgaccgagagagaggagcccaagcccgacagactgctggtgctgaaggtgctgtggaacgacttcctgatgtgctacagcagcagacccctgctgtgctggagcgtgtggtgggccctgagcacctgcggctacttccaggtggtgaactacacccagggcctgtgggagaaggtgatgcccagcagatacgccgccatctacaacggcggcgtggaggccgtgagcaccctgctgggcgccgtggccgtgttcgccgtgggctacatcaagatcagctggagcacctggggcgagatgaccctgagcctgttcagcctgctgatcgccgccgccgtgtacatcatggacaccgtgggcaacatctgggtgtgctacgccagctacgtggtgttcagaatcatctacatgctgctgatcaccatcgccaccttccagatcgccgccaacctgagcatggagagatacgccctggtgttcggcgtgaacaccttcatcgccctggccctgcagaccctgctgaccctgatcgtggtggacgccagcggcctgggcctggagatcaccacccagttcctgatctacgccagctacttcgccctgatcgccgtggtgttcctggccagcggcgccgtgagcgtgatgaagaagtgcagaaagctggaggacccccagagcagcagccaggtgaccaccagctag

SEQ ID NO: 99500 - DNA, 1491 bp, synthetic construct
  misc_feature 1..1491: note = Description of Artificial Sequence: Synthetic coding sequence
  source 1..1491: mol_type = other DNA
atggactgctacagaaccagcctgagcagcagctggatctaccccaccgtgatcctgtgcctgttcggcttcttcagcatgatgagacccagcgagcccttcctgatcccctacctgagcggccccgacaagaacctgaccagcgccgagatcaccaacgagatcttccccgtgtggacctacagctacctggtgctgctgctgcccgtgttcgtgctgaccgactacgtgagatacaagcccgtgatcatcctgcagggcatcagcttcatcatcacctggctgctgctgctgttcggccagggcgtgaagaccatgcaggtggtggagttcttctacggcatggtgaccgccgccgaggtggcctactacgcctacatctacagcgtggtgagccccgagcactaccagagagtgagcggctactgcagaagcgtgaccctggccgcctacaccgccggcagcgtgctggcccagctgctggtgagcctggccaacatgagctacttctacctgaacgtgatcagcctggccagcgtgagcgtggccttcctgttcagcctgttcctgcccatgcccaagaagagcatgttcttccacgccaagcccagcagagagatcaagaagagcagcagcgtgaaccccgtgctggaggagacccacgagggcgaggcccccggctgcgaggagcagaagcccaccagcgagatcctgagcaccagcggcaagctgaacaagggccagctgaacagcctgaagcccagcaacgtgaccgtggacgtgttcgtgcagtggttccaggacctgaaggagtgctacagcagcaagagactgttctactggagcctgtggtgggccttcgccaccgccggcttcaaccaggtgctgaactacgtgcagatcctgtgggactacaaggcccccagccaggacagcagcatctacaacggcgccgtggaggccatcgccaccttcggcggcgccgtggccgccttcgccgtgggctacgtgaaggtgaactgggacctgctgggcgagctggccctggtggtgttcagcgtggtgaacgccggcagcctgttcctgatgcactacaccgccaacatctgggcctgctacgccggctacctgatcttcaagagcagctacatgctgctgatcaccatcgccgtgttccagatcgccgtgaacctgaacgtggagagatacgccctggtgttcggcatcaacaccttcatcgccctggtgatccagaccatcatgaccgtgatcgtggtggaccagagaggcctgaacctgcccgtgagcatccagttcctggtgtacggcagctacttcgccgtgatcgccggcatcttcctgatgagaagcatgtacatcacctacagcaccaagagccagaaggacgtgcagagccccgcccccagcgagaaccccgacgtgagccaccccgaggaggagagcaacatcatcatgagcaccaagctgtag

SEQ ID NO: 99501 - DNA, 165 bp, synthetic construct
  misc_feature 1..165: note = Description of Artificial Sequence: Synthetic coding sequence
  source 1..165: mol_type = other DNA
atggactgctacagaaccagcctgagcagcagctggatctaccccaccgtgatcctgtgcctgttcggcttcttcagcatgatgagacccagcgagcccttcctgatcccctacctgagcggccccgacaagaacctgaccagcgccgagatcaccaacgagtag

SEQ ID NO: 99502 - DNA, 195 bp, synthetic construct
  misc_feature 1..195: note = Description of Artificial Sequence: Synthetic coding sequence
  source 1..195: mol_type = other DNA
atggactgctacagaaccagcctgagcagcagctggatctaccccaccgtgatcctgtgcctgttcggcttcttcagcatgatgagacccagcgagcccttcctgatcccctacctgagcggccccgacaagaacctgaccagcgccgagatcaccaacgagatcttccccgtgtggacctacagctacctgtag

SEQ ID NO: 99503 - DNA, 1491 bp, synthetic construct; identical to SEQ ID NO: 99500
  misc_feature 1..1491: note = Description of Artificial Sequence: Synthetic coding sequence
  source 1..1491: mol_type = other DNA

SEQ ID NO: 99504 - DNA, 399 bp, synthetic construct
  misc_feature 1..399: note = Description of Artificial Sequence: Synthetic coding sequence
  source 1..399: mol_type = other DNA
atggactgctacagaaccagcctgagcagcagctggatctaccccaccgtgatcctgtgcctgttcggcttcttcagcatgatgagacccagcgagcccttcctgatcccctacctgagcggccccgacaagaacctgaccagcgccgagatcaccaacgagatcttccccgtgtggacctacagctacctggtgctgctgctgcccgtgttcgtgctgaccgactacgtgagatacaagcccgtgatcatcctgcagggcatcagcttcatcatcacctggctgctgctgctgttcggccagggcgtgaagaccatgcaggtggtggagttcttctacggcatggtgaccgccgccgaggtggcctactacgcctacatctacagcgtggtgagctag

SEQ ID NO: 99505 - DNA, 1479 bp, synthetic construct
  misc_feature 1..1479: note = Description of Artificial Sequence: Synthetic coding sequence
  source 1..1479: mol_type = other DNA
atgaaccccctgggcagcgccagcagagccaccgtggaccagctgaccgacctgcccagcaaggagcagctgagctgcgtggtgttcgccctgtggccccccgccttcagcagcaacctgagcgaccccggcgtgaagatcaccaacgagatcttccccgtgtggacctacagctacctggtgctgctgctgcccgtgttcgtgctgaccgactacgtgagatacaagcccgtgatcatcctgcagggcatcagcttcatcatcacctggctgctgctgctgttcggccagggcgtgaagaccatgcaggtggtggagttcttctacggcatggtgaccgccgccgaggtggcctactacgcctacatctacagcgtggtgagccccgagcactaccagagagtgagcggctactgcagaagcgtgaccctggccgcctacaccgccggcagcgtgctggcccagctgctggtgagcctggccaacatgagctacttctacctgaacgtgatcagcctggccagcgtgagcgtggccttcctgttcagcctgttcctgcccatgcccaagaagagcatgttcttccacgccaagcccagcagagagatcaagaagagcagcagcgtgaaccccgtgctggaggagacccacgagggcgaggcccccggctgcgaggagcagaagcccaccagcgagatcctgagcaccagcggcaagctgaacaagggccagctgaacagcctgaagcccagcaacgtgaccgtggacgtgttcgtgcagtggttccaggacctgaaggagtgctacagcagcaagagactgttctactggagcctgtggtgggccttcgccaccgccggcttcaaccaggtgctgaactacgtgcagatcctgtgggactacaaggcccccagccaggacagcagcatctacaacggcgccgtggaggccatcgccaccttcggcggcgccgtggccgccttcgccgtgggctacgtgaaggtgaactgggacctgctgggcgagctggccctggtggtgttcagcgtggtgaacgccggcagcctgttcctgatgcactacaccgccaacatctgggcctgctacgccggctacctgatcttcaagagcagctacatgctgctgatcaccatcgccgtgttccagatcgccgtgaacctgaacgtggagagatacgccctggtgttcggcatcaacaccttcatcgccctggtgatccagaccatcatgaccgtgatcgtggtggaccagagaggcctgaacctgcccgtgagcatccagttcctggtgtacggcagctacttcgccgtgatcgccggcatcttcctgatgagaagcatgtacatcacctacagcaccaagagccagaaggacgtgcagagccccgcccccagcgagaaccccgacgtgagccaccccgaggaggagagcaacatcatcatgagcaccaagctgtag

SEQ ID NO: 99506 - DNA, 1626 bp, synthetic construct
  misc_feature 1..1626: note = Description of Artificial Sequence: Synthetic coding sequence
  source 1..1626: mol_type = other DNA
atgggccacagcccccccgtgctgcccctgtgcgccagcgtgagcctgctgggcggcctgaccttcggctacgagctggccgtgatcagcggcgccctgctgcccctgcagctggacttcggcctgagctgcctggagcaggagttcctggtgggcagcctgctgctgggcgccctgctggccagcctggtgggcggcttcctgatcgactgctacggcagaaagcaggccatcctgggcagcaacctggtgctgctggccggcagcctgaccctgggcctggccggcagcctggcctggctggtgctgggcagagccgtggtgggcttcgccatcagcctgagcagcatggcctgctgcatctacgtgagcgagctggtgggccccagacagagaggcgtgctggtgagcctgtacgaggccggcatcaccgtgggcatcctgctgagctacgccctgaactacgccctggccggcaccccctggggctggagacacatgttcggctgggccaccgcccccgccgtgctgcagagcctgagcctgctgttcctgcccgccggcaccgacgagaccgccacccacaaggacctgatccccctgcagggcggcgaggcccccaagctgggccccggcagacccagatacagcttcctggacctgttcagagccagagacaacatgagaggcagaaccaccgtgggcctgggcctggtgctgttccagcagctgaccggccagcccaacgtgctgtgctacgccagcaccatcttcagcagcgtgggcttccacggcggcagcagcgccgtgctggccagcgtgggcctgggcgccgtgaaggtggccgccaccctgaccgccatgggcctggtggacagagccggcagaagagccctgctgctggccggctgcgccctgatggccctgagcgtgagcggcatcggcctggtgagcttcgccgtgcccatggacagcggccccagctgcctggccgtgcccaacgccaccggccagaccggcctgcccggcgacagcggcctgctgcaggacagcagcctgccccccatccccagaaccaacgaggaccagagagagcccatcctgagcaccgccaagaagaccaagccccaccccagaagcggcgaccccagcgccccccccagactggccctgagcagcgccctgcccggcccccccctgcccgccagaggccacgccctgctgagatggaccgccctgctgtgcctgatggtgttcgtgagcgccttcagcttcggcttcggccccgtgacctggctggtgctgagcgagatctaccccgtggagatcagaggcagagccttcgccttctgcaacagcttcaactgggccgccaacctgttcatcagcctgagcttcctggacctgatcggcaccatcggcctgagctggaccttcctgctgtacggcctgaccgccgtgctgggcctgggcttcatctacctgttcgtgcccgagaccaagggccagagcctggccgagatcgaccagcagttccagaagagaagattcaccctgagcttcggccacagacagaacagcaccggcatcccctacagcagaatcgagatcagcgccgccagctag

SEQ ID NO: 99507 - DNA, 1947 bp, synthetic construct
  misc_feature 1..1947: note = Description of Artificial Sequence: Synthetic coding sequence
  source 1..1947: mol_type = other DNA
atgagcagaaaggccagcgagaacgtggagtacaccctgagaagcctgagcagcctgatgggcgagagaagaagaaagcagcccgagcccgacgccgccagcgccgccggcgagtgcagcctgctggccgccgccgagagcagcaccagcctgcagagcgccggcgccggcggcggcggcgtgggcgacctggagagagccgccagaagacagttccagcaggacgagacccccgccttcgtgtacgtggtggccgtgttcagcgccctgggcggcttcctgttcggctacgacaccggcgtggtgagcggcgccatgctgctgctgaagagacagctgagcctggacgccctgtggcaggagctgctggtgagcagcaccgtgggcgccgccgccgtgagcgccctggccggcggcgccctgaacggcgtgttcggcagaagagccgccatcctgctggccagcgccctgttcaccgccggcagcgccgtgctggccgccgccaacaacaaggagaccctgctggccggcagactggtggtgggcctgggcatcggcatcgccagcatgaccgtgcccgtgtacatcgccgaggtgagcccccccaacctgagaggcagactggtgaccatcaacaccctgttcatcaccggcggccagttcttcgccagcgtggtggacggcgccttcagctacctgcagaaggacggctggagatacatgctgggcctggccgccgtgcccgccgtgatccagttcttcggcttcctgttcctgcccgagagccccagatggctgatccagaagggccagacccagaaggccagaagaatcctgagccagatgagaggcaaccagaccatcgacgaggagtacgacagcatcaagaacaacatcgaggaggaggagaaggaggtgggcagcgccggccccgtgatctgcagaatgctgagctacccccccaccagaagagccctgatcgtgggctgcggcctgcagatgttccagcagctgagcggcatcaacaccatcatgtactacagcgccaccatcctgcagatgagcggcgtggaggacgacagactggccatctggctggccagcgtgaccgccttcaccaacttcatcttcaccctggtgggcgtgtggctggtggagaaggtgggcagaagaaagctgaccttcggcagcctggccggcaccaccgtggccctgatcatcctggccctgggcttcgtgctgagcgcccaggtgagccccagaatcaccttcaagcccatcgcccccagcggccagaacgccacctgcaccagatacagctactgcaacgagtgcatgctggaccccgactgcggcttctgctacaagatgaacaagagcaccgtgatcgacagcagctgcgtgcccgtgaacaaggccagcaccaacgaggccgcctggggcagatgcgagaacgagaccaagttcaagaccgaggacatcttctgggcctacaacttctgccccaccccctacagctggaccgccctgctgggcctgatcctgtacctggtgttcttcgcccccggcatgggccccatgccctggaccgtgaacagcgagatctaccccctgtgggccagaagcaccggcaacgcctgcagcagcggcatcaactggatcttcaacgtgctggtgagcctgaccttcctgcacaccgccgagtacctgacctactacggcgccttcttcctgtacgccggcttcgccgccgtgggcctgctgttcatctacggctgcctgcccgagaccaagggcaagaagctggaggagatcgagagcctgttcgacaacagactgtgcacctgcggcaccagcgacagcgacgagggcagatacatcgagtacatcagagtgaagggcagcaactaccacctgagcgacaacgacgccagcgacgtggagtag

SEQ ID NO: 99508 - DNA, 1074 bp, synthetic construct
  misc_feature 1..1074: note = Description of Artificial Sequence: Synthetic coding sequence
  source 1..1074: mol_type = other DNA
atgagcagaaaggccagcgagaacgtggagtacaccctgagaagcctgagcagcctgatgggcgagagaagaagaaagcagcccgagcccgacgccgccagcgccgccggcgagtgcagcctgctggccgccgccgagagcagcaccagcctgcagagcgccggcgccggcggcggcggcgtgggcgacctggagagagccgccagaagacagttccagcaggacgagacccccgccttcgtgtacgtggtggccgtgttcagcgccctgggcggcttcctgttcggctacgacaccggcgtggtgagcggcgccatgctgctgctgaagagacagctgagcctggacgccctgtggcaggagctgctggtgagcagcaccgtgggcgccgccgccgtgagcgccctggccggcggcgccctgaacggcgtgttcggcagaagagccgccatcctgctggccagcgccctgttcaccgccggcagcgccgtgctggccgccgccaacaacaaggagaccctgctggccggcagactggtggtgggcctgggcatcggcatcgccagcatgaccgtgcccgtgtacatcgccgaggtgagcccccccaacctgagaggcagactggtgaccatcaacaccctgttcatcaccggcggccagttcttcgccagcgtggtggacggcgccttcagctacctgcagaaggacggctggagatacatgctgggcctggccgccgtgcccgccgtgatccagttcttcggcttcctgttcctgcccgagagccccagatggctgatccagaagggccagacccagaaggccagaagaatcctgagccagatgagaggcaaccagaccatcgacgaggagtacgacagcatcaagaacaacatcgaggaggaggagaaggaggtgggcagcgccggccccgtgatctgcagaatgctgagctacccccccaccagaagagccctgatcgtgggctgcggcctgcagatgttccagcagctgagcggcatcaacaccatcatgtacgtgttcctgagcggcttcctgctgaagagactgtag

SEQ ID NO: 99509 - DNA, 1494 bp, synthetic construct
  misc_feature 1..1494: note = Description of Artificial Sequence: Synthetic coding sequence
  source 1..1494: mol_type = other DNA
atggacaacagacagaacgtgacccccgccctgatcttcgccatcaccgtggccaccatcggcagcttccagttcggctacaacaccggcgtgatcaacgcccccgagaccatcatcaaggagttcatcaacaagaccctgaccgacaaggccaacgccccccccagcgaggtgctgctgaccaacctgtggagcctgagcgtggccatcttcagcgtgggcggcatgatcggcagcttcagcgtgggcctgttcgtgaacagattcggcagaagaaacagcatgctgatcgtgaacctgctggccgccaccggcggctgcctgatgggcctgtgcaagatcgccgagagcgtggagatgctgatcctgggcagactggtgatcggcctgttctgcggcctgtgcaccggcttcgtgcccatgtacatcggcgagatcagccccaccgccctgagaggcgccttcggcaccctgaaccagctgggcatcgtgatcggcatcctggtggcccagatcttcggcctggagctgatcctgggcagcgaggagctgtggcccgtgctgctgggcttcaccatcctgcccgccatcctgcagagcgccgccctgccctgctgccccgagagccccagattcctgctgatcaacagaaagaaggaggagaacgccaccagaatcctgcagagactgtggggcacccaggacgtgagccaggacatccaggagatgaaggacgagagcgccagaatgagccaggagaagcaggtgaccgtgctggagctgttcagagtgagcagctacagacagcccatcatcatcagcatcgtgctgcagctgagccagcagctgagcggcatcaacgccgtgttctactacagcaccggcatcttcaaggacgccggcgtgcagcagcccatctacgccaccatcagcgccggcgtggtgaacaccatcttcaccctgctgagcctgttcctggtggagagagccggcagaagaaccctgcacatgatcggcctgggcggcatggccttctgcagcaccctgatgaccgtgagcctgctgctgaagaaccactacaacggcatgagcttcgtgtgcatcggcgccatcctggtgttcgtggcctgcttcgagatcggccccggccccatcccctggttcatcgtggccgagctgttcagccagggccccagacccgccgccatggccgtggccggctgcagcaactggaccagcaacttcctggtgggcctgctgttccccagcgccgcctactacctgggcgcctacgtgttcatcatcttcaccggcttcctgatcaccttcctggccttcaccttcttcaaggtgcccgagaccagaggcagaaccttcgaggacatcaccagagccttcgagggccaggcccacggcgccgacagaagcggcaaggacggcgtgatgggcatgaacagcatcgagcccgccaaggagaccaccaccaacgtgtag

SEQ ID NO: 99510 - DNA, 1563 bp, synthetic construct
  misc_feature 1..1563: note = Description of Artificial Sequence: Synthetic coding sequence
  source 1..1563: mol_type = other DNA
atggagttccacaacggcggccacgtgagcggcatcggcggcttcctggtgagcctgaccagcagaatgaagccccacaccctggccgtgacccccgccctgatcttcgccatcaccgtggccaccatcggcagcttccagttcggctacaacaccggcgtgatcaacgcccccgagaccatcatcaaggagttcatcaacaagaccctgaccgacaaggccaacgccccccccagcgaggtgctgctgaccaacctgtggagcctgagcgtggccatcttcagcgtgggcggcatgatcggcagcttcagcgtgggcctgttcgtgaacagattcggcagaagaaacagcatgctgatcgtgaacctgctggccgccaccggcggctgcctgatgggcctgtgcaagatcgccgagagcgtggagatgctgatcctgggcagactggtgatcggcctgttctgcggcctgtgcaccggcttcgtgcccatgtacatcggcgagatcagccccaccgccctgagaggcgccttcggcaccctgaaccagctgggcatcgtgatcggcatcctggtggcccagatcttcggcctggagctgatcctgggcagcgaggagctgtggcccgtgctgctgggcttcaccatcctgcccgccatcctgcagagcgccgccctgccctgctgccccgagagccccagattcctgctgatcaacagaaagaaggaggagaacgccaccagaatcctgcagagactgtggggcacccaggacgtgagccaggacatccaggagatgaaggacgagagcgccagaatgagccaggagaagcaggtgaccgtgctggagctgttcagagtgagcagctacagacagcccatcatcatcagcatcgtgctgcagctgagccagcagctgagcggcatcaacgccgtgttctactacagcaccggcatcttcaaggacgccggcgtgcagcagcccatctacgccaccatcagcgccggcgtggtgaacaccatcttcaccctgctgagcctgttcctggtggagagagccggcagaagaaccctgcacatgatcggcctgggcggcatggccttctgcagcaccctgatgaccgtgagcctgctgctgaagaaccactacaacggcatgagcttcgtgtgcatcggcgccatcctggtgttcgtggcctgcttcgagatcggccccggccccatcccctggttcatcgtggccgagctgttcagccagggccccagacccgccgccatggccgtggccggctgcagcaactggaccagcaacttcctggtgggcctgctgttccccagcgccgcctactacctgggcgcctacgtgttcatcatcttcaccggcttcctgatcaccttcctggccttcaccttcttcaaggtgcccgagaccagaggcagaaccttcgaggacatcaccagagccttcgagggccaggcccacggcgccgacagaagcggcaaggacggcgtgatgggcatgaacagcatcgagcccgccaaggagaccaccaccaacgtgtag

SEQ ID NO: 99511 - DNA, 1494 bp, synthetic construct; identical to SEQ ID NO: 99509
  misc_feature 1..1494: note = Description of Artificial Sequence: Synthetic coding sequence
  source 1..1494: mol_type = other DNA

SEQ ID NO: 99512 - DNA, 363 bp, synthetic construct
  misc_feature 1..363: note = Description of Artificial Sequence: Synthetic coding sequence
  source 1..363: mol_type = other DNA
atggagttccacaacggcggccacgtgagcggcatcggcggcttcctggtgagcctgaccagcagaatgaagccccacaccctggccgtgacccccgccctgatcttcgccatcaccgtggccaccatcggcagcttccagttcggctacaacaccggcgtgatcaacgcccccgagaccatcatcaaggagttcatcaacaagaccctgaccgacaaggccaacgccccccccagcgaggtgctgctgaccaacctgtggagcctgagcgtggccatcttcagcgtgggcggcatgatcggcagcttcagcgtgggcctgttcgtgaacagattcggcagaagaaacagcatgctgatctag

SEQ ID NO: 99513 - DNA, 1236 bp, synthetic construct
  misc_feature 1..1236: note = Description of Artificial Sequence: Synthetic coding sequence
  source 1..1236: mol_type = other DNA
atgctgctgagaagaagaaacagcatgctgatcgtgaacctgctggccgccaccggcggctgcctgatgggcctgtgcaagatcgccgagagcgtggagatgctgatcctgggcagactggtgatcggcctgttctgcggcctgtgcaccggcttcgtgcccatgtacatcggcgagatcagccccaccgccctgagaggcgccttcggcaccctgaaccagctgggcatcgtgatcggcatcctggtggcccagatcttcggcctggagctgatcctgggcagcgaggagctgtggcccgtgctgctgggcttcaccatcctgcccgccatcctgcagagcgccgccctgccctgctgccccgagagccccagattcctgctgatcaacagaaagaaggaggagaacgccaccagaatcctgcagagactgtggggcacccaggacgtgagccaggacatccaggagatgaaggacgagagcgccagaatgagccaggagaagcaggtgaccgtgctggagctgttcagagtgagcagctacagacagcccatcatcatcagcatcgtgctgcagctgagccagcagctgagcggcatcaacgccgtgttctactacagcaccggcatcttcaaggacgccggcgtgcagcagcccatctacgccaccatcagcgccggcgtggtgaacaccatcttcaccctgctgagcctgttcctggtggagagagccggcagaagaaccctgcacatgatcggcctgggcggcatggccttctgcagcaccctgatgaccgtgagcctgctgctgaagaaccactacaacggcatgagcttcgtgtgcatcggcgccatcctggtgttcgtggcctgcttcgagatcggccccggccccatcccctggttcatcgtggccgagctgttcagccagggccccagacccgccgccatggccgtggccggctgcagcaactggaccagcaacttcctggtgggcctgctgttccccagcgccgcctactacctgggcgcctacgtgttcatcatcttcaccggcttcctgatcaccttcctggccttcaccttcttcaaggtgcccgagaccagaggcagaaccttcgaggacatcaccagagccttcgagggccaggcccacggcgccgacagaagcggcaaggacggcgtgatgggcatgaacagcatcgagcccgccaaggagaccaccaccaacgtgtag

SEQ ID NO: 99514 - DNA, 426 bp, synthetic construct
  misc_feature 1..426: note = Description of Artificial Sequence: Synthetic coding sequence
  source 1..426: mol_type = other DNA
atggacaacagacagaacgtgacccccgccctgatcttcgccatcaccgtggccaccatcggcagcttccagttcggctacaacaccggcgtgatcaacgcccccgagaccatcatcaaggagttcatcaacaagaccctgaccgacaaggccaacgccccccccagcgaggtgctgctgaccaacctgtggagcctgagcgtggccatcttcagcgtgggcggcatgatcggcagcttcagcgtgggcctgttcgtgaacagattcggcagaagaaacagcatgctgatcgtgaacctgctggccgccaccggcggctgcctgatgggcctgtgcaagatcgccgagagcgtggagatgctgatcctgggcagactggtgatcggcctgttctgcggcctgtgcaccggcttcgtgcccatgtag

SEQ ID NO: 99515 - DNA, 144 bp, synthetic construct
  misc_feature 1..144: note = Description of Artificial Sequence: Synthetic coding sequence
  source 1..144: mol_type = other DNA
atggacaacagacagaacgtgacccccgccctgatcttcgccatcaccgtggccaccatcggcagcttccagttcggctacaacaccggcgtgatcaacgcccccgagaccatcatcaaggagttcatcaacaagaccctgtag

SEQ ID NO: 99516 - DNA, 69 bp, synthetic construct
  misc_feature 1..69: note = Description of Artificial Sequence: Synthetic coding sequence
  source 1..69: mol_type = other DNA
atggacaacagacagaacgtgacccccgccctgatcttcgccatcaccgtggccaccatcggcagctag

SEQ ID NO: 99517 - DNA, 426 bp, synthetic construct
  misc_feature 1..426: note = Description of Artificial Sequence: Synthetic coding sequence
  source 1..426: mol_type = other DNA
atggagttccacaacggcggccacgtgagcggcatcggcggcttcctggtgagcctgaccagcagaatgaagccccacaccctggccgtgacccccgccctgatcttcgccatcaccgtggccaccatcggcagcttccagttcggctacaacaccggcgtgatcaacgcccccgagaccatcatcaaggagttcatcaacaagaccctgaccgacaaggccaacgccccccccagcgaggtgctgctgaccaacctgtggagcctgagcgtggccatcttcagcgtgggcggcatgatcggcagcttcagcgtgggcctgttcgtgaacagattcggcagaagaaacagcatgctgatcgtgaacctgctggccgccaccggcggctgcctgatgggcctgtgcaagatcgccgagagcgtgtag

SEQ ID NO: 99518 - DNA, 1608 bp, synthetic construct
  misc_feature 1..1608: note = Description of Artificial Sequence: Synthetic coding sequence
  source 1..1608: mol_type = other DNA
atgcagagactgcagctgctgagagtggaggtgctgctgggcgtgaagcagggcgacgagatgagacacttcttcttcagcagccagaccagcaccctggagaagagccagaacggcggcgtgggcgaggaggtgacccccgccctgatcttcgccatcaccgtggccaccatcggcagcttccagttcggctacaacaccggcgtgatcaacgcccccgagaccatcatcaaggagttcatcaacaagaccctgaccgacaaggccaacgccccccccagcgaggtgctgctgaccaacctgtggagcctgagcgtggccatcttcagcgtgggcggcatgatcggcagcttcagcgtgggcctgttcgtgaacagattcggcagaagaaacagcatgctgatcgtgaacctgctggccgccaccggcggctgcctgatgggcctgtgcaagatcgccgagagcgtggagatgctgatcctgggcagactggtgatcggcctgttctgcggcctgtgcaccggcttcgtgcccatgtacatcggcgagatcagccccaccgccctgagaggcgccttcggcaccctgaaccagctgggcatcgtgatcggcatcctggtggcccagatcttcggcctggagctgatcctgggcagcgaggagctgtggcccgtgctgctgggcttcaccatcctgcccgccatcctgcagagcgccgccctgccctgctgccccgagagccccagattcctgctgatcaacagaaagaaggaggagaacgccaccagaatcctgcagagactgtggggcacccaggacgtgagccaggacatccaggagatgaaggacgagagcgccagaatgagccaggagaagcaggtgaccgtgctggagctgttcagagtgagcagctacagacagcccatcatcatcagcatcgtgctgcagctgagccagcagctgagcggcatcaacgccgtgttctactacagcaccggcatcttcaaggacgccggcgtgcagcagcccatctacgccaccatcagcgccggcgtggtgaacaccatcttcaccctgctgagcctgttcctggtggagagagccggcagaagaaccctgcacatgatcggcctgggcggcatggccttctgcagcaccctgatgaccgtgagcctgctgctgaagaaccactacaacggcatgagcttcgtgtgcatcggcgccatcctggtgttcgtggcctgcttcgagatcggccccggccccatcccctggttcatcgtggccgagctgttcagccagggccccagacccgccgccatggccgtggccggctgcagcaactggaccagcaacttcctggtgggcctgctgttccccagcgccgcctactacctgggcgcctacgtgttcatcatcttcaccggcttcctgatcaccttcctggccttcaccttcttcaaggtgcccgagaccagaggcagaaccttcgaggacatcaccagagccttcgagggccaggcccacggcgccgacagaagcggcaaggacggcgtgatgggcatgaacagcatcgagcccgccaaggagaccaccaccaacgtgtag

SEQ ID NO: 99519 - DNA, 486 bp, synthetic construct
  misc_feature 1..486: note = Description of Artificial Sequence: Synthetic coding sequence
  source 1..486: mol_type = other DNA
atgatcggcctgggcggcatggccttctgcagcaccctgatgaccgtgagcctgctgctgaagaaccactacaacggcatgagcttcgtgtgcatcggcgccatcctggtgttcgtggcctgcttcgagatcggccccggccccatcccctggttcatcgtggccgagctgttcagccagggccccagacccgccgccatggccgtggccggctgcagcaactggaccagcaacttcctggtgggcctgctgttccccagcgccgcctactacctgggcgcctacgtgttcatcatcttcaccggcttcctgatcaccttcctggccttcaccttcttcaaggtgcccgagaccagaggcagaaccttcgaggacatcaccagagccttcgagggccaggcccacggcgccgacagaagcggcaaggacggcgtgatgggcatgaacagcatcgagcccgccaaggagaccaccaccaacgtgtag

SEQ ID NO: 99520 - DNA, 1236 bp, synthetic construct; identical to SEQ ID NO: 99513
  misc_feature 1..1236: note = Description of Artificial Sequence: Synthetic coding sequence
  source 1..1236: mol_type = other DNA

SEQ ID NO: 99521 - DNA, 459 bp, synthetic construct
  misc_feature 1..459: note = Description of Artificial Sequence: Synthetic coding sequence
  source 1..459: mol_type = other DNA
atggacaacagacagaacgtgacccccgccctgatcttcgccatcaccgtggccaccatcggcagcttccagttcggctacaacaccggcgtgatcaacgcccccgagaccatcatcaaggagttcatcaacaagaccctgaccgacaaggccaacgccccccccagcgaggtgctgctgaccaacctgtggagcctgagcgtggccatcttcagcgtgggcggcatgatcggcagcttcagcgtgggcctgttcgtgaacagattcggcagaagaaacagcatgctgatcgtgaacctgctggccgccaccggcggctgcctgatgggcctgtgcaagatcgccgagagcgtggagatgctgatcctgggcagactggtgatcggcctgttctgcggcctgtgcaccggcttcgtgcccatgtacatcggcgagatcagccccaccgccctgagatag

SEQ ID NO: 99522 - DNA, 255 bp, synthetic construct
  misc_feature 1..255: note = Description of Artificial Sequence: Synthetic coding sequence
  source 1..255: mol_type = other DNA
atggacaacagacagaacgtgacccccgccctgatcttcgccatcaccgtggccaccatcggcagcttccagttcggctacaacaccggcgtgatcaacgcccccgagaccatcatcaaggagttcatcaacaagaccctgaccgacaaggccaacgccccccccagcgaggtgctgctgaccaacctgtggagcctgagcgtggccatcttcagcgtgggcggcatgatcggcagcttcagcgtgggcctgtag

SEQ ID NO: 99523 - DNA, 1563 bp, synthetic construct; identical to SEQ ID NO: 99510
  misc_feature 1..1563: note = Description of Artificial Sequence: Synthetic coding sequence
  source 1..1563: mol_type = other DNA

SEQ ID NO: 99524 - DNA, 510 bp, synthetic construct
  misc_feature 1..510: note = Description of Artificial Sequence: Synthetic coding sequence
  source 1..510: mol_type = other DNA
atggacaacagacagaacgtgacccccgccctgatcttcgccatcaccgtggccaccatcggcagcttccagttcggctacaacaccggcgtgatcaacgcccccgagaccatcatcaaggagttcatcaacaagaccctgaccgacaaggccaacgccccccccagcgaggtgctgctgaccaacctgtggagcctgagcgtggccatcttcagcgtgggcggcatgatcggcagcttcagcgtgggcctgttcgtgaacagattcggcagaagaaacagcatgctgatcgtgaacctgctggccgccaccggcggctgcctgatgggcctgtgcaagatcgccgagagcgtggagatgctgatcctgggcagactggtgatcggcctgttctgcggcctgtgcaccggcttcgtgcccatgtacatcggcgagatcagccccaccgccctgagaggcgccttcggcaccctgaaccagctgggcatcgtgatcggcatcctggtgtag

SEQ ID NO: 99525 - DNA, 1491 bp, synthetic construct
  misc_feature 1..1491: note = Description of Artificial Sequence: Synthetic coding sequence
  source 1..1491: mol_type = other DNA
atgggcacccagaaggtgacccccgccctgatcttcgccatcaccgtggccaccatcggcagcttccagttcggctacaacaccggcgtgatcaacgcccccgagaagatcatcaaggagttcatcaacaagaccctgaccgacaagggcaacgccccccccagcgaggtgctgctgaccagcctgtggagcctgagcgtggccatcttcagcgtgggcggcatgatcggcagcttcagcgtgggcctgttcgtgaacagattcggcagaagaaacagcatgctgatcgtgaacctgctggccgtgaccggcggctgcttcatgggcctgtgcaaggtggccaagagcgtggagatgctgatcctgggcagactggtgatcggcctgttctgcggcctgtgcaccggcttcgtgcccatgtacatcggcgagatcagccccaccgccctgagaggcgccttcggcaccctgaaccagctgggcatcgtggtgggcatcctggtggcccagatcttcggcctggagttcatcctgggcagcgaggagctgtggcccctgctgctgggcttcaccatcctgcccgccatcctgcagagcgccgccctgcccttctgccccgagagccccagattcctgctgatcaacagaaaggaggaggagaacgccaagcagatcctgcagagactgtggggcacccaggacgtgagccaggacatccaggagatgaaggacgagagcgccagaatgagccaggagaagcaggtgaccgtgctggagctgttcagagtgagcagctacagacagcccatcatcatcagcatcgtgctgcagctgagccagcagctgagcggcatcaacgccgtgttctactacagcaccggcatcttcaaggacgccggcgtgcaggagcccatctacgccaccatcggcgccggcgtggtgaacaccatcttcaccgtggtgagcctgttcctggtggagagagccggcagaagaaccctgcacatgatcggcctgggcggcatggccttctgcagcaccctgatgaccgtgagcctgctgctgaaggacaactacaacggcatgagcttcgtgtgcatcggcgccatcctggtgttcgtggccttcttcgagatcggccccggccccatcccctggttcatcgtggccgagctgttcagccagggccccagacccgccgccatggccgtggccggctgcagcaactggaccagcaacttcctggtgggcctgctgttccccagcgccgcccactacctgggcgcctacgtgttcatcatcttcaccggcttcctgatcaccttcctggccttcaccttcttcaaggtgcccgagaccagaggcagaaccttcgaggacatcaccagagccttcgagggccaggcccacggcgccgacagaagcggcaaggacggcgtgatggagatgaacagcatcgagcccgccaaggagaccaccaccaacgtgtag

SEQ ID NO: 99526 - DNA, 1269 bp, synthetic construct
  misc_feature 1..1269: note = Description of Artificial Sequence: Synthetic coding sequence
  source 1..1269: mol_type = other DNA
atgatcggcagcttcagcgtgggcctgttcgtgaacagattcggcagaagaaacagcatgctgatcgtgaacctgctggccgtgaccggcggctgcttcatgggcctgtgcaaggtggccaagagcgtggagatgctgatcctgggcagactggtgatcggcctgttctgcggcctgtgcaccggcttcgtgcccatgtacatcggcgagatcagccccaccgccctgagaggcgccttcggcaccctgaaccagctgggcatcgtggtgggcatcctggtggcccagatcttcggcctggagttcatcctgggcagcgaggagctgtggcccctgctgctgggcttcaccatcctgcccgccatcctgcagagcgccgccctgcccttctgccccgagagccccagattcctgctgatcaacagaaaggaggaggagaacgccaagcagatcctgcagagactgtggggcacccaggacgtgagccaggacatccaggagatgaaggacgagagcgccagaatgagccaggagaagcaggtgaccgtgctggagctgttcagagtgagcagctacagacagcccatcatcatcagcatcgtgctgcagctgagccagcagctgagcggcatcaacgccgtgttctactacagcaccggcatcttcaaggacgccggcgtgcaggagcccatctacgccaccatcggcgccggcgtggtgaacaccatcttcaccgtggtgagcctgttcctggtggagagagccggcagaagaaccctgcacatgatcggcctgggcggcatggccttctgcagcaccctgatgaccgtgagcctgctgctgaaggacaactacaacggcatgagcttcgtgtgcatcggcgccatcctggtgttcgtggccttcttcgagatcggccccggccccatcccctggttcatcgtggccgagctgttcagccagggccccagacccgccgccatggccgtggccggctgcagcaactggaccagcaacttcctggtgggcctgctgttccccagcgccgcccactacctgggcgcctacgtgttcatcatcttcaccggcttcctgatcaccttcctggccttcaccttcttcaaggtgcccgagaccagaggcagaaccttcgaggacatcaccagagccttcgagggccaggcccacggcgccgacagaagcggcaaggacggcgtgatggagatgaacagcatcgagcccgccaaggagaccaccaccaacgtgtag

SEQ ID NO: 99527 - DNA, 1530 bp, synthetic construct
  misc_feature 1..1530: note = Description of Artificial Sequence: Synthetic coding sequence
  source 1..1530: mol_type = other DNA
atgcccagcggcttccagcagatcggcagcgaggacggcgagcccccccagcagagagtgaccggcaccctggtgctggccgtgttcagcgccgtgctgggcagcctgcagttcggctacaacatcggcgtgatcaacgccccccagaaggtgatcgagcagagctacaacgagacctggctgggcagacagggccccgagggccccagcagcatcccccccggcaccctgaccaccctgtgggccctgagcgtggccatcttcagcgtgggcggcatgatcagcagcttcctgatcggcatcatcagccagtggctgggcagaaagagagccatgctggtgaacaacgtgctggccgtgctgggcggcagcctgatgggcctggccaacgccgccgccagctacgagatgctgatcctgggcagattcctgatcggcgcctacagcggcctgaccagcggcctggtgcccatgtacgtgggcgagatcgcccccacccacctgagaggcgccctgggcaccctgaaccagctggccatcgtgatcggcatcctgatcgcccaggtgctgggcctggagagcctgctgggcaccgccagcctgtggcccctgctgctgggcctgaccgtgctgcccgccctgctgcagctggtgctgctgcccttctgccccgagagccccagatacctgtacatcatccagaacctggagggccccgccagaaagagcctgaagagactgaccggctgggccgacgtgagcggcgtgctggccgagctgaaggacgagaagagaaagctggagagagagagacccctgagcctgctgcagctgctgggcagcagaacccacagacagcccctgatcatcgccgtggtgctgcagctgagccagcagctgagcggcatcaacgccgtgttctactacagcaccagcatcttcgagaccgccggcgtgggccagcccgcctacgccaccatcggcgccggcgtggtgaacaccgtgttcaccctggtgagcgtgctgctggtggagagagccggcagaagaaccctgcacctgctgggcctggccggcatgtgcggctgcgccatcctgatgaccgtggccctgctgctgctggagagagtgcccgccatgagctacgtgagcatcgtggccatcttcggcttcgtggccttcttcgagatcggccccggccccatcccctggttcatcgtggccgagctgttcagccagggccccagacccgccgccatggccgtggccggcttcagcaactggaccagcaacttcatcatcggcatgggcttccagtacgtggccgaggccatgggcccctacgtgttcctgctgttcgccgtgctgctgctgggcttcttcatcttcaccttcctgagagtgcccgagaccagaggcagaaccttcgaccagatcagcgccgccttccacagaacccccagcctgctggagcaggaggtgaagcccagcaccgagctggagtacctgggccccgacgagaacgactag

SEQ ID NO: 99528 - DNA, 1356 bp, synthetic construct
  misc_feature 1..1356: note = Description of Artificial Sequence: Synthetic coding sequence
  source 1..1356: mol_type = other DNA
atggacggcgagcccccccagcagagagtgaccggcaccctggtgctggccgtgttcagcgccgtgctgggcagcctgcagttcggctacaacatcggcgtgatcaacgccccccagaaggtgatcgagcagagctacaacgagacctggctgggcagacagggccccgagggccccagcagcatcccccccggcaccctgaccaccctgtgggccctgagcgtggccatcttcagcgtgggcggcatgatcagcagcttcctgatcggcatcatcagccagtggctgggcagaaagagagccatgctggtgaacaacgtgctggccgtgctgggcggcagcctgatgggcctggccaacgccgccgccagctacgagatgctgatcctgggcagattcctgatcggcgcctacagcggcctgaccagcggcctggtgcccatgtacgtgggcgagatcgcccccacccacctgagaggcgccctgggcaccctgaaccagctggccatcgtgatcggcatcctgatcgcccaggtgctgggcctggagagcctgctgggcaccgccagcctgtggcccctgctgctgggcctgaccgtgctgcccgccctgctgcagctggtgctgctgcccttctgccccgagagccccagatacctgtacatcatccagaacctggagggccccgccagaaagagcctgaagagactgaccggctgggccgacgtgagcggcgtgctggccgagctgaaggacgagaagagaaagctggagagagagagacccctgagcctgctgcagctgctgggcagcagaacccacagacagcccctgatcatcgccgtggtgctgcagctgagccagcagctgagcggcatcaacgccgtgttctactacagcaccagcatcttcgagaccgccggcgtgggccagcccgcctacgccaccatcggcgccggcgtggtgaacaccgtgttcaccctggtgagcgtgctgctggtggagagagccggcagaagaaccctgcacctgctgggcctggccggcatgtgcggctgcgccatcctgatgaccgtggccctgctgctgctggagagagtgcccgccatgagctacgtgagcatcgtggccatcttcggcttcgtggccttcttcgagatcggccccggccccatcccctggttcatcgtggccgagctgttcagccagggccccagacccgccgccatggccgtggccggcttcagcaactggaccagcaacttcatcatcggcatgggcttccagtacgtggccgtgggcccccccgcccccgccagccacaccgtgggccagagatgggccagccacagctag

SEQ ID NO: 99529 - DNA, 1338 bp, synthetic construct
  misc_feature 1..1338: note = Description of Artificial Sequence: Synthetic coding sequence
  source 1..1338: mol_type = other DNA
atgcaggagcccctgctgggcgccgagggccccgactacgacaccttccccgagaagcccccccccagccccggcgacagagccagagtgggcaccctgcagaacaagagagtgttcctggccaccttcgccgccgtgctgggcaacttcagcttcggctacgccctggtgtacaccagccccgtgatccccgccctggagagaagcctggaccccgacctgcacctgaccaagagccaggccagctggttcggcagcgtgttcaccctgggcgccgccgccggcggcctgagcgccatgatcctgaacgacctgctgggcagaaagctgagcatcatgttcagcgccgtgcccagcgccgccggctacgccctgatggccggcgcccacggcctgtggatgctgctgctgggcagaaccctgaccggcttcgccggcggcctgaccgccgcctgcatccccgtgtacgtgagcgagatcgccccccccggcgtgagaggcgccctgggcgccaccccccagctgatggccgtgttcggcagcctgagcctgtacgccctgggcctgctgctgccctggagatggctggccgtggccggcgaggcccccgtgctgatcatgatcctgctgctgagcttcatgcccaacagccccagattcctgctgagcagaggcagagacgaggaggccctgagagccctggcctggctgagaggcaccgacgtggacgtgcactgggagttcgagcagatccaggacaacgtgagaagacagagcagcagagtgagctgggccgaggccagagccccccacgtgtgcagacccatcaccgtggccctgctgatgagactgctgcagcagctgaccggcatcacccccatcctggtgtacctgcagagcatcttcgacagcaccgccgtgctgctgccccccaaggacgacgccgccatcgtgggcgccgtgagactgctgagcgtgctgatcgccgccctgaccatggacctggccggcagaaaggtgctgctgttcgtgagcggctacgccgtgggctggggccccatcacctggctgctgatgagcgaggtgctgcccctgagagccagaggcgtggccagcggcctgtgcgtgctggccagctggctgaccgccttcgtgctgaccaagagcttcctgcccgtggtgagcaccttcggcctgcaggtgcccttcttcttcttcgccgccatctgcctggtgagcctggtgttcaccggctgctgcgtgcccgagaccaagggcagaagcctggagcagatcgagagcttcttcagaaccggcagaagaagcttcctgagatag

SEQ ID NO: 99530 - DNA, 1524 bp, synthetic construct
  misc_feature 1..1524: note = Description of Artificial Sequence: Synthetic coding sequence
  source 1..1524: mol_type = other DNA
atgcaggagcccctgctgggcgccgagggccccgactacgacaccttccccgagaagcccccccccagccccggcgacagagccagagtgggcaccctgcagaacaagagagtgttcctggccaccttcgccgccgtgctgggcaacttcagcttcggctacgccctggtgtacaccagccccgtgatccccgccctggagagaagcctggaccccgacctgcacctgaccaagagccaggccagctggttcggcagcgtgttcaccctgggcgccgccgccggcggcctgagcgccatgatcctgaacgacctgctgggcagaaagctgagcatcatgttcagcgccgtgcccagcgccgccggctacgccctgatggccggcgcccacggcctgtggatgctgctgctgggcagaaccctgaccggcttcgccggcggcctgaccgccgcctgcatccccgtgtacgtgagcgagatcgccccccccggcgtgagaggcgccctgggcgccaccccccagctgatggccgtgttcggcagcctgagcctgtacgccctgggcctgctgctgccctggagatggctggccgtggccggcgaggcccccgtgctgatcatgatcctgctgctgagcttcatgcccaacagccccagattcctgctgagcagaggcagagacgaggaggccctgagagccctggcctggctgagaggcaccgacgtggacgtgcactgggagttcgagcagatccaggacaacgtgagaagacagagcagcagagtgagctgggccgaggccagagccccccacgtgtgcagacccatcaccgtggccctgctgatgagactgctgcagcagctgaccggcatcacccccatcctggtgtacctgcagagcatcttcgacagcaccgccgtgctgctgccccccaaggacgacgccgccatcgtgggcgccgtgagactgctgagcgtgctgatcgccgccctgaccatggacctggccggcagaaaggtgctgctgttcgtgagcgccgccatcatgttcgccgccaacctgaccctgggcctgtacatccacttcggccccagacccctgagccccaacagcaccgccggcctggagagcgagagctggggcgacctggcccagcccctggccgcccccgccggctacctgaccctggtgcccctgctggccaccatgctgttcatcatgggctacgccgtgggctggggccccatcacctggctgctgatgagcgaggtgctgcccctgagagccagaggcgtggccagcggcctgtgcgtgctggccagctggctgaccgccttcgtgctgaccaagagcttcctgcccgtggtgagcaccttcggcctgcaggtgcccttcttcttcttcgccgccatctgcctggtgagcctggtgttcaccggctgctgcgtgcccgagaccaagggcagaagcctggagcagatcgagagcttcttcagaaccggcagaagaagcttcctgagatag

SEQ ID NO: 99531 - DNA, 441 bp, synthetic construct
  misc_feature 1..441: note = Description of Artificial Sequence: Synthetic coding sequence
  source 1..441: mol_type = other DNA
atgatcctgaacgacctgctgggcagaaagctgagcatcatgttcagcgccgtgcccagcgccgccggctacgccctgatggccggcgcccacggcctgtggatgctgctgctgggcagaaccctgaccggcttcgccggcggcctgaccgccgcctgcatccccggcctgaccctgcccagcagacccggcctgggcaccagcatcttcagcaagacctggtgcggcggctgcgtgctgcaggtgtacgtgagcgagatcgccccccccggcgtgagaggcgccctgggcgccaccccccagctgatggccgtgttcggcagcctgagcctgtacgccctgggcaaggacgaggaggccctgagagccctggcctggctgagaggcaccgacgtggacgtgcactgggagttcgagcagatccaggacaacgtgagatag

SEQ ID NO: 99532 - DNA, 660 bp, synthetic construct
  misc_feature 1..660: note = Description of Artificial Sequence: Synthetic coding sequence
  source 1..660: mol_type = other DNA
atgcaggagcccctgctgggcgccgagggccccgactacgacaccttccccgagaagcccccccccagccccggcgacagagccagagtgggcaccctgcagaacaagagagtgttcctggccaccttcgccgccgtgctgggcaacttcagcttcggctacgccctggtgtacaccagccccgtgatccccgccctggagagaagcctggaccccgacctgcacctgaccaagagccaggccagctggttcggcagcgtgttcaccctgggcgccgccgccggcggcctgagcgccatgatcctgaacgacctgctgggcagaaagctgagcatcatgttcagcgccgtgcccagcgccgccggctacgccctgatggccggcgcccacggcctgtggatgctgctgctgggcagaaccctgaccggcttcgccggcggcctgaccgccgcctgcatccccgtgtacgtgagcgagatcgccccccccggcgtgagaggcgccctgggcgccaccccccagctgatggccgtgttcggcagcctgagcctgtacgccctgggcaccaagagaccctgcggcagatggcccggctgcgtgggcagaaccagcatgagcaccggcagcagcagcagaagcagaaccaccagcggcgactag

SEQ ID NO: 99533 - DNA, 1539 bp, synthetic construct
  misc_feature 1..1539: note = Description of Artificial Sequence: Synthetic coding sequence
  source 1..1539: mol_type = other DNA
atggagaacaaggaggccggcacccccccccccatccccagcagagagggcagactgcagcccaccctgctgctggccaccctgagcgccgccttcggcagcgccttccagtacggctacaacctgagcgtggtgaacaccccccacaaggtgttcaagagcttctacaacgagacctacttcgagagacacgccaccttcatggacggcaagctgatgctgctgctgtggagctgcaccgtgagcatgttccccctgggcggcctgctgggcagcctgctggtgggcctgctggtggacagctgcggcagaaagggcaccctgctgatcaacaacatcttcgccatcatccccgccatcctgatgggcgtgagcaaggtggccaaggccttcgagctgatcgtgttcagcagagtggtgctgggcgtgtgcgccggcatcagctacagcgccctgcccatgtacctgggcgagctggcccccaagaacctgagaggcatggtgggcaccatgaccgaggtgttcgtgatcgtgggcgtgttcctggcccagatcttcagcctgcaggccatcctgggcaaccccgccggctggcccgtgctgctggccctgaccggcgtgcccgccctgctgcagctgctgaccctgcccttcttccccgagagccccagatacagcctgatccagaagggcgacgaggccaccgccagacaggccctgagaagactgagaggccacaccgacatggaggccgagctggaggacatgagagccgaggccagagccgagagagccgagggccacctgagcgtgctgcacctgtgcgccctgagaagcctgagatggcagctgctgagcatcatcgtgctgatggccggccagcagctgagcggcatcaacgccatcaactactacgccgacaccatctacaccagcgccggcgtggaggccgcccacagccagtacgtgaccgtgggcagcggcgtggtgaacatcgtgatgaccatcaccagcgccgtgctggtggagagactgggcagaagacacctgctgctggccggctacggcatctgcggcagcgcctgcctggtgctgaccgtggtgctgctgttccagaacagagtgcccgagctgagctacctgggcatcatctgcgtgttcgcctacatcgccggccacagcatcggccccagccccgtgcccagcgtggtgagaaccgagatcttcctgcagagcagcagaagagccgccttcatggtggacggcgccgtgcactggctgaccaacttcatcatcggcttcctgttccccagcatccaggaggccatcggcgcctacagcttcatcatcttcgccggcatctgcctgctgaccgccatctacatctacgtggtgatccccgagaccaagggcaagaccttcgtggagatcaacagaatcttcgccaagagaaacagagtgaagctgcccgaggagaaggaggagaccatcgacgccggcccccccaccgccagccccgccaaggagaccagcttctag

SEQ ID NO: 99534 - DNA, 804 bp, synthetic construct
  misc_feature 1..804: note = Description of Artificial Sequence: Synthetic coding sequence
  source 1..804: mol_type = other DNA
atgacctgcagcctgggcaaggtgtacatcagcgagatcgcctaccccgccgtgagaggcctgctgggcagctgcgtgcagctgatggtggtggtgggcatcctgctggcctacctggccggctgggtgctggagtggagatggctggccgtgctgggctgcgtgccccccagcctgatgctgctgctgatgtgcttcatgcccgagacccccagattcctgctgacccagcacagaagacaggaggccatggccgccctgagattcctgtggggcagcgagcagggctgggaggacccccccatcggcgccgagcagagcttccacctggccctgctgagacagcccggcatctacaagcccttcatcatcggcgtgagcctgatggccttccagcagctgagcggcgtgaacgccgtgatgttctacgccgagaccatcttcgaggaggccaagttcaaggacagcagcctggccagcgtggtggtgggcgtgatccaggtgctgttcaccgccgtggccgccctgatcatggacagagccggcagaagactgctgctggtgctgagcggcgtggtgatggtgttcagcaccagcgccttcggcgcctacttcaagctgacccagggcggccccggcaacagcagccacgtggccatcagcgcccccgtgagcgcccagcccgtggacgccagcgtgggcctggcctggctggccgtgggcagcatgtgcctgttcatcgccggcttcgccgtgggctggggccccatcccctggctgctgatgagcgagatcttcccctag

SEQ ID NO: 99535 - DNA, 645 bp, synthetic construct
  misc_feature 1..645: note = Description of Artificial Sequence: Synthetic coding sequence
  source 1..645: mol_type = other DNA
atggccttccagcagctgagcggcgtgaacgccgtgatgttctacgccgagaccatcttcgaggaggccaagttcaaggacagcagcctggccagcgtggtggtgggcgtgatccaggtgctgttcaccgccgtggccgccctgatcatggacagagccggcagaagactgctgctggtgctgagcggcgtggtgatggtgttcagcaccagcgccttcggcgcctacttcaagctgacccagggcggccccggcaacagcagccacgtggccatcagcgcccccgtgagcgcccagcccgtggacgccagcgtgggcctggcctggctggccgtgggcagcatgtgcctgttcatcgccggcttcgccgtgggctggggccccatcccctggctgctgatgagcgagatcttccccctgcacgtgaagggcgtggccaccggcatctgcgtgctgaccaactggctgatggccttcctggtgaccaaggagttcagcagcctgatggaggtgctgagaccctacggcgccttctggctggccagcgccttctgcatcttcagcgtgctgttcaccctgttctgcgtgcccgagaccaagggcaagaccctggagcagatcaccgcccacttcgagggcagatag

SEQ ID NO: 99536 - DNA, 1236 bp, synthetic construct
  misc_feature 1..1236: note = Description of Artificial Sequence: Synthetic coding sequence
  source 1..1236: mol_type = other DNA
atgacccccgaggaccccgaggagacccagcccctgctgggcccccccggcggcagcgcccccagaggcagaagagtgttcctggccgccttcgccgccgccctgggccccctgagcttcggcttcgccctgggctacagcagccccgccatccccagcctgcagagagccgccccccccgcccccagactggacgacgccgccgccagctggttcggcgccgtggtgaccctgggcgccgccgccggcggcgtgctgggcggctggctggtggacagagccggcagaaagctgagcctgctgctgtgcagcgtgcccttcgtggccggcttcgccgtgatcaccgccgcccaggacgtgtggatgctgctgggcggcagactgctgaccggcctggcctgcggcgtggccagcctggtggcccccgtgtacatcagcgagatcgcctaccccgccgtgagaggcctgctgggcagctgcgtgcagctgatggtggtggtgggcatcctgctggcctacctggccggctgggtgctggagtggagatggctggccgtgctgggctgcgtgccccccagcctgatgctgctgctgatgtgcttcatgcccgagacccccagattcctgctgacccagcacagaagacaggaggccatggccgccctgagattcctgtggggcagcgagcagggctgggaggacccccccatcggcgccgagcagagcttccacctggccctgctgagacagcccggcatctacaagcccttcatcatcggcgtgagcctgatggccttccagcagctgagcggcgtgaacgccgtgatgttctacgccgagaccatcttcgaggaggccaagttcaaggacagcagcctggccagcgtggtggtgggcgtgatccaggtgctgttcaccgccgtggccgccctgatcatggacagagccggcagaagactgctgctggtgctgagcggcgtggtgatggtgttcagcaccagcgccttcggcgcctacttcaagctgacccagggcggccccggcaacagcagccacgtggccatcagcgcccccgtgagcgcccagcccgtggacgccagcgtgggcctggcctggctggccgtgggcagcatgtgcctgttcatcgccggcggcccccaggccctgtggagcctgctggcctgcctgagattcctgcacctgcagtgccccttccacttcgtgctgtgcccctag

SEQ ID NO: 99537 - DNA, 1434 bp, synthetic construct
  misc_feature 1..1434: note = Description of Artificial Sequence: Synthetic coding sequence
  source 1..1434: mol_type = other DNA
atgacccccgaggaccccgaggagacccagcccctgctgggcccccccggcggcagcgcccccagaggcagaagagtgttcctggccgccttcgccgccgccctgggccccctgagcttcggcttcgccctgggctacagcagccccgccatccccagcctgcagagagccgccccccccgcccccagactggacgacgccgccgccagctggttcggcgccgtggtgaccctgggcgccgccgccggcggcgtgctgggcggctggctggtggacagagccggcagaaagctgagcctgctgctgtgcagcgtgcccttcgtggccggcttcgccgtgatcaccgccgcccaggacgtgtggatgctgctgggcggcagactgctgaccggcctggcctgcggcgtggccagcctggtggcccccgtgtacatcagcgagatcgcctaccccgccgtgagaggcctgctgggcagctgcgtgcagctgatggtggtggtgggcatcctgctggcctacctggccggctgggtgctggagtggagatggctggccgtgctgggctgcgtgccccccagcctgatgctgctgctgatgtgcttcatgcccgagacccccagattcctgctgacccagcacagaagacaggaggccatggccgccctgagattcctgtggggcagcgagcagggctgggaggacccccccatcggcgccgagcagagcttccacctggccctgctgagacagcccggcatctacaagcccttcatcatcggcgtgagcctgatggccttccagcagctgagcggcgtgaacgccgtgatgttctacgccgagaccatcttcgaggaggccaagttcaaggacagcagcctggccagcgtggtggtgggcgtgatccaggtgctgttcaccgccgtggccgccctgatcatggacagagccggcagaagactgctgctggtgctgagcggcgtggtgatggtgttcagcaccagcgccttcggcgcctacttcaagctgacccagggcggccccggcaacagcagccacgtggccatcagcgcccccgtgagcgcccagcccgtggacgccagcgtgggcctggcctggctggccgtgggcagcatgtgcctgttcatcgccggcttcgccgtgggctggggccccatcccctggctgctgatgagcgagatcttccccctgcacgtgaagggcgtggccaccggcatctgcgtgctgaccaactggctgatggccttcctggtgaccaaggagttcagcagcctgatggaggtgctgagaccctacggcgccttctggctggccagcgccttctgcatcttcagcgtgctgttcaccctgttctgcgtgcccgagaccaagggcaagaccctggagcagatcaccgcccacttcgagggcagatag

SEQ ID NO: 99538 - DNA, 510 bp, synthetic construct
  misc_feature 1..510: note = Description of Artificial Sequence: Synthetic coding sequence
  source 1..510: mol_type = other DNA
tgaggcagaagagtgttcctggccgccttcgccgccgccctgggccccctgagcttcggcttcgccctgggctacagcagccccgccatccccagcctgcagagagccgccccccccgcccccagactggacgacgccgccgccagctggttcggcgtgtacatcagcgagatcgcctaccccgccgtgagaggcctgctgggcagctgcgtgcagctgatggtggtggtgggcatcctgctggcctacctggccggctgggtgctggagtggagatggctggccgtgctgggctgcgtgccccccagcctgatgctgctgctgatgtgcttcatgcccgagacccccagattcctgctgacccagcacagaagacaggaggccatggccgccctgagattcctgtggggcagcgagcagggctgggaggacccccccatcggcgccgagcagcagctgagcggcgtgaacgccgtgatgttctacgccgagaccatcttcgaggagtag

SEQ ID NO: 99539 - DNA, 771 bp, synthetic construct
  misc_feature 1..771: note = Description of Artificial Sequence: Synthetic coding sequence
  source 1..771: mol_type = other DNA
atgacccccgaggaccccgaggagacccagcccctgctgggcccccccggcggcagcgcccccagaggcagaagagtgttcctggccgccttcgccgccgccctgggccccctgagcttcggcttcgccctgggctacagcagccccgccatccccagcctgcagagagccgccccccccgcccccagactggacgacgccgccgccagctggttcggcgtgtacatcagcgagatcgcctaccccgccgtgagaggcctgctgggcagctgcgtgcagctgatggtggtggtgggcatcctgctggcctacctggccggctgggtgctggagtggagatggctggccgtgctgggctgcgtgccccccagcctgatgctgctgctgatgtgcttcatgcccgagacccccagattcctgctgacccagcacagaagacaggaggccatggccgccctgagattcctgtggggcagcgagcagggctgggaggacccccccatcggcgccgagcagagcttccacctggccctgctgagacagcccggcatctacaagcccttcatcatcggcgtgagcctgatggccttccagcagctgagcggcgtgaacgccgtgatgttctacgccgagaccatcttcgaggaggccaagttcaaggacagcagcctggccagcgtggtggtgggcgtgatccaggtgctgttcaccgccgtggccgccctgatcatggacagagccggcagaagactgctgctggtgctgagctag

SEQ ID NO: 99540 - DNA, 804 bp, synthetic construct; identical to SEQ ID NO: 99534
  misc_feature 1..804: note = Description of Artificial Sequence: Synthetic coding sequence
  source 1..804: mol_type = other DNA

SEQ ID NO: 99541 - DNA, 831 bp, synthetic construct
  misc_feature 1..831: note = Description of Artificial Sequence: Synthetic coding sequence
  source 1..831: mol_type = other DNA
cagctgatggtggtggtgggcatcctgctggcctacctggccggctgggtgctggagtggagatggctggccgtgctgggctgcgtgccccccagcctgatgctgctgctgatgtgcttcatgcccgagacccccagattcctgctgacccagcacagaagacaggaggccatggccgccctgagattcctgtggggcagcgagcagggctgggaggacccccccatcggcgccgagcagagcttccacctggccctgctgagacagcccggcatctacaagcccttcatcatcggcgtgagcctgatggccttccagcagctgagcggcgtgaacgccgtgatgttctacgccgagaccatcttcgaggaggccaagttcaaggacagcagcctggccagcgtggtggtgggcgtgatccaggtgctgttcaccgccgtggccgccctgatcatggacagagccggcagaagactgctgctggtgctgagcggcgtggtgatggtgttcagcaccagcgccttcggcgcctacttcaagctgacccagggcggccccggcaacagcagccacgtggccatcagcgcccccgtgagcgcccagcccgtggacgccagcgtgggcctggcctggctggccgtgggcagcatgtgcctgttcatcgccggcttcgccgtgggctggggccccatcccctggctgctgatgagcgagatcttccccctgcacgtgaagggcgtggccaccggcatctgcgtgctgaccaactggctgatggccttcctggtgaccaaggagttcagcagcctgatgctgctgctgctgctgtag

SEQ ID NO: 99542 - DNA, 726 bp, synthetic construct
  misc_feature 1..726: note = Description of Artificial Sequence: Synthetic coding sequence
  source 1..726: mol_type = other DNA
atgacctgcagcctgggcaaggtgtacatcagcgagatcgcctaccccgccgtgagaggcctgctgggcagctgcgtgcagctgatggtggtggtgggcatcctgctggcctacctggccggctgggtgctggagtggagatggctggccgtgctgggctgcgtgccccccagcctgatgctgctgctgatgtgcttcatgcccgagacccccagattcctgctgacccagcacagaagacaggaggccatggccgccctgagattcctgtggggcagcgagcagggctgggaggacccccccatcggcgccgagcagcagctgagcggcgtgaacgccgtgatgttctacgccgagaccatcttcgaggaggccaagttcaaggacagcagcctggccagcgtggtggtgggcgtgatccaggtgctgttcaccgccgtggccgccctgatcatggacagagccggcagaagactgctgctggtgctgagcggcgtggtgatggtgttcagcaccagcgccttcggcgcctacttcaagctgacccagggcggccccggcaacagcagccacgtggccatcagcgcccccgtgagcgcccagcccgtggacgccagcgtgggcctggcctggctggccgtgggcagcatgtgcctgttcatcgccggcttcgccgtgggctggggccccatcccctggctgctgatgagcgagatcttcccctag

SEQ ID NO: 99543 - DNA, 798 bp, synthetic construct
  misc_feature 1..798: note = Description of Artificial Sequence: Synthetic coding sequence
  source 1..798: mol_type = other DNA
atggtggtggtgggcatcctgctggcctacctggccggctgggtgctggagtggagatggctggccgtgctgggctgcgtgccccccagcctgatgctgctgctgatgtgcttcatgcccgagacccccagattcctgctgacccagcacagaagacaggaggccatggccgccctgagattcctgtggggcagcgagcagggctgggaggacccccccatcggcgccgagcagagcttccacctggccctgctgagacagcccggcatctacaagcccttcatcatcggcgtgagcctgatggccttccagcagctgagcggcgtgaacgccgtgatgttctacgccgagaccatcttcgaggaggccaagttcaaggacagcagcctggccagcgtggtggtgggcgtgatccaggtgctgttcaccgccgtggccgccctgatcatggacagagccggcagaagactgctgctggtgctgagcggcgtggtgatggtgttcagcaccagcgccttcggcgcctacttcaagctgacccagggcggccccggcaacagcagccacgtggccatcagcgcccccgtgagcgcccagcccgtggacgccagcgtgggcctggcctggctggccgtgggcagcatgtgcctgttcatcgccggcttcgccgtgggctggggccccatcccctggctgctgatgagcgagatcttccccctgcacgtgaagggcgtggccaccggcatctgcgtgctgaccaactggctgatggccttcctggtgaccaaggagttctag

SEQ ID NO: 99544 - DNA, 1623 bp, synthetic construct
  misc_feature 1..1623: note = Description of Artificial Sequence: Synthetic coding sequence
  source 1..1623: mol_type = other DNA
atggccagaaagcagaacagaaacagcaaggagctgggcctggtgcccctgaccgacgacaccagccacgccggcccccccggccccggcagagccctgctggagtgcgaccacctgagaagcggcgtgcccggcggcagaagaagaaaggactggagctgcagcctgctggtggccagcctggccggcgccttcggcagcagcttcctgtacggctacaacctgagcgtggtgaacgcccccaccccctacatcaaggccttctacaacgagagctgggagagaagacacggcagacccatcgaccccgacaccctgaccctgctgtggagcgtgaccgtgagcatcttcgccatcggcggcctggtgggcaccctgatcgtgaagatgatcggcaaggtgctgggcagaaagcacaccctgctggccaacaacggcttcgccatcagcgccgccctgctgatggcctgcagcctgcaggccggcgccttcgagatgctgatcgtgggcagattcatcatgggcatcgacggcggcgtggccctgagcgtgctgcccatgtacctgagcgagatcagccccaaggagatcagaggcagcctgggccaggtgaccgccatcttcatctgcatcggcgtgttcaccggccagctgctgggcctgcccgagctgctgggcaaggagagcacctggccctacctgttcggcgtgatcgtggtgcccgccgtggtgcagctgctgagcctgcccttcctgcccgacagccccagatacctgctgctggagaagcacaacgaggccagagccgtgaaggccttccagaccttcctgggcaaggccgacgtgagccaggaggtggaggaggtgctggccgagagcagagtgcagagaagcatcagactggtgagcgtgctggagctgctgagagccccctacgtgagatggcaggtggtgaccgtgatcgtgaccatggcctgctaccagctgtgcggcctgaacgccatctggttctacaccaacagcatcttcggcaaggccggcatcccccccgccaagatcccctacgtgaccctgagcaccggcggcatcgagaccctggccgccgtgttcagcggcctggtgatcgagcacctgggcagaagacccctgctgatcggcggcttcggcctgatgggcctgttcttcggcaccctgaccatcaccctgaccctgcaggaccacgccccctgggtgccctacctgagcatcgtgggcatcctggccatcatcgccagcttctgcagcggccccggcggcatccccttcatcctgaccggcgagttcttccagcagagccagagacccgccgccttcatcatcgccggcaccgtgaactggctgagcaacttcgccgtgggcctgctgttccccttcatccagaagagcctggacacctactgcttcctggtgttcgccaccatctgcatcaccggcgccatctacctgtacttcgtgctgcccgagaccaagaacagaacctacgccgagatcagccaggccttcagcaagagaaacaaggcctacccccccgaggagaagatcgacagcgccgtgaccgacggcaagatcaacggcagaccctag

SEQ ID NO: 99545 - DNA, 1536 bp, synthetic construct
  misc_feature 1..1536: note = Description of Artificial Sequence: Synthetic coding sequence
  source 1..1536: mol_type = other DNA
atgaagctgagcaagaaggacagaggcgaggacgaggagagcgacagcgccaagaagaagctggactggagctgcagcctgctggtggccagcctggccggcgccttcggcagcagcttcctgtacggctacaacctgagcgtggtgaacgcccccaccccctacatcaaggccttctacaacgagagctgggagagaagacacggcagacccatcgaccccgacaccctgaccctgctgtggagcgtgaccgtgagcatcttcgccatcggcggcctggtgggcaccctgatcgtgaagatgatcggcaaggtgctgggcagaaagcacaccctgctggccaacaacggcttcgccatcagcgccgccctgctgatggcctgcagcctgcaggccggcgccttcgagatgctgatcgtgggcagattcatcatgggcatcgacggcggcgtggccctgagcgtgctgcccatgtacctgagcgagatcagccccaaggagatcagaggcagcctgggccaggtgaccgccatcttcatctgcatcggcgtgttcaccggccagctgctgggcctgcccgagctgctgggcaaggagagcacctggccctacctgttcggcgtgatcgtggtgcccgccgtggtgcagctgctgagcctgcccttcctgcccgacagccccagatacctgctgctggagaagcacaacgaggccagagccgtgaaggccttccagaccttcctgggcaaggccgacgtgagccaggaggtggaggaggtgctggccgagagcagagtgcagagaagcatcagactggtgagcgtgctggagctgctgagagccccctacgtgagatggcaggtggtgaccgtgatcgtgaccatggcctgctaccagctgtgcggcctgaacgccatctggttctacaccaacagcatcttcggcaaggccggcatcccccccgccaagatcccctacgtgaccctgagcaccggcggcatcgagaccctggccgccgtgttcagcggcctggtgatcgagcacctgggcagaagacccctgctgatcggcggcttcggcctgatgggcctgttcttcggcaccctgaccatcaccctgaccctgcaggaccacgccccctgggtgccctacctgagcatcgtgggcatcctggccatcatcgccagcttctgcagcggccccggcggcatccccttcatcctgaccggcgagttcttccagcagagccagagacccgccgccttcatcatcgccggcaccgtgaactggctgagcaacttcgccgtgggcctgctgttccccttcatccagaagagcctggacacctactgcttcctggtgttcgccaccatctgcatcaccggcgccatctacctgtacttcgtgctgcccgagaccaagaacagaacctacgccgagatcagccaggccttcagcaagagaaacaaggcctacccccccgaggagaagatcgacagcgccgtgaccgacggcaagatcaacggcagaccctag

SEQ ID NO: 99546 - DNA, 1536 bp, synthetic construct; identical to SEQ ID NO: 99545
  misc_feature 1..1536: note = Description of Artificial Sequence: Synthetic coding sequence
  source 1..1536: mol_type = other DNA

SEQ ID NO: 99547 - DNA, 597 bp, synthetic construct
  misc_feature 1..597: note = Description of Artificial Sequence: Synthetic coding sequence
  source 1..597: mol_type = other DNA
atgaagctgagcaagaaggacagaggcgaggacgaggagagcgacagcgccaagaagaagctggactggagctgcagcctgctggtggccagcctggccggcgccttcggcagcagcttcctgtacggctacaacctgagcgtggtgaacgcccccaccccctacatcaaggccttctacaacgagagctgggagagaagacacggcagacccatcgaccccgacaccctgaccctgctgtggagcgtgaccgtgagcatcttcgccatcggcggcctggtgggcaccctgatcgtgaagatgatcggcaaggtgctgggcagaaagcacaccctgctggccaacaacggcttcgccatcagcgccgccctgctgatggcctgcagcctgcaggccggcgccttcgagatgctgatcgtgggcagattcatcatgggcatcgacggcggcgtggccctgagcgtgctgcccatgtacctgagcgagatcagccccaaggagatcagaggcagcctgggccaggtgaccgccatcttcatctgcatcggcgtgttcaccggccagctgctgggcctgcccgagctgctgggcaagtag

SEQ ID NO: 99548 - DNA, 735 bp, synthetic construct
  misc_feature 1..735: note = Description of Artificial Sequence: Synthetic coding sequence
  source 1..735: mol_type = other DNA
atggagcagcaggaccagagcatgaaggagggcagactgaccctggtgctggccctggccaccctgatcgccgccttcggcagcagcttccagtacggctacaacgtggccgccgtgaacagccccgccctgctgatgcagcagttctacaacgagacctactacggcagaaccggcgagttcatggaggacttccccctgaccctgctgtggagcgtgaccgtgagcatgttccccttcggcggcttcatcggcagcctgctggtgggccccctggtgaacaagttcggcagaaagggcgccctgctgttcaacaacatcttcagcatcgtgcccgccatcctgatgggctgcagcagagtggccaccagcttcgagctgatcatcatcagcagactgctggtgggcatctgcgccggcgtgagcagcaacgtggtgcccatgtacctgggcgagctggcccccaagaacctgagaggcgccctgggcgtggtgccccagctgttcatcaccgtgggcatcctggtggcccagatcttcggcctgagaaacctgctggccaacgtggacggcgagttcagaaccagcagagagcacccccaccccttcaccaccaccctgggccccctgctggtgttccagagccaccaccacagaaccggcctgagcgccgactggagcctgctgaccggctggatgagcctgggcggccccagctgccccgagcccacctag

SEQ ID NO: 99549 - DNA, 1506 bp, synthetic construct
  misc_feature 1..1506: note = Description of Artificial Sequence: Synthetic coding sequence
  source 1..1506: mol_type = other DNA
atggagcagcaggaccagagcatgaaggagggcagactgaccctggtgctggccctggccaccctgatcgccgccttcggcagcagcttccagtacggctacaacgtggccgccgtgaacagccccgccctgctgatgcagcagttctacaacgagacctactacggcagaaccggcgagttcatggaggacttccccctgaccctgctgtggagcgtgaccgtgagcatgttccccttcggcggcttcatcggcagcctgctggtgggccccctggtgaacaagttcggcagaaagggcgccctgctgttcaacaacatcttcagcatcgtgcccgccatcctgatgggctgcagcagagtggccaccagcttcgagctgatcatcatcagcagactgctggtgggcatctgcgccggcgtgagcagcaacgtggtgcccatgtacctgggcgagctggcccccaagaacctgagaggcgccctgggcgtggtgccccagctgttcatcaccgtgggcatcctggtggcccagatcttcggcctgagaaacctgctggccaacgtggacggctggcccatcctgctgggcctgaccggcgtgcccgccgccctgcagctgctgctgctgcccttcttccccgagagccccagatacctgctgatccagaagaaggacgaggccgccgccaagaaggccctgcagaccctgagaggctgggacagcgtggacagagaggtggccgagatcagacaggaggacgaggccgagaaggccgccggcttcatcagcgtgctgaagctgttcagaatgagaagcctgagatggcagctgctgagcatcatcgtgctgatgggcggccagcagctgagcggcgtgaacgccatctactactacgccgaccagatctacctgagcgccggcgtgcccgaggagcacgtgcagtacgtgaccgccggcaccggcgccgtgaacgtggtgatgaccttctgcgccgtgttcgtggtggagctgctgggcagaagactgctgctgctgctgggcttcagcatctgcctgatcgcctgctgcgtgctgaccgccgccctggccctgcaggacaccgtgagctggatgccctacatcagcatcgtgtgcgtgatcagctacgtgatcggccacgccctgggccccagccccatccccgccctgctgatcaccgagatcttcctgcagagcagcagacccagcgccttcatggtgggcggcagcgtgcactggctgagcaacttcaccgtgggcctgatcttccccttcatccaggagggcctgggcccctacagcttcatcgtgttcgccgtgatctgcctgctgaccaccatctacatcttcctgatcgtgcccgagaccaaggccaagaccttcatcgagatcaaccagatcttcaccaagatgaacaaggtgagcgaggtgtaccccgagaaggaggagctgaaggagctgccccccgtgaccagcgagcagtag

SEQ ID NO: 99550 - DNA, 1455 bp, synthetic construct
  misc_feature 1..1455: note = Description of Artificial Sequence: Synthetic coding sequence
  source 1..1455: mol_type = other DNA
atggagcagcaggaccagagcatgaaggagggcagactgaccctggtgctggccctggccgccgtgaacagccccgccctgctgatgcagcagttctacaacgagacctactacggcagaaccggcgagttcatggaggacttccccctgaccctgctgtggagcgtgaccgtgagcatgttccccttcggcggcttcatcggcagcctgctggtgggccccctggtgaacaagttcggcagaaagggcgccctgctgttcaacaacatcttcagcatcgtgcccgccatcctgatgggctgcagcagagtggccaccagcttcgagctgatcatcatcagcagactgctggtgggcatctgcgccggcgtgagcagcaacgtggtgcccatgtacctgggcgagctggcccccaagaacctgagaggcgccctgggcgtggtgccccagctgttcatcaccgtgggcatcctggtggcccagatcttcggcctgagaaacctgctggccaacgtggacggctggcccatcctgctgggcctgaccggcgtgcccgccgccctgcagctgctgctgctgcccttcttccccgagagccccagatacctgctgatccagaagaaggacgaggccgccgccaagaaggccctgcagaccctgagaggctgggacagcgtggacagagaggtggccgagatcagacaggaggacgaggccgagaaggccgccggcttcatcagcgtgctgaagctgttcagaatgagaagcctgagatggcagctgctgagcatcatcgtgctgatgggcggccagcagctgagcggcgtgaacgccatctactactacgccgaccagatctacctgagcgccggcgtgcccgaggagcacgtgcagtacgtgaccgccggcaccggcgccgtgaacgtggtgatgaccttctgcgccgtgttcgtggtggagctgctgggcagaagactgctgctgctgctgggcttcagcatctgcctgatcgcctgctgcgtgctgaccgccgccctggccctgcaggacaccgtgagctggatgccctacatcagcatcgtgtgcgtgatcagctacgtgatcggccacgccctgggccccagccccatccccgccctgctgatcaccgagatcttcctgcagagcagcagacccagcgccttcatggtgggcggcagcgtgcactggctgagcaacttcaccgtgggcctgatcttccccttcatccaggagggcctgggcccctacagcttcatcgtgttcgccgtgatctgcctgctgaccaccatctacatcttcctgatcgtgcccgagaccaaggccaagaccttcatcgagatcaaccagatcttcaccaagatgaacaaggtgagcgaggtgtaccccgagaaggaggagctgaaggagctgccccccgtgaccagcgagcagtag

SEQ ID NO: 99551 - DNA, 1161 bp, synthetic construct
  misc_feature 1..1161: note = Description of Artificial Sequence: Synthetic coding sequence
  source 1..1161: mol_type = other DNA
atgggctgcagcagagtggccaccagcttcgagctgatcatcatcagcagactgctggtgggcatctgcgccggcgtgagcagcaacgtggtgcccatgtacctgggcgagctggcccccaagaacctgagaggcgccctgggcgtggtgccccagctgttcatcaccgtgggcatcctggtggcccagatcttcggcctgagaaacctgctggccaacgtggacggctggcccatcctgctgggcctgaccggcgtgcccgccgccctgcagctgctgctgctgcccttcttccccgagagccccagatacctgctgatccagaagaaggacgaggccgccgccaagaaggccctgcagaccctgagaggctgggacagcgtggacagagaggtggccgagatcagacaggaggacgaggccgagaaggccgccggcttcatcagcgtgctgaagctgttcagaatgagaagcctgagatggcagctgctgagcatcatcgtgctgatgggcggccagcagctgagcggcgtgaacgccatctactactacgccgaccagatctacctgagcgccggcgtgcccgaggagcacgtgcagtacgtgaccgccggcaccggcgccgtgaacgtggtgatgaccttctgcgccgtgttcgtggtggagctgctgggcagaagactgctgctgctgctgggcttcagcatctgcctgatcgcctgctgcgtgctgaccgccgccctggccctgcaggacaccgtgagctggatgccctacatcagcatcgtgtgcgtgatcagctacgtgatcggccacgccctgggccccagccccatccccgccctgctgatcaccgagatcttcctgcagagcagcagacccagcgccttcatggtgggcggcagcgtgcactggctgagcaacttcaccgtgggcctgatcttccccttcatccaggagggcctgggcccctacagcttcatcgtgttcgccgtgatctgcctgctgaccaccatctacatcttcctgatcgtgcccgagaccaaggccaagaccttcatcgagatcaaccagatcttcaccaagatgaacaaggtgagcgaggtgtaccccgagaaggaggagctgaaggagctgccccccgtgaccagcgagcagtag

SEQ ID NO: 99552 - DNA, 1329 bp, synthetic construct
  misc_feature 1..1329: note = Description of Artificial Sequence: Synthetic coding sequence
  source 1..1329: mol_type = other DNA
atgctggagctgcacagcctgaccgccagcagcatcatgagagtgctgatcatgagagcccccctgagagaggccccccccgagaagttcgccctgctgctgagcggcagccccggcaagggcgccctgctgttcaacaacatcttcagcatcgtgcccgccatcctgatgggctgcagcagagtggccaccagcttcgagctgatcatcatcagcagactgctggtgggcatctgcgccggcgtgagcagcaacgtggtgcccatgtacctgggcgagctggcccccaagaacctgagaggcgccctgggcgtggtgccccagctgttcatcaccgtgggcatcctggtggcccagatcttcggcctgagaaacctgctggccaacgtggacggctggcccatcctgctgggcctgaccggcgtgcccgccgccctgcagctgctgctgctgcccttcttccccgagagccccagatacctgctgatccagaagaaggacgaggccgccgccaagaaggccctgcagaccctgagaggctgggacagcgtggacagagaggtggccgagatcagacaggaggacgaggccgagaaggccgccggcttcatcagcgtgctgaagctgttcagaatgagaagcctgagatggcagctgctgagcatcatcgtgctgatgggcggccagcagctgagcggcgtgaacgccatctactactacgccgaccagatctacctgagcgccggcgtgcccgaggagcacgtgcagtacgtgaccgccggcaccggcgccgtgaacgtggtgatgaccttctgcgccgtgttcgtggtggagctgctgggcagaagactgctgctgctgctgggcttcagcatctgcctgatcgcctgctgcgtgctgaccgccgccctggccctgcaggacaccgtgagctggatgccctacatcagcatcgtgtgcgtgatcagctacgtgatcggccacgccctgggccccagccccatccccgccctgctgatcaccgagatcttcctgcagagcagcagacccagcgccttcatggtgggcggcagcgtgcactggctgagcaacttcaccgtgggcctgatcttccccttcatccaggagggcctgggcccctacagcttcatcgtgttcgccgtgatctgcctgctgaccaccatctacatcttcctgatcgtgcccgagaccaaggccaagaccttcatcgagatcaaccagatcttcaccaagatgaacaaggtgagcgaggtgtaccccgagaaggaggagctgaaggagctgccccccgtgaccagcgagcagtag

SEQ ID NO: 99553 - DNA, 2040 bp, synthetic construct
  misc_feature 1..2040: note = Description of Artificial Sequence: Synthetic coding sequence
  source 1..2040: mol_type = other DNA
atggccaccctgatcaccagcaccaccgccgccaccgccgccagcggccccctggtggactacctgtggatgctgatcctgggcttcatcatcgccttcgtgctggccttcagcgtgggcgccaacgacgtggccaacagcttcggcaccgccgtgggcagcggcgtggtgaccctgaagcaggcctgcatcctggccagcatcttcgagaccgtgggcagcgtgctgctgggcgccaaggtgagcgagaccatcagaaagggcctgatcgacgtggagatgtacaacagcacccagggcctgctgatggccggcagcgtgagcgccatgttcggcagcgccgtgtggcagctggtggccagcttcctgaagctgcccatcagcggcacccactgcatcgtgggcgccaccatcggcttcagcctggtggccaagggccaggagggcgtgaagtggagcgagctgatcaagatcgtgatgagctggttcgtgagccccctgctgagcggcatcatgagcggcatcctgttcttcctggtgagagccttcatcctgcacaaggccgaccccgtgcccaacggcctgagagccctgcccgtgttctacgcctgcaccgtgggcatcaacctgttcagcatcatgtacaccggcgcccccctgctgggcttcgacaagctgcccctgtggggcaccatcctgatcagcgtgggctgcgccgtgttctgcgccctgatcgtgtggttcttcgtgtgccccagaatgaagagaaagatcgagagagagatcaagtgcagccccagcgagagccccctgatggagaagaagaacagcctgaaggaggaccacgaggagaccaagctgagcgtgggcgacatcgagaacaagcaccccgtgagcgaggtgggccccgccaccgtgcccctgcaggccgtggtggaggagagaaccgtgagcttcaagctgggcgacctggaggaggcccccgagagagagagactgcccagcgtggacctgaaggaggagaccagcatcgacagcaccgtgaacggcgccgtgcagctgcccaacggcaacctggtgcagttcagccaggccgtgagcaaccagatcaacagcagcggccactaccagtaccacaccgtgcacaaggacagcggcctgtacaaggagctgctgcacaagctgcacctggccaaggtgggcgactgcatgggcgacagcggcgacaagcccctgagaagaaacaacagctacaccagctacaccatggccatctgcggcatgcccctggacagcttcagagccaaggagggcgagcagaagggcgaggagatggagaagctgacctggcccaacgccgacagcaagaagagaatcagaatggacagctacaccagctactgcaacgccgtgagcgacctgcacagcgccagcgagatcgacatgagcgtgaaggccgagatgggcctgggcgacagaaagggcagcaacggcagcctggaggagtggtacgaccaggacaagcccgaggtgagcctgctgttccagttcctgcagatcctgaccgcctgcttcggcagcttcgcccacggcggcaacgacgtgagcaacgccatcggccccctggtggccctgtacctggtgtacgacaccggcgacgtgagcagcaaggtggccacccccatctggctgctgctgtacggcggcgtgggcatctgcgtgggcctgtgggtgtggggcagaagagtgatccagaccatgggcaaggacctgacccccatcacccccagcagcggcttcagcatcgagctggccagcgccctgaccgtggtgatcgccagcaacatcggcctgcccatcagcaccacccactgcaaggtgggcagcgtggtgagcgtgggctggctgagaagcaagaaggccgtggactggagactgttcagaaacatcttcatggcctggttcgtgaccgtgcccatcagcggcgtgatcagcgccgccatcatggccatcttcagatacgtgatcctgagaatgtag

SEQ ID NO: 99554 - DNA, 1137 bp, synthetic construct
  misc_feature 1..1137: note = Description of Artificial Sequence: Synthetic coding sequence
  source 1..1137: mol_type = other DNA
atgggcaaccccagcgtgcccagaggcggcttcacccagtactgcagaggcctgctgccctggggcttccaggacgcccccttctacctgctggtgctgggcttcgacaagctgcccctgtggggcaccatcctgatcagcgtgggctgcgccgtgttctgcgccctgatcgtgtggttcttcgtgtgccccagaatgaagagaaagatcgagagagagatcaagtgcagccccagcgagagccccctgatggagaagaagaacagcctgaaggaggaccacgaggagaccaagctgagcgtgggcgacatcgagaacaagcaccccgtgagcgaggtgggccccgccaccgtgcccctgcaggccgtggtggaggagagaaccgtgagcttcaagctgggcgacctggaggaggcccccgagagagagagactgcccagcgtggacctgaaggaggagaccagcatcgacagcaccgtgaacggcgccgtgcagctgcccaacggcaacctggtgcagttcagccaggccgtgagcaaccagatcaacagcagcggccactaccagtaccacaccgtgcacaaggacagcggcctgtacaaggagctgctgcacaagctgcacctggccaaggtgggcgactgcatgggcgacagcggcgacaagcccctgagaagaaacaacagctacaccagctacaccatggccatctgcggcatgcccctggacagcttcagagccaaggagggcgagcagaagggcgaggagatggagaagctgacctggcccaacgccgacagcaagaagagaatcagaatggacagctacaccagctactgcaacgccgtgagcgacctgcacagcgccagcgagatcgacatgagcgtgaaggccgagatgggcctgggcgacagaaagggcagcaacggcagcctggaggagtggtacgaccaggacaagcccgaggtgagcctgctgttccagttcctgcagatcctgaccgcctgcttcggcagcttcgcccacggcggcaacgacgtgagcaacgccatcggccccctggtggccctgtacctggtgtacgacaccggcgacgtgagcagcaaggtggccacccccatctggctgctgtgctag

SEQ ID NO: 99555 - DNA, 1959 bp, synthetic construct
  misc_feature 1..1959: note = Description of Artificial Sequence: Synthetic coding sequence
  source 1..1959: mol_type = other DNA
atggccatggacgagtacctgtggatggtgatcctgggcttcatcatcgccttcatcctggccttcagcgtgggcgccaacgacgtggccaacagcttcggcaccgccgtgggcagcggcgtggtgaccctgagacaggcctgcatcctggccagcatcttcgagaccaccggcagcgtgctgctgggcgccaaggtgggcgagaccatcagaaagggcatcatcgacgtgaacctgtacaacgagaccgtggagaccctgatggccggcgaggtgagcgccatggtgggcagcgccgtgtggcagctgatcgccagcttcctgagactgcccatcagcggcacccactgcatcgtgggcagcaccatcggcttcagcctggtggccatcggcaccaagggcgtgcagtggatggagctggtgaagatcgtggccagctggttcatcagccccctgctgagcggcttcatgagcggcctgctgttcgtgctgatcagaatcttcatcctgaagaaggaggaccccgtgcccaacggcctgagagccctgcccgtgttctacgccgccaccatcgccatcaacgtgttcagcatcatgtacaccggcgcccccgtgctgggcctggtgctgcccatgtgggccatcgccctgatcagcttcggcgtggccctgctgttcgccttcttcgtgtggctgttcgtgtgcccctggatgagaagaaagatcaccggcaagctgcagaaggagggcgccctgagcagagtgagcgacgagagcctgagcaaggtgcaggaggccgagagccccgtgttcaaggagctgcccggcgccaaggccaacgacgacagcaccatccccctgaccggcgccgccggcgagaccctgggcaccagcgagggcaccagcgccggcagccaccccagagccgcctacggcagagccctgagcatgacccacggcagcgtgaagagccccatcagcaacggcaccttcggcttcgacggccacaccagaagcgacggccacgtgtaccacaccgtgcacaaggacagcggcctgtacaaggacctgctgcacaagatccacatcgacagaggccccgaggagaagcccgcccaggagagcaactacagactgctgagaagaaacaacagctacacctgctacaccgccgccatctgcggcctgcccgtgcacgccaccttcagagccgccgacagcagcgcccccgaggacagcgagaagctggtgggcgacaccgtgagctacagcaagaagagactgagatacgacagctacagcagctactgcaacgccgtggccgaggccgagatcgaggccgaggagggcggcgtggagatgaagctggccagcgagctggccgaccccgaccagcccagagaggaccccgccgaggaggagaaggaggagaaggacgcccccgaggtgcacctgctgttccacttcctgcaggtgctgaccgcctgcttcggcagcttcgcccacggcggcaacgacgtgagcaacgccatcggccccctggtggccctgtggctgatctacaagcagggcggcgtgacccaggaggccgccacccccgtgtggctgctgttctacggcggcgtgggcatctgcaccggcctgtgggtgtggggcagaagagtgatccagaccatgggcaaggacctgacccccatcacccccagcagcggcttcaccatcgagctggccagcgccttcaccgtggtgatcgccagcaacatcggcctgcccgtgagcaccacccactgcaaggtgggcagcgtggtggccgtgggctggatcagaagcagaaaggccgtggactggagactgttcagaaacatcttcgtggcctggttcgtgaccgtgcccgtggccggcctgttcagcgccgccgtgatggccctgctgatgtacggcatcctgccctacgtgtag

SEQ ID NO: 99556 - DNA, 216 bp, synthetic construct
  misc_feature 1..216: note = Description of Artificial Sequence: Synthetic coding sequence
  source 1..216: mol_type = other DNA
atggccatggacgagtacctgtggatggtgatcctgggcttcatcatcgccttcatcctggccttcagcgtgggcgccaacgacgtggccaacagcttcggcaccgccgtgggcagcggcgtggtgaccctgagacaggcctgcatcctggccagcatcttcgagaccaccggcagcgtgctgctgggcgccaaggtgggcgagaccatcagatag

SEQ ID NO: 99557 - DNA, 87 bp, synthetic construct
  misc_feature 1..87: note = Description of Artificial Sequence: Synthetic coding sequence
  source 1..87: mol_type = other DNA
atggccatggacgagtacctgtggatggtgatcctgggcttcatcatcgccttcatcctggccttcagcgtgggcgccaacgactag

SEQ ID NO: 99558 - DNA, 237 bp, synthetic construct
  misc_feature 1..237: note = Description of Artificial Sequence: Synthetic coding sequence
  source 1..237: mol_type = other DNA
atggccatggacgagtacctgtggatggtgatcctgggcttcatcatcgccttcatcctggccttcagcgtgggcgccaacgacgtggccaacagcttcggcaccgccgtgggcagcggcgtggtgaccctgagacaggcctgcatcctggccagcatcttcgagaccaccggcagcgtgctgctgggcgccaaggtgggcgagaccatcagaaagggcatcatcgacgtgaactag

SEQ ID NO: 99559 - DNA, 1959 bp, synthetic construct; identical to SEQ ID NO: 99555
  misc_feature 1..1959: note = Description of Artificial Sequence: Synthetic coding sequence
  source 1..1959: mol_type = other DNA

SEQ ID NO: 99560 - DNA, 1959 bp, synthetic construct; identical to SEQ ID NO: 99555
  misc_feature 1..1959: note = Description of Artificial Sequence: Synthetic coding sequence
  source 1..1959: mol_type = other DNA

SEQ ID NO: 99561 - DNA, 144 bp, synthetic construct
  misc_feature 1..144: note = Description of Artificial Sequence: Synthetic coding sequence
  source 1..144: mol_type = other DNA
atggccatggacgagtacctgtggatggtgatcctgggcttcatcatcgccttcatcctggccttcagcgtgggcgccaacgacgtggccaacagcttcggcaccgccgtgggcagcggcgtggtgaccctgagacaggcctag

SEQ ID NO: 99562 - DNA, 1260 bp, synthetic construct
  misc_feature 1..1260: note = Description of Artificial Sequence: Synthetic coding sequence
  source 1..1260: mol_type = other DNA
atggcccagagcatcttcatggccggcatcctgatcggcggcctggtgctgggcgacctgagcgacagattcggcagaagacccatcctgacctgcagctacctgctgctggccgccagcggcagcggcgccgccttcagccccaccttccccatctacatggtgttcagattcctgtgcggcttcggcatcagcggcatcaccctgagcaccgtgatcctgaacgtggagtgggtgcccaccagaatgagagccatcatgagcaccgccctgggctactgctacaccttcggccagttcatcctgcccggcctggcctacgccatcccccagtggagatggctgcagctgaccgtgagcatccccttcttcgtgttcttcctgagcagctggtggacccccgagagcatcagatggctggtgctgagcggcaagagcagcaaggccctgaagatcctgagaagagtggccgtgttcaacggcaagaaggaggagggcgagagactgagcctggaggagctgaagctgaacctgcagaaggagatcagcctggccaaggccaagtacaccgccagcgacctgttcagaatccccatgctgagaagaatgaccttctgcctgagcctggcctggttcgccaccggcttcgcctactacagcctggccatgggcgtggaggagttcggcgtgaacctgtacatcctgcagatcatcttcggcggcgtggacgtgcccgccaagttcatcaccatcctgagcctgagctacctgggcagacacaccacccaggccgccgccctgctgctggccggcggcgccatcctggccctgaccttcgtgcccctggacctgcagaccgtgagaaccgtgctggccgtgttcggcaagggctgcctgagcagcagcttcagctgcctgttcctgtacaccagcgagctgtaccccaccgtgatcagacagaccggcatgggcgtgagcaacctgtggaccagagtgggcagcatggtgagccccctggtgaagatcaccggcgaggtgcagcccttcatccccaacatcatctacggcatcaccgccctgctgggcggcagcgccgccctgttcctgcccgagaccctgaaccagcccctgcccgagaccatcgaggacctggagaactggagcctgagagccaagaagcccaagcaggagcccgaggtggagaaggccagccagagaatccccctgcagccccacggccccggcctgggcagcagctag

SEQ ID NO: 99563 - DNA, 1356 bp, synthetic construct
  misc_feature 1..1356: note = Description of Artificial Sequence: Synthetic coding sequence
  source 1..1356: mol_type = other DNA
atggagccctgcctggacggctgggtgtacaacagcaccaaggacagcatcgtgaccgagtgggacctggtgtgcaacagcaacaagctgaaggagatggcccagagcatcttcatggccggcatcctgatcggcggcctggtgctgggcgacctgagcgacagattcggcagaagacccatcctgacctgcagctacctgctgctggccgccagcggcagcggcgccgccttcagccccaccttccccatctacatggtgttcagattcctgtgcggcttcggcatcagcggcatcaccctgagcaccgtgatcctgaacgtggagtgggtgcccaccagaatgagagccatcatgagcaccgccctgggctactgctacaccttcggccagttcatcctgcccggcctggcctacgccatcccccagtggagatggctgcagctgaccgtgagcatccccttcttcgtgttcttcctgagcagctggtggacccccgagagcatcagatggctggtgctgagcggcaagagcagcaaggccctgaagatcctgagaagagtggccgtgttcaacggcaagaaggaggagggcgagagactgagcctggaggagctgaagctgaacctgcagaaggagatcagcctggccaaggccaagtacaccgccagcgacctgttcagaatccccatgctgagaagaatgaccttctgcctgagcctggcctggttcgccaccggcttcgcctactacagcctggccatgggcgtggaggagttcggcgtgaacctgtacatcctgcagatcatcttcggcggcgtggacgtgcccgccaagttcatcaccatcctgagcctgagctacctgggcagacacaccacccaggccgccgccctgctgctggccggcggcgccatcctggccctgaccttcgtgcccctggacctgcagaccgtgagaaccgtgctggccgtgttcggcaagggctgcctgagcagcagcttcagctgcctgttcctgtacaccagcgagctgtaccccaccgtgatcagacagaccggcatgggcgtgagcaacctgtggaccagagtgggcagcatggtgagccccctggtgaagatcaccggcgaggtgcagcccttcatccccaacatcatctacggcatcaccgccctgctgggcggcagcgccgccctgttcctgcccgagaccctgaaccagcccctgcccgagaccatcgaggacctggagaactggagcctgagagccaagaagcccaagcaggagcccgaggtggagaaggccagccagagaatccccctgcagccccacggccccggcctgggcagcagctag

SEQ ID NO: 99564 - DNA, 1653 bp, synthetic construct
  misc_feature 1..1653: note = Description of Artificial Sequence: Synthetic coding sequence
  source 1..1653: mol_type = other DNA
atggccttcaacgacctgctgcagcaggtgggcggcgtgggcagattccagcagatccaggtgaccctggtggtgctgcccctgctgctgatggccagccacaacaccctgcagaacttcaccgccgccatccccacccaccactgcagaccccccgccgacgccaacctgagcaagaacggcggcctggaggtgtggctgcccagagacagacagggccagcccgagagctgcctgagattcaccagcccccagtggggcctgcccttcctgaacggcaccgaggccaacggcaccggcgccaccgagccctgcaccgacggctggatctacgacaacagcaccttccccagcaccatcgtgaccgagtgggacctggtgtgcagccacagagccctgagacagctggcccagagcctgtacatggtgggcgtgctgctgggcgccatggtgttcggctacctggccgacagactgggcagaagaaaggtgctgatcctgaactacctgcagaccgccgtgagcggcacctgcgccgccttcgcccccaacttccccatctactgcgccttcagactgctgagcggcatggccctggccggcatcagcctgaactgcatgaccctgaacgtggagtggatgcccatccacaccagagcctgcgtgggcaccctgatcggctacgtgtacagcctgggccagttcctgctggccggcgtggcctacgccgtgccccactggagacacctgcagctgctggtgagcgcccccttcttcgccttcttcatctacagctggttcttcatcgagagcgccagatggcacagcagcagcggcagactggacctgaccctgagagccctgcagagagtggccagaatcaacggcaagagagaggagggcgccaagctgagcatggaggtgctgagagccagcctgcagaaggagctgaccatgggcaagggccaggccagcgccatggagctgctgagatgccccaccctgagacacctgttcctgtgcctgagcatgctgtggttcgccaccagcttcgcctactacggcctggtgatggacctgcagggcttcggcgtgagcatctacctgatccaggtgatcttcggcgccgtggacctgcccgccaagctggtgggcttcctggtgatcaacagcctgggcagaagacccgcccagatggccgccctgctgctggccggcatctgcatcctgctgaacggcgtgatcccccaggaccagagcatcgtgagaaccagcctggccgtgctgggcaagggctgcctggccgccagcttcaactgcatcttcctgtacaccggcgagctgtaccccaccatgatcagacagaccggcatgggcatgggcagcaccatggccagagtgggcagcatcgtgagccccctggtgagcatgaccgccgagctgtaccccagcatgcccctgttcatctacggcgccgtgcccgtggccgccagcgccgtgaccgtgctgctgcccgagaccctgggccagcccctgcccgacaccgtgcaggacctggagagcagaaagggcaagcagaccagacagcagcaggagcaccagaagtacatggtgcccctgcaggccagcgcccaggagaagaacggcctgtag

SEQ ID NO: 99565 - DNA, 1692 bp, synthetic construct
  misc_feature 1..1692: note = Description of Artificial Sequence: Synthetic coding sequence
  source 1..1692: mol_type = other DNA
atggccttcaacgacctgctgcagcaggtgggcggcgtgggcagattccagcagatccaggtgaccctggtggtgctgcccctgctgctgatggccagccacaacaccctgcagaacttcaccgccgccatccccacccaccactgcagaccccccgccgacgccaacctgagcaagaacggcggcctggaggtgtggctgcccagagacagacagggccagcccgagagctgcctgagattcaccagcccccagtggggcctgcccttcctgaacggcaccgaggccaacggcaccggcgccaccgagccctgcaccgacggctggatctacgacaacagcaccttccccagcaccatcgtgaccgagtgggacctggtgtgcagccacagagccctgagacagctggcccagagcctgtacatggtgggcgtgctgctgggcgccatggtgttcggctacctggccgacagactgggcagaagaaaggtgctgatcctgaactacctgcagaccgccgtgagcggcacctgcgccgccttcgcccccaacttccccatctactgcgccttcagactgctgagcggcatggccctggccggcatcagcctgaactgcatgaccctgaacgtggagtggatgcccatccacaccagagcctgcgtgggcaccctgatcggctacgtgtacagcctgggccagttcctgctggccggcgtggcctacgccgtgccccactggagacacctgcagctgctggtgagcgcccccttcttcgccttcttcatctacagctggttcttcatcgagagcgccagatggcacagcagcagcggcagactggacctgaccctgagagccctgcagagagtggccagaatcaacggcaagagagaggagggcgccaagctgagcatggaggtgctgagagccagcctgcagaaggagctgaccatgggcaagggccaggccagcgccatggagctgctgagatgccccaccctgagacacctgttcctgtgcctgagcatgctgtggttcgccaccagcttcgcctactacggcctggtgatggacctgcagggcttcggcgtgagcatctacctgatccaggtgatcttcggcgccgtggacctgcccgccaagctggtgggcttcctggtgatcaacagcctgggcagaagacccgcccagatggccgccctgctgctggccggcatctgcatcctgctgaacggcgtgatcccccaggaccagagcatcgtgagaaccagcctggccgtgctgggcaagggctgcctggccgccagcttcaactgcatcttcctgtacaccggcgagctgtaccccaccatgatcagacagaccggcatgggcatgggcagcaccatggccagagtgggcagcatcgtgagccccctggtgagcatgaccgccgagctgtaccccagcatgcccctgttcatctacggcgccgtgcccgtggccgccagcgccgtgaccgtgctgctgcccgagaccctgggccagcccctgcccgacaccgtgcaggacctggagagcagatgggcccccacccagaaggaggccggcatctaccccagaaagggcaagcagaccagacagcagcaggagcaccagaagtacatggtgcccctgcaggccagcgcccaggagaagaacggcctgtag

SEQ ID NO: 99566 - DNA, 1590 bp, synthetic construct
  misc_feature 1..1590: note = Description of Artificial Sequence: Synthetic coding sequence
  source 1..1590: mol_type = other DNA
atggccttcaacgacctgctgctgctgatggccagccacaacaccctgcagaacttcaccgccgccatccccacccaccactgcagaccccccgccgacgccaacctgagcaagaacggcggcctggaggtgtggctgcccagagacagacagggccagcccgagagctgcctgagattcaccagcccccagtggggcctgcccttcctgaacggcaccgaggccaacggcaccggcgccaccgagccctgcaccgacggctggatctacgacaacagcaccttccccagcaccatcgtgaccgagtgggacctggtgtgcagccacagagccctgagacagctggcccagagcctgtacatggtgggcgtgctgctgggcgccatggtgttcggctacctggccgacagactgggcagaagaaaggtgctgatcctgaactacctgcagaccgccgtgagcggcacctgcgccgccttcgcccccaacttccccatctactgcgccttcagactgctgagcggcatggccctggccggcatcagcctgaactgcatgaccctgaacgtggagtggatgcccatccacaccagagcctgcgtgggcaccctgatcggctacgtgtacagcctgggccagttcctgctggccggcgtggcctacgccgtgccccactggagacacctgcagctgctggtgagcgcccccttcttcgccttcttcatctacagctggttcttcatcgagagcgccagatggcacagcagcagcggcagactggacctgaccctgagagccctgcagagagtggccagaatcaacggcaagagagaggagggcgccaagctgagcatggaggtgctgagagccagcctgcagaaggagctgaccatgggcaagggccaggccagcgccatggagctgctgagatgccccaccctgagacacctgttcctgtgcctgagcatgctgtggttcgccaccagcttcgcctactacggcctggtgatggacctgcagggcttcggcgtgagcatctacctgatccaggtgatcttcggcgccgtggacctgcccgccaagctggtgggcttcctggtgatcaacagcctgggcagaagacccgcccagatggccgccctgctgctggccggcatctgcatcctgctgaacggcgtgatcccccaggaccagagcatcgtgagaaccagcctggccgtgctgggcaagggctgcctggccgccagcttcaactgcatcttcctgtacaccggcgagctgtaccccaccatgatcagacagaccggcatgggcatgggcagcaccatggccagagtgggcagcatcgtgagccccctggtgagcatgaccgccgagctgtaccccagcatgcccctgttcatctacggcgccgtgcccgtggccgccagcgccgtgaccgtgctgctgcccgagaccctgggccagcccctgcccgacaccgtgcaggacctggagagcagaaagggcaagcagaccagacagcagcaggagcaccagaagtacatggtgcccctgcaggccagcgcccaggagaagaacggcctgtag

SEQ ID NO: 99567 - DNA, 1560 bp, synthetic construct
  misc_feature 1..1560: note = Description of Artificial Sequence: Synthetic coding sequence
  source 1..1560: mol_type = other DNA
atggccttcaacgacctgctgcagcaggtgggcggcgtgggcagattccagcagatccaggtgaccctggtggtgctgcccctgctgctgatggccagccacaacaccctgcagaacttcaccgccgccatccccacccaccactgcagaccccccgccgacgccaacctgagcaagaacggcggcctggaggtgtggctgcccagagacagacagggccagcccgagagctgcctgagattcaccagcccccagtggggcctgcccttcctgaacggcaccgaggccaacggcaccggcgccaccgagccctgcaccgacggctggatctacgacaacagcaccttccccagcaccatcgtgaccgagtgggacctggtgtgcagccacagagccctgagacagctggcccagagcctgtacatggtgggcgtgctgctgggcgccatggtgttcggctacctggccgacagactgggcagaagaaaggtgctgatcctgaactacctgcagaccgccgtgagcggcacctgcgccgccttcgcccccaacttccccatctactgcgccttcagactgctgagcggcatggccctggccggcatcagcctgaactgcatgaccctgaacgtggagtggatgcccatccacaccagagcctgcgtgggcaccctgatcggctacgtgtacagcctgggccagttcctgctggccggcgtggcctacgccgtgccccactggagacacctgcagctgctggtgagcgcccccttcttcgccttcttcatctacagctggttcttcatcgagagcgccagatggcacagcagcagcggcagactggacctgaccctgagagccctgcagagagtggccagaatcaacggcaagagagaggagggcgccaagctgagcatggaggtgctgagagccagcctgcagaaggagctgaccatgggcaagggccaggccagcgccatggagctgctgagatgccccaccctgagacacctgttcctgtgcctgagcatgctgtggttcgccaccagcttcgcctactacggcctggtgatggacctgcagggcttcggcgtgagcatctacctgatccaggtgatcttcggcgccgtggacctgcccgccaagctggtgggcttcctggtgatcaacagcctgggcagaagacccgcccagatggccgccctgctgctggccggcatctgcatcctgctgaacggcgtgatcccccaggaccagagcatcgtgagaaccagcctggccgtgctgggcaagggctgcctggccgccagcttcaactgcatcttcctgtacaccggcgagctgtaccccaccatgatcagagccgtgaccgtgctgctgcccgagaccctgggccagcccctgcccgacaccgtgcaggacctggagagcagatgggcccccacccagaaggaggccggcatctaccccagaaagggcaagcagaccagacagcagcaggagcaccagaagtacatggtgcccctgcaggccagcgcccaggagaagaacggcctgtag

SEQ ID NO: 99568 - DNA, 1521 bp, synthetic construct
  misc_feature 1..1521: note = Description of Artificial Sequence: Synthetic coding sequence
  source 1..1521: mol_type = other DNA
atggccttcaacgacctgctgcagcaggtgggcggcgtgggcagattccagcagatccaggtgaccctggtggtgctgcccctgctgctgatggccagccacaacaccctgcagaacttcaccgccgccatccccacccaccactgcagaccccccgccgacgccaacctgagcaagaacggcggcctggaggtgtggctgcccagagacagacagggccagcccgagagctgcctgagattcaccagcccccagtggggcctgcccttcctgaacggcaccgaggccaacggcaccggcgccaccgagccctgcaccgacggctggatctacgacaacagcaccttccccagcaccatcgtgaccgagtgggacctggtgtgcagccacagagccctgagacagctggcccagagcctgtacatggtgggcgtgctgctgggcgccatggtgttcggctacctggccgacagactgggcagaagaaaggtgctgatcctgaactacctgcagaccgccgtgagcggcacctgcgccgccttcgcccccaacttccccatctactgcgccttcagactgctgagcggcatggccctggccggcatcagcctgaactgcatgaccctgaacgtggagtggatgcccatccacaccagagcctgcgtgggcaccctgatcggctacgtgtacagcctgggccagttcctgctggccggcgtggcctacgccgtgccccactggagacacctgcagctgctggtgagcgcccccttcttcgccttcttcatctacagctggttcttcatcgagagcgccagatggcacagcagcagcggcagactggacctgaccctgagagccctgcagagagtggccagaatcaacggcaagagagaggagggcgccaagctgagcatggaggtgctgagagccagcctgcagaaggagctgaccatgggcaagggccaggccagcgccatggagctgctgagatgccccaccctgagacacctgttcctgtgcctgagcatgctgtggttcgccaccagcttcgcctactacggcctggtgatggacctgcagggcttcggcgtgagcatctacctgatccaggtgatcttcggcgccgtggacctgcccgccaagctggtgggcttcctggtgatcaacagcctgggcagaagacccgcccagatggccgccctgctgctggccggcatctgcatcctgctgaacggcgtgatcccccaggaccagagcatcgtgagaaccagcctggccgtgctgggcaagggctgcctggccgccagcttcaactgcatcttcctgtacaccggcgagctgtaccccaccatgatcagagccgtgaccgtgctgctgcccgagaccctgggccagcccctgcccgacaccgtgcaggacctggagagcagaaagggcaagcagaccagacagcagcaggagcaccagaagtacatggtgcccctgcaggccagcgcccaggagaagaacggcctgtag

SEQ ID NO: 99569 - DNA, 1620 bp, synthetic construct
  misc_feature 1..1620: note = Description of Artificial Sequence: Synthetic coding sequence
  source 1..1620: mol_type = other DNA
atgggcttcgaggagctgctggagcaggtgggcggcttcggccccttccagctgagaaacgtggccctgctggccctgcccagagtgctgctgcccctgcacttcctgctgcccatcttcctggccgccgtgcccgcccacagatgcgccctgcccggcgcccccgccaacttcagccaccaggacgtgtggctggaggcccacctgcccagagagcccgacggcaccctgagcagctgcctgagattcgcctacccccaggccctgcccaacaccaccctgggcgaggagagacagagcagaggcgagctggaggacgagcccgccaccgtgccctgcagccagggctgggagtacgaccacagcgagttcagcagcaccatcgccaccgagtgggacctggtgtgcgagcagaagggcctgaacagagccgccagcaccttcttcttcgccggcgtgctggtgggcgccgtggccttcggctacctgagcgacagattcggcagaagaagactgctgctggtggcctacgtgagcaccctggtgctgggcctggccagcgccgccagcgtgagctacgtgatgttcgccatcaccagaaccctgaccggcagcgccctggccggcttcaccatcatcgtgatgcccctggagctggagtggctggacgtggagcacagaaccgtggccggcgtgctgagcagcaccttctggaccggcggcgtgatgctgctggccctggtgggctacctgatcagagactggagatggctgctgctggccgtgaccctgccctgcgcccccggcatcctgagcctgtggtgggtgcccgagagcgccagatggctgctgacccagggccacgtgaaggaggcccacagatacctgctgcactgcgccagactgaacggcagacccgtgtgcgaggacagcttcagccaggaggccgtgagcaaggtggccgccggcgagagagtggtgagaagacccagctacctggacctgttcagaacccccagactgagacacatcagcctgtgctgcgtggtggtgtggttcggcgtgaacttcagctactacggcctgagcctggacgtgagcggcctgggcctgaacgtgtaccagacccagctgctgttcggcgccgtggagctgcccagcaagctgctggtgtacctgagcgtgagatacgccggcagaagactgacccaggccggcaccctgctgggcaccgccctggccttcggcaccagactgctggtgagcagcgacatgaagagctggagcaccgtgctggccgtgatgggcaaggccttcagcgaggccgccttcaccaccgcctacctgttcaccagcgagctgtaccccaccgtgctgagacagaccggcatgggcctgaccgccctggtgggcagactgggcggcagcctggcccccctggccgccctgctggacggcgtgtggctgagcctgcccaagctgacctacggcggcatcgccctgctggccgccggcaccgccctgctgctgcccgagaccagacaggcccagctgcccgagaccatccaggacgtggagagaaagagatgcgtgcacagaaccgtgagcgtgtacgtgtag

SEQ ID NO: 99570 - DNA, 1647 bp, synthetic construct
  misc_feature 1..1647: note = Description of Artificial Sequence: Synthetic coding sequence
  source 1..1647: mol_type = other DNA
atgggcttcgaggagctgctggagcaggtgggcggcttcggccccttccagctgagaaacgtggccctgctggccctgcccagagtgctgctgcccctgcacttcctgctgcccatcttcctggccgccgtgcccgcccacagatgcgccctgcccggcgcccccgccaacttcagccaccaggacgtgtggctggaggcccacctgcccagagagcccgacggcaccctgagcagctgcctgagattcgcctacccccaggccctgcccaacaccaccctgggcgaggagagacagagcagaggcgagctggaggacgagcccgccaccgtgccctgcagccagggctgggagtacgaccacagcgagttcagcagcaccatcgccaccgagagccagtgggacctggtgtgcgagcagaagggcctgaacagagccgccagcaccttcttcttcgccggcgtgctggtgggcgccgtggccttcggctacctgagcgacagattcggcagaagaagactgctgctggtggcctacgtgagcaccctggtgctgggcctggccagcgccgccagcgtgagctacgtgatgttcgccatcaccagaaccctgaccggcagcgccctggccggcttcaccatcatcgtgatgcccctggagctggagtggctggacgtggagcacagaaccgtggccggcgtgctgagcagcaccttctggaccggcggcgtgatgctgctggccctggtgggctacctgatcagagactggagatggctgctgctggccgtgaccctgccctgcgcccccggcatcctgagcctgtggtgggtgcccgagagcgccagatggctgctgacccagggccacgtgaaggaggcccacagatacctgctgcactgcgccagactgaacggcagacccgtgtgcgaggacagcttcagccaggaggccgtgagcaaggtggccgccggcgagagagtggtgagaagacccagctacctggacctgttcagaacccccagactgagacacatcagcctgtgctgcgtggtggtgtggttcggcgtgaacttcagctactacggcctgagcctggacgtgagcggcctgggcctgaacgtgtaccagacccagctgctgttcggcgccgtggagctgcccagcaagctgctggtgtacctgagcgtgagatacgccggcagaagactgacccaggccggcaccctgctgggcaccgccctggccttcggcaccagactgctggtgagcagcgacatgaagagctggagcaccgtgctggccgtgatgggcaaggccttcagcgaggccgccttcaccaccgcctacctgttcaccagcgagctgtaccccaccgtgctgagacagaccggcatgggcctgaccgccctggtgggcagactgggcggcagcctggcccccctggccgccctgctggacggcgtgtggctgagcctgcccaagctgacctacggcggcatcgccctgctggccgccggcaccgccctgctgctgcccgagaccagacaggcccagctgcccgagaccatccaggacgtggagagaaagagcgcccccaccagcctgcaggaggaggagatgcccatgaagcaggtgcagaactag

SEQ ID NO: 99571 - DNA, 1641 bp, synthetic construct
  misc_feature 1..1641: note = Description of Artificial Sequence: Synthetic coding sequence
  source 1..1641: mol_type = other DNA
atgggcttcgaggagctgctggagcaggtgggcggcttcggccccttccagctgagaaacgtggccctgctggccctgcccagagtgctgctgcccctgcacttcctgctgcccatcttcctggccgccgtgcccgcccacagatgcgccctgcccggcgcccccgccaacttcagccaccaggacgtgtggctggaggcccacctgcccagagagcccgacggcaccctgagcagctgcctgagattcgcctacccccaggccctgcccaacaccaccctgggcgaggagagacagagcagaggcgagctggaggacgagcccgccaccgtgccctgcagccagggctgggagtacgaccacagcgagttcagcagcaccatcgccaccgagtgggacctggtgtgcgagcagaagggcctgaacagagccgccagcaccttcttcttcgccggcgtgctggtgggcgccgtggccttcggctacctgagcgacagattcggcagaagaagactgctgctggtggcctacgtgagcaccctggtgctgggcctggccagcgccgccagcgtgagctacgtgatgttcgccatcaccagaaccctgaccggcagcgccctggccggcttcaccatcatcgtgatgcccctggagctggagtggctggacgtggagcacagaaccgtggccggcgtgctgagcagcaccttctggaccggcggcgtgatgctgctggccctggtgggctacctgatcagagactggagatggctgctgctggccgtgaccctgccctgcgcccccggcatcctgagcctgtggtgggtgcccgagagcgccagatggctgctgacccagggccacgtgaaggaggcccacagatacctgctgcactgcgccagactgaacggcagacccgtgtgcgaggacagcttcagccaggaggccgtgagcaaggtggccgccggcgagagagtggtgagaagacccagctacctggacctgttcagaacccccagactgagacacatcagcctgtgctgcgtggtggtgtggttcggcgtgaacttcagctactacggcctgagcctggacgtgagcggcctgggcctgaacgtgtaccagacccagctgctgttcggcgccgtggagctgcccagcaagctgctggtgtacctgagcgtgagatacgccggcagaagactgacccaggccggcaccctgctgggcaccgccctggccttcggcaccagactgctggtgagcagcgacatgaagagctggagcaccgtgctggccgtgatgggcaaggccttcagcgaggccgccttcaccaccgcctacctgttcaccagcgagctgtaccccaccgtgctgagacagaccggcatgggcctgaccgccctggtgggcagactgggcggcagcctggcccccctggccgccctgctggacggcgtgtggctgagcctgcccaagctgacctacggcggcatcgccctgctggccgccggcaccgccctgctgctgcccgagaccagacaggcccagctgcccgagaccatccaggacgtggagagaaagagcgcccccaccagcctgcaggaggaggagatgcccatgaagcaggtgcagaactag

SEQ ID NO: 99572 - DNA, 636 bp, synthetic construct
  misc_feature 1..636: note = Description of Artificial Sequence: Synthetic coding sequence
  source 1..636: mol_type = other DNA
atgctgcagccccacctgctgccctaccaggccgtgagcaaggtggccgccggcgagagagtggtgagaagacccagctacctggacctgttcagaacccccagactgagacacatcagcctgtgctgcgtggtggtgtggttcggcgtgaacttcagctactacggcctgagcctggacgtgagcggcctgggcctgaacgtgtaccagacccagctgctgttcggcgccgtggagctgcccagcaagctgctggtgtacctgagcgtgagatacgccggcagaagactgacccaggccggcaccctgctgggcaccgccctggccttcggcaccagactgctggtgagcagcgacatgaagagctggagcaccgtgctggccgtgatgggcaaggccttcagcgaggccgccttcaccaccgcctacctgttcaccagcgagctgtaccccaccgtgctgagacagaccggcatgggcctgaccgccctggtgggcagactgggcggcagcctggcccccctggccgccctgctggacggcgtgtggctgagcctgcccaagctgacctacggcggcatcgccctgctggccgccggcaccgccctgctgctgcccgagaccagacaggcctag

SEQ ID NO: 99573 - DNA, 837 bp, synthetic construct
  misc_feature 1..837: note = Description of Artificial Sequence: Synthetic coding sequence
  source 1..837: mol_type = other DNA
atgggcttcgaggagctgctggagcaggtgggcggcttcggccccttccagctgagaaacgtggccctgctggccctgcccagagtgctgctgcccctgcacttcctgctgcccatcttcctggccgccgtgcccgcccacagatgcgccctgcccggcgcccccgccaacttcagccaccaggacgtgtggctggaggcccacctgcccagagagcccgacggcaccctgagcagctgcctgagattcgcctacccccaggccctgcccaacaccaccctgggcgaggagagacagagcagaggcgagctggaggacgagcccgccaccgtgccctgcagccagggctgggagtacgaccacagcgagttcagcagcaccatcgccaccgagagccaggtgggcatctacatcatccacctggaggtggagtgcagatggagacagagcccctgggaggccgccggcagaggcctgccctgggaggaggccgaggccgccggcctgggcagagacaaggtgagctacagccccagctggagagagagcctgggcggcctgctgagcggcatggagtgggacctggtgtgcgagcagaagggcctgaacagagccgccagcaccttcttcttcgccggcgtgctggtgggcgccgtggccttcggctacctgagcgacagattcggcagaagaagactgctgctggtggcctacgtgagcaccctggtgctgggcctggccagcgccgccagcgtgagctacgtgatgttcgccatcaccagaaccctgaccggcagcgccctggccggcttcaccatcatcgtgatgcccctgtag

SEQ ID NO: 99574 - DNA, 444 bp, synthetic construct
  misc_feature 1..444: note = Description of Artificial Sequence: Synthetic coding sequence
  source 1..444: mol_type = other DNA
atggagtgggacctggtgtgcgagcagaagggcctgaacagagccgccagcaccttcttcttcgccggcgtgctggtgggcgccgtggccttcggctacctgagcgacagattcggcagaagaagactgctgctggtggcctacgtgagcaccctggtgctgggcctggccagcgccgccagcgtgagctacgtgatgttcgccatcaccagaaccctgaccggcagcgccctggccggcttcaccatcatcgtgatgcccctgggcgaggccgagctggagtggctggacgtggagcacagaaccgtggccggcgtgctgagcagcaccttctggaccggcggcgtgatgctgctggccctggtgggctacctgatcagagactggagatggctgctgctggccgtgaccctgccctgcgcccccggcatcctgagcctgtag

SEQ ID NO: 99575 - DNA, 1629 bp, synthetic construct
  misc_feature 1..1629: note = Description of Artificial Sequence: Synthetic coding sequence
  source 1..1629: mol_type = other DNA
atgaccttcagcgagatcctggacagagtgggcagcatgggccacttccagttcctgcacgtggccatcctgggcctgcccatcctgaacatggccaaccacaacctgctgcagatcttcaccgccgccacccccgtgcaccactgcagacccccccacaacgccagcaccggcccctgggtgctgcccatgggccccaacggcaagcccgagagatgcctgagattcgtgcacccccccaacgccagcctgcccaacgacacccagagagccatggagccctgcctggacggctgggtgtacaacagcaccaaggacagcatcgtgaccgagtgggacctggtgtgcaacagcaacaagctgaaggagatggcccagagcatcttcatggccggcatcctgatcggcggcctggtgctgggcgacctgagcgacagattcggcagaagacccatcctgacctgcagctacctgctgctggccgccagcggcagcggcgccgccttcagccccaccttccccatctacatggtgttcagattcctgtgcggcttcggcatcagcggcatcaccctgagcaccgtgatcctgaacgtggagtgggtgcccaccagaatgagagccatcatgagcaccgccctgggctactgctacaccttcggccagttcatcctgcccggcctggcctacgccatcccccagtggagatggctgcagctgaccgtgagcatccccttcttcgtgttcttcctgagcagctggtggacccccgagagcatcagatggctggtgctgagcggcaagagcagcaaggccctgaagatcctgagaagagtggccgtgttcaacggcaagaaggaggagggcgagagactgagcctggaggagctgaagctgaacctgcagaaggagatcagcctggccaaggccaagtacaccgccagcgacctgttcagaatccccatgctgagaagaatgaccttctgcctgagcctggcctggttcgccaccggcttcgcctactacagcctggccatgggcgtggaggagttcggcgtgaacctgtacatcctgcagatcatcttcggcggcgtggacgtgcccgccaagttcatcaccatcctgagcctgagctacctgggcagacacaccacccaggccgccgccctgctgctggccggcggcgccatcctggccctgaccttcgtgcccctggacctgcagaccgtgagaaccgtgctggccgtgttcggcaagggctgcctgagcagcagcttcagctgcctgttcctgtacaccagcgagctgtaccccaccgtgatcagacagaccggcatgggcgtgagcaacctgtggaccagagtgggcagcatggtgagccccctggtgaagatcaccggcgaggtgcagcccttcatccccaacatcatctacggcatcaccgccctgctgggcggcagcgccgccctgttcctgcccgagaccctgaaccagcccctgcccgagaccatcgaggacctggagaactggagcctgagagccaagaagcccaagcaggagcccgaggtggagaaggccagccagagaatccccctgcagccccacggccccggcctgggcagcagctag

SEQ ID NO: 99576 - DNA, 1629 bp, synthetic construct; identical to SEQ ID NO: 99575
  misc_feature 1..1629: note = Description of Artificial Sequence: Synthetic coding sequence
  source 1..1629: mol_type = other DNA

SEQ ID NO: 99577 - DNA, 1587 bp, synthetic construct
  misc_feature 1..1587: note = Description of Artificial Sequence: Synthetic coding sequence
  source 1..1587: mol_type = other DNA
atgaccttcagcgagatcctggacagagtgggcagcatgggccacttccagttcctgcacgtggccatcctgggcctgcccatcctgaacatggccaaccactgcagacccccccacaacgccagcaccggcccctgggtgctgcccatgggccccaacggcaagcccgagagatgcctgagattcgtgcacccccccaacgccagcctgcccaacgacacccagagagccatggagccctgcctggacggctgggtgtacaacagcaccaaggacagcatcgtgaccgagtgggacctggtgtgcaacagcaacaagctgaaggagatggcccagagcatcttcatggccggcatcctgatcggcggcctggtgctgggcgacctgagcgacagattcggcagaagacccatcctgacctgcagctacctgctgctggccgccagcggcagcggcgccgccttcagccccaccttccccatctacatggtgttcagattcctgtgcggcttcggcatcagcggcatcaccctgagcaccgtgatcctgaacgtggagtgggtgcccaccagaatgagagccatcatgagcaccgccctgggctactgctacaccttcggccagttcatcctgcccggcctggcctacgccatcccccagtggagatggctgcagctgaccgtgagcatccccttcttcgtgttcttcctgagcagctggtggacccccgagagcatcagatggctggtgctgagcggcaagagcagcaaggccctgaagatcctgagaagagtggccgtgttcaacggcaagaaggaggagggcgagagactgagcctggaggagctgaagctgaacctgcagaaggagatcagcctggccaaggccaagtacaccgccagcgacctgttcagaatccccatgctgagaagaatgaccttctgcctgagcctggcctggttcgccaccggcttcgcctactacagcctggccatgggcgtggaggagttcggcgtgaacctgtacatcctgcagatcatcttcggcggcgtggacgtgcccgccaagttcatcaccatcctgagcctgagctacctgggcagacacaccacccaggccgccgccctgctgctggccggcggcgccatcctggccctgaccttcgtgcccctggacctgcagaccgtgagaaccgtgctggccgtgttcggcaagggctgcctgagcagcagcttcagctgcctgttcctgtacaccagcgagctgtaccccaccgtgatcagacagaccggcatgggcgtgagcaacctgtggaccagagtgggcagcatggtgagccccctggtgaagatcaccggcgaggtgcagcccttcatccccaacatcatctacggcatcaccgccctgctgggcggcagcgccgccctgttcctgcccgagaccctgaaccagcccctgcccgagaccatcgaggacctggagaactggagcctgagagccaagaagcccaagcaggagcccgaggtggagaaggccagccagagaatccccctgcagccccacggccccggcctgggcagcagctag

SEQ ID NO: 99578 - DNA, 1653 bp, synthetic construct
  misc_feature 1..1653: note = Description of Artificial Sequence: Synthetic coding sequence
  source 1..1653: mol_type = other DNA
atggccttcagcaagctgctggagcaggccggcggcgtgggcctgttccagaccctgcaggtgctgaccttcatcctgccctgcctgatgatccccagccagatgctgctggagaacttcagcgccgccatccccggccacagatgctggacccacatgctggacaacggcagcgccgtgagcaccaacatgacccccaaggccctgctgaccatcagcatcccccccggccccaaccagggcccccaccagtgcagaagattcagacagccccagtggcagctgctggaccccaacgccaccgccaccagctggagcgaggccgacaccgagccctgcgtggacggctgggtgtacgacagaagcgtgttcaccagcaccatcgtggccaagtgggacctggtgtgcagcagccagggcctgaagcccctgagccagagcatcttcatgagcggcatcctggtgggcagcttcatctggggcctgctgagctacagattcggcagaaagcccatgctgagctggtgctgcctgcagctggccgtggccggcaccagcaccatcttcgcccccaccttcgtgatctactgcggcctgagattcgtggccgccttcggcatggccggcatcttcctgagcagcctgaccctgatggtggagtggaccaccaccagcagaagagccgtgaccatgaccgtggtgggctgcgccttcagcgccggccaggccgccctgggcggcctggccttcgccctgagagactggagaaccctgcagctggccgccagcgtgcccttcttcgccatcagcctgatcagctggtggctgcccgagagcgccagatggctgatcatcaagggcaagcccgaccaggccctgcaggagctgagaaaggtggccagaatcaacggccacaaggaggccaagaacctgaccatcgaggtgctgatgagcagcgtgaaggaggaggtggccagcgccaaggagcccagaagcgtgctggacctgttctgcgtgcccgtgctgagatggagaagctgcgccatgctggtggtgaacttcagcctgctgatcagctactacggcctggtgttcgacctgcagagcctgggcagagacatcttcctgctgcaggccctgttcggcgccgtggacttcctgggcagagccaccaccgccctgctgctgagcttcctgggcagaagaaccatccaggccggcagccaggccatggccggcctggccatcctggccaacatgctggtgccccaggacctgcagaccctgagagtggtgttcgccgtgctgggcaagggctgcttcggcatcagcctgacctgcctgaccatctacaaggccgagctgttccccacccccgtgagaatgaccgccgacggcatcctgcacaccgtgggcagactgggcgccatgatgggccccctgatcctgatgagcagacaggccctgcccctgctgccccccctgctgtacggcgtgatcagcatcgccagcagcctggtggtgctgttcttcctgcccgagacccagggcctgcccctgcccgacaccatccaggacctggagagccagaagagcaccgccgcccagggcaacagacaggaggccgtgaccgtggagagcaccagcctgtag

SEQ ID NO: 99579 - DNA, 1338 bp, synthetic construct
  misc_feature 1..1338: note = Description of Artificial Sequence: Synthetic coding sequence
  source 1..1338: mol_type = other DNA
atggccttcagcgagctgctggacctggtgggcggcctgggcagattccaggtgctgcagaccatggccctgatggtgagcatcatgtggctgtgcacccagagcatgctggagaacttcagcgccgccgtgcccagccacagatgctgggcccccctgctggacaacagcaccgcccaggccagcatcctgggcagcctgagccccgaggccctgctggccatcagcatcccccccggccccaaccagagaccccaccagtgcagaagattcagacagccccagtggcagctgctggaccccaacgccaccgccaccagctggagcgaggccgacaccgagccctgcgtggacggctgggtgtacgacagaagcatcttcaccagcaccatcgtggccaagtggaacctggtgtgcgacagccacgccctgaagcccatggcccagagcatctacctggccggcatcctggtgggcgccgccgcctgcggccccgccagcgacagatggctggccgagagcgccagatggctgctgaccaccggcagactggactggggcctgcaggagctgtggagagtggccgccatcaacggcaagggcgccgtgcaggacaccctgacccccgaggtgctgctgagcgccatgagagaggagctgagcatgggccagccccccgccagcctgggcaccctgctgagaatgcccggcctgagattcagaacctgcatcagcaccctgtgctggttcgccttcggcttcaccttcttcggcctggccctggacctgcaggccctgggcagcaacatcttcctgctgcagatgttcatcggcgtggtggacatccccgccaagatgggcgccctgctgctgctgagccacctgggcagaagacccaccctggccgccagcctgctgctggccggcctgtgcatcctggccaacaccctggtgccccacgagatgggcgccctgagaagcgccctggccgtgctgggcctgggcggcgtgggcgccgccttcacctgcatcaccatctacagcagcgagctgttccccaccgtgctgagaatgaccgccgtgggcctgggccagatggccgccagaggcggcgccatcctgggccccctggtgagactgctgggcgtgcacggcccctggctgcccctgctggtgtacggcaccgtgcccgtgctgagcggcctggccgccctgctgctgcccgagacccagagcctgcccctgcccgacaccatccaggacgtgcagaaccaggccgtgaagaaggccacccacggcaccctgggcaacagcgtgctgaagagcacccagttctag

SEQ ID NO: 99580 - DNA, 1662 bp, synthetic construct
  misc_feature 1..1662: note = Description of Artificial Sequence: Synthetic coding sequence
  source 1..1662: mol_type = other DNA
atggccttcagcgagctgctggacctggtgggcggcctgggcagattccaggtgctgcagaccatggccctgatggtgagcatcatgtggctgtgcacccagagcatgctggagaacttcagcgccgccgtgcccagccacagatgctgggcccccctgctggacaacagcaccgcccaggccagcatcctgggcagcctgagccccgaggccctgctggccatcagcatcccccccggccccaaccagagaccccaccagtgcagaagattcagacagccccagtggcagctgctggaccccaacgccaccgccaccagctggagcgaggccgacaccgagccctgcgtggacggctgggtgtacgacagaagcatcttcaccagcaccatcgtggccaagtggaacctggtgtgcgacagccacgccctgaagcccatggcccagagcatctacctggccggcatcctggtgggcgccgccgcctgcggccccgccagcgacagattcggcagaagactggtgctgacctggagctacctgcagatggccgtgatgggcaccgccgccgccttcgcccccgccttccccgtgtactgcctgttcagattcctgctggccttcgccgtggccggcgtgatgatgaacaccggcaccctgctgatggagtggaccgccgccagagccagacccctggtgatgaccctgaacagcctgggcttcagcttcggccacggcctgaccgccgccgtggcctacggcgtgagagactggaccctgctgcagctggtggtgagcgtgcccttcttcctgtgcttcctgtacagctggtggctggccgagagcgccagatggctgctgaccaccggcagactggactggggcctgcaggagctgtggagagtggccgccatcaacggcaagggcgccgtgcaggacaccctgacccccgaggtgctgctgagcgccatgagagaggagctgagcatgggccagccccccgccagcctgggcaccctgctgagaatgcccggcctgagattcagaacctgcatcagcaccctgtgctggttcgccttcggcttcaccttcttcggcctggccctggacctgcaggccctgggcagcaacatcttcctgctgcagatgttcatcggcgtggtggacatccccgccaagatgggcgccctgctgctgctgagccacctgggcagaagacccaccctggccgccagcctgctgctggccggcctgtgcatcctggccaacaccctggtgccccacgagatgggcgccctgagaagcgccctggccgtgctgggcctgggcggcgtgggcgccgccttcacctgcatcaccatctacagcagcgagctgttccccaccgtgctgagaatgaccgccgtgggcctgggccagatggccgccagaggcggcgccatcctgggccccctggtgagactgctgggcgtgcacggcccctggctgcccctgctggtgtacggcaccgtgcccgtgctgagcggcctggccgccctgctgctgcccgagacccagagcctgcccctgcccgacaccatccaggacgtgcagaaccaggccgtgaagaaggccacccacggcaccctgggcaacagcgtgctgaagagcacccagttctag

SEQ ID NO: 99581 - DNA, 999 bp, synthetic construct
  misc_feature 1..999: note = Description of Artificial Sequence: Synthetic coding sequence
  source 1..999: mol_type = other DNA
atggagtggaccgccgccagagccagacccctggtgatgaccctgaacagcctgggcttcagcttcggccacggcctgaccgccgccgtggcctacggcgtgagagactggaccctgctgcagctggtggtgagcgtgcccttcttcctgtgcttcctgtacagctggtggctggccgagagcgccagatggctgctgaccaccggcagactggactggggcctgcaggagctgtggagagtggccgccatcaacggcaagggcgccgtgcaggacaccctgacccccgaggtgctgctgagcgccatgagagaggagctgagcatgggccagccccccgccagcctgggcaccctgctgagaatgcccggcctgagattcagaacctgcatcagcaccctgtgctggttcgccttcggcttcaccttcttcggcctggccctggacctgcaggccctgggcagcaacatcttcctgctgcagatgttcatcggcgtggtggacatccccgccaagatgggcgccctgctgctgctgagccacctgggcagaagacccaccctggccgccagcctgctgctggccggcctgtgcatcctggccaacaccctggtgccccacgagatgggcgccctgagaagcgccctggccgtgctgggcctgggcggcgtgggcgccgccttcacctgcatcaccatctacagcagcgagctgttccccaccgtgctgagaatgaccgccgtgggcctgggccagatggccgccagaggcggcgccatcctgggccccctggtgagactgctgggcgtgcacggcccctggctgcccctgctggtgtacggcaccgtgcccgtgctgagcggcctggccgccctgctgctgcccgagacccagagcctgcccctgcccgacaccatccaggacgtgcagaaccaggccgtgaagaaggccacccacggcaccctgggcaacagcgtgctgaagagcacccagttctag

SEQ ID NO: 99582 - DNA, 1665 bp, synthetic construct
  misc_feature 1..1665: note = Description of Artificial Sequence: Synthetic coding sequence
  source 1..1665: mol_type = other DNA
atgcccaccgtggacgacatcctggagcaggtgggcgagagcggctggttccagaagcaggccttcctgatcctgtgcctgctgagcgccgccttcgcccccatctgcgtgggcatcgtgttcctgggcttcacccccgaccaccactgccagagccccggcgtggccgagctgagccagagatgcggctggagccccgccgaggagctgaactacaccgtgcccggcctgggccccgccggcgaggccttcctgggccagtgcagaagatacgaggtggactggaaccagagcgccctgagctgcgtggaccccctggccagcctggccaccaacagaagccacctgcccctgggcccctgccaggacggctgggtgtacgacacccccggcagcagcatcgtgaccgagttcaacctggtgtgcgccgacagctggaagctggacctgttccagagctgcctgaacgccggcttcctgttcggcagcctgggcgtgggctacttcgccgacagattcggcagaaagctgtgcctgctgggcaccgtgctggtgaacgccgtgagcggcgtgctgatggccttcagccccaactacatgagcatgctgctgttcagactgctgcagggcctggtgagcaagggcaactggatggccggctacaccctgatcaccgagttcgtgggcagcggcagcagaagaaccgtggccatcatgtaccagatggccttcaccgtgggcctggtggccctgaccggcctggcctacgccctgccccactggagatggctgcagctggccgtgagcctgcccaccttcctgttcctgctgtactactggtgcgtgcccgagagccccagatggctgctgagccagaagagaaacaccgaggccatcaagatcatggaccacatcgcccagaagaacggcaagctgccccccgccgacctgaagatgctgagcctggaggaggacgtgaccgagaagctgagccccagcttcgccgacctgttcagaacccccagactgagaaagagaaccttcatcctgatgtacctgtggttcaccgacagcgtgctgtaccagggcctgatcctgcacatgggcgccaccagcggcaacctgtacctggacttcctgtacagcgccctggtggagatccccggcgccttcatcgccctgatcaccatcgacagagtgggcagaatctaccccatggccatgagcaacctgctggccggcgccgcctgcctggtgatgatcttcatcagccccgacctgcactggctgaacatcatcatcatgtgcgtgggcagaatgggcatcaccatcgccatccagatgatctgcctggtgaacgccgagctgtaccccaccttcgtgagaaacctgggcgtgatggtgtgcagcagcctgtgcgacatcggcggcatcatcacccccttcatcgtgttcagactgagagaggtgtggcaggccctgcccctgatcctgttcgccgtgctgggcctgctggccgccggcgtgaccctgctgctgcccgagaccaagggcgtggccctgcccgagaccatgaaggacgccgagaacctgggcagaaaggccaagcccaaggagaacaccatctacctgaaggtgcagaccagcgagcccagcggcacctag

SEQ ID NO: 99583 - DNA, 1005 bp, synthetic construct
  misc_feature 1..1005: note = Description of Artificial Sequence: Synthetic coding sequence
  source 1..1005: mol_type = other DNA
atgttcttcctgctggccctgctgagcgccaccttcgcccccatctacgtgggcatcgtgttcctgggcttcacccccgaccacagatgcagaagccccggcgtggccgagctgagcctgagatgcggctggagccccgccgaggagctgaactacaccgtgcccggccccggccccgccggcgaggccagccccagacagtgcagaagatacgaggtggactggaaccagagcaccttcgactgcgtggaccccctggccagcctggacaccaacagaagcagactgcccctgggcccctgcagagacggctgggtgtacgagacccccggcagcagcatcgtgaccgagttcaacctggtgtgcgccaacagctggatgctggacctgttccagagcagcgtgaacgtgggcttcttcatcggcagcatgagcatcggctacatcgccgacagattcggcagaaagctgtgcctgctgaccaccgtgctgatcaacgccgccgccggcgtgctgatggccatcagccccacctacacctggatgctgatcttcagactgatccagggcctggtgagcaaggccggctggctgatcggctacatcctgatcaccgagttcgtgggcagaagatacagaagaaccgtgggcatcttctaccaggtggcctacaccgtgggcctgctggtgctggccggcgtggcctacgccctgccccactggagatggctgcagttcaccgtgagcctgcccaacttcttcttcctgctgtactactggtgcatccccgagagccccagatggctgatcagccagaacaagaacgccgaggccatgagaatcatcaagcacatcgccaagaagaacggcaagagcctgcccgccagcctgcagagactgagactggaggaggagaccggcaagaagctgaaccccagcttcctggacctggtgagaaccccccagatcagaaagcacaccatgatcctgatgtacaactggtag

SEQ ID NO: 99584 - DNA, 1668 bp, synthetic construct
  misc_feature 1..1668: note = Description of Artificial Sequence: Synthetic coding sequence
  source 1..1668: mol_type = other DNA
atgcccaccaccgtggacgacgtgctggagcacggcggcgagttccacttcttccagaagcagatgttcttcctgctggccctgctgagcgccaccttcgcccccatctacgtgggcatcgtgttcctgggcttcacccccgaccacagatgcagaagccccggcgtggccgagctgagcctgagatgcggctggagccccgccgaggagctgaactacaccgtgcccggccccggccccgccggcgaggccagccccagacagtgcagaagatacgaggtggactggaaccagagcaccttcgactgcgtggaccccctggccagcctggacaccaacagaagcagactgcccctgggcccctgcagagacggctgggtgtacgagacccccggcagcagcatcgtgaccgagttcaacctggtgtgcgccaacagctggatgctggacctgttccagagcagcgtgaacgtgggcttcttcatcggcagcatgagcatcggctacatcgccgacagattcggcagaaagctgtgcctgctgaccaccgtgctgatcaacgccgccgccggcgtgctgatggccatcagccccacctacacctggatgctgatcttcagactgatccagggcctggtgagcaaggccggctggctgatcggctacatcctgatcaccgagttcgtgggcagaagatacagaagaaccgtgggcatcttctaccaggtggcctacaccgtgggcctgctggtgctggccggcgtggcctacgccctgccccactggagatggctgcagttcaccgtgagcctgcccaacttcttcttcctgctgtactactggtgcatccccgagagccccagatggctgatcagccagaacaagaacgccgaggccatgagaatcatcaagcacatcgccaagaagaacggcaagagcctgcccgccagcctgcagagactgagactggaggaggagaccggcaagaagctgaaccccagcttcctggacctggtgagaaccccccagatcagaaagcacaccatgatcctgatgtacaactggttcaccagcagcgtgctgtaccagggcctgatcatgcacatgggcctggccggcgacaacatctacctggacttcttctacagcgccctggtggagttccccgccgccttcatgatcatcctgaccatcgacagaatcggcagaagatacccctgggccgccagcaacatggtggccggcgccgcctgcctggccagcgtgttcatccccggcgacctgcagtggctgaagatcatcatcagctgcctgggcagaatgggcatcaccatggcctacgagatcgtgtgcctggtgaacgccgagctgtaccccaccttcatcagaaacctgggcgtgcacatctgcagcagcatgtgcgacatcggcggcatcatcacccccttcctggtgtacagactgaccaacatctggctggagctgcccctgatggtgttcggcgtgctgggcctggtggccggcggcctggtgctgctgctgcccgagaccaagggcaaggccctgcccgagaccatcgaggaggccgagaacatgcagagacccagaaagaacaaggagaagatgatctacctgcaggtgcagaagctggacatccccctgaactag

SEQ ID NO: 99585 - DNA, 1632 bp, synthetic construct
  misc_feature 1..1632: note = Description of Artificial Sequence: Synthetic coding sequence
  source 1..1632: mol_type = other DNA
atgagaaccctgcacgccgtgagccacccctacagcaacagcatgagattccagagagtgctgtacttcatctgcgccttccagaacatcagctgcggcatccactacctggccagcgtgttcatgggcgtgaccccccaccacgtgtgcagaccccccggcaacctgcagaacggcgagatctgggagctgagcagatgcagcagaaacaagagagagaacaccagcagcctgggctacgagtacaccggcagcaagaaggagttcccctgcgtggacggctacatctacgaccagaacacctggaagagcaccgccgtgacccagtggaacctggtgtgcgacagaaagtggctggccatgctgatccagcccctgttcatgttcggcgtgctgctgggcagcgtgaccttcggctacttcagcgacagactgggcagaagagtggtgctgtgggccaccagcagcagcatgttcctgttcggcatcgccgccgccttcgccgtggactactacaccttcatggccgccagattcttcctggccatggtggccagcggctacctggtggtgggcttcgtgtacgtgatggagttcatcggcatgaagagcagaacctgggccagcgtgcacctgcacagcttcttcgccgtgggcaccctgctggtggccctgaccggctacctggtgagaacctggtggctgtaccagatgatcctgagcaccgtgaccgtgcccttcatcctgtgctgctgggtgctgcccgagacccccttctggctgctgagcgagggcagatacgaggaggcccagaagatcgtggacatcatggccaagtggaacagagccagcagctgcaagctgagcgagctgctgagcctggacctgcagggccccgtgagcaacagccccaccgaggtgcagaagcacaacctgagctacctgttctacaactggagcatcaccaagagaaccctgaccgtgtggctgatctggttcaccggcagcctgggcttctacagcttcagcctgaacagcgtgaacctgggcggcaacgagtacctgaacctgttcctgctgggcgtggtggagatccccgcctacaccttcgtgtgcatcgccatggacaaggtgggcagaagaaccgtgctggcctacagcctgttctgcagcgccctggcctgcggcgtggtgatggtgatcccccagaagcactacatcctgggcgtggtgaccgccatggtgggcaagttcgccatcggcgccgccttcggcctgatctacctgtacaccgccgagctgtaccccaccatcgtgagaagcctggccgtgggcagcggcagcatggtgtgcagactggccagcatcctggcccccttcagcgtggacctgagcagcatctggatcttcatcccccagctgttcgtgggcaccatggccctgctgagcggcgtgctgaccctgaagctgcccgagaccctgggcaagagactggccaccacctgggaggaggccgccaagctggagagcgagaacgagagcaagagcagcaagctgctgctgaccaccaacaacagcggcctggagaagaccgaggccatcacccccagagacagcggcctgggcgagtag

SEQ ID NO: 99586 - DNA, 1734 bp, synthetic construct
  misc_feature 1..1734: note = Description of Artificial Sequence: Synthetic coding sequence
  source 1..1734: mol_type = other DNA
atgggcagcagacacttcgagggcatctacgaccacgtgggccacttcggcagattccagagagtgctgtacttcatctgcgccttccagaacatcagctgcggcatccactacctggccagcgtgttcatgggcgtgaccccccaccacgtgtgcagaccccccggcaacgtgagccaggtggtgttccacaaccacagcaactggagcctggaggacaccggcgccctgctgagcagcggccagaaggactacgtgaccgtgcagctgcagaacggcgagatctgggagctgagcagatgcagcagaaacaagagagagaacaccagcagcctgggctacgagtacaccggcagcaagaaggagttcccctgcgtggacggctacatctacgaccagaacacctggaagagcaccgccgtgacccagtggaacctggtgtgcgacagaaagtggctggccatgctgatccagcccctgttcatgttcggcgtgctgctgggcagcgtgaccttcggctacttcagcgacagactgggcagaagagtggtgctgtgggccaccagcagcagcatgttcctgttcggcatcgccgccgccttcgccgtggactactacaccttcatggccgccagattcttcctggccatggtggccagcggctacctggtggtgggcttcgtgtacgtgatggagttcatcggcatgaagagcagaacctgggccagcgtgcacctgcacagcttcttcgccgtgggcaccctgctggtggccctgaccggctacctggtgagaacctggtggctgtaccagatgatcctgagcaccgtgaccgtgcccttcatcctgtgctgctgggtgctgcccgagacccccttctggctgctgagcgagggcagatacgaggaggcccagaagatcgtggacatcatggccaagtggaacagagccagcagctgcaagctgagcgagctgctgagcctggacctgcagggccccgtgagcaacagccccaccgaggtgcagaagcacaacctgagctacctgttctacaactggagcatcaccaagagaaccctgaccgtgtggctgatctggttcaccggcagcctgggcttctacagcttcagcctgaacagcgtgaacctgggcggcaacgagtacctgaacctgttcctgctgggcgtggtggagatccccgcctacaccttcgtgtgcatcgccatggacaaggtgggcagaagaaccgtgctggcctacagcctgttctgcagcgccctggcctgcggcgtggtgatggtgatcccccagaagcactacatcctgggcgtggtgaccgccatggtgggcaagttcgccatcggcgccgccttcggcctgatctacctgtacaccgccgagctgtaccccaccatcgtgagaagcctggccgtgggcagcggcagcatggtgtgcagactggccagcatcctggcccccttcagcgtggacctgagcagcatctggatcttcatcccccagctgttcgtgggcaccatggccctgctgagcggcgtgctgaccctgaagctgcccgagaccctgggcaagagactggccaccacctgggaggaggccgccaagctggagagcgagaacgagagcaagagcagcaagctgctgctgaccaccaacaacagcggcctggagaagaccgaggccatcacccccagagacagcggcctgggcgagtag

SEQ ID NO: 99587 - DNA, 525 bp, synthetic construct
  misc_feature 1..525: note = Description of Artificial Sequence: Synthetic coding sequence
  source 1..525: mol_type = other DNA
atgggcgtgaccccccaccacgtgtgcagaccccccggcaacgtgagccaggtggtgttccacaaccacagcaactggagcctggaggacaccggcgccctgctgagcagcggccagaaggactacgtgaccgtgcagctgcagaacggcgagatctgggagctgagcagatgcagcagaaacaagagagagaacaccagcagcctgggctacgagtacaccggcagcaagaaggagttcccctgcgtggacggctacatctacgaccagaacacctggaagagcaccgccgtgacccagtggaacctggtgtgcgacagaaagtggctggccatgctgatccagcccctgttcatgttcggcgtgctgctgggcagcgtgaccttcggctacttcagcgacagactgggcagaagagtggtgctgtgggccaccagcagcagcatgttcctgttcggcatcgccgccgccttcgccgtggactactacaccttcatggccgccagattcttcctggccatgtag

SEQ ID NO: 99588 - DNA, 804 bp, synthetic construct
  misc_feature 1..804: note = Description of Artificial Sequence: Synthetic coding sequence
  source 1..804: mol_type = other DNA
atgagcgccggcccccaggccatgctgggcagaagagtggtgctgtgggccaccagcagcagcatgttcctgttcggcatcgccgccgccttcgccgtggactactacaccttcatggccgccagattcttcctggccatggtggccagcggctacctggtggtgggcttcgtgtacgtgatggagttcatcggcatgaagagcagaacctgggccagcgtgcacctgcacagcttcttcgccgtgggcaccctgctggtggccctgaccggctacctggtgagaacctggtggctgtaccagatgatcctgagcaccgtgaccgtgcccttcatcctgtgctgctgggtgctgcccgagacccccttctggctgctgagcgagggcagatacgaggaggcccagaagatcgtggacatcatggccaagtggaacagagccagcagctgcaagctgagcgagctgctgagcctggacctgcagggccccgtgagcaacagccccaccgaggtgcagaagcacaacctgagctacctgttctacaactggagcatcaccaagagaaccctgaccgtgtggctgatctggttcaccggcagcctgggcttctacagcttcagcctgaacagcgtgaacctgggcggcaacgagtacctgaacctgttcctgctgggcgtggtggagatccccgcctacaccttcgtgtgcatcgccatggacaaggtgggcagaagaaccgtgctggcctacagcctgttctgcagcgccctggcctgcggcgtggtgatggtgatcccccagtag

SEQ ID NO: 99589 - DNA, 1056 bp, synthetic construct
  misc_feature 1..1056: note = Description of Artificial Sequence: Synthetic coding sequence
  source 1..1056: mol_type = other DNA
atgggcgtgaccccccaccacgtgtgcagaccccccggcaacgtgagccaggtggtgttccacaaccacagcaactggagcctggaggacaccggcgccctgctgagcagcggccagaaggactacgtgaccgtgcagctgcagaacggcgagatctgggagctgagcagatgcagcagaaacaagagagagaacaccagcagcctgggctacgagtacaccggcagcaagaaggagttcccctgcgtggacggctacatctacgaccagaacacctggaagagcaccgccgtgacccagtggaacctggtgtgcgacagaaagtggctggccatgctgatccagcccctgttcatgttcggcgtgctgctgggcagcgtgaccttcggctacttcagcgacagactgggcagaagagtggtgctgtgggccaccagcagcagcatgttcctgttcggcatcgccgccgccttcgccgtggactactacaccttcatggccgccagattcttcctggccatggtggccagcggctacctggtggtgggcttcgtgtacgtgatggagttcatcggcatgaagagcagaacctgggccagcgtgcacctgcacagcttcttcgccgtgggcaccctgctggtggccctgaccggctacctggtgagaacctggtggctgtaccagatgatcctgagcaccgtgaccgtgcccttcatcctgtgctgctgggtgctgcccgagacccccttctggctgctgagcgagggcagatacgaggaggcccagaagatcgtggacatcatggccaagtggaacagagccagcagctgcaagctgagcgagctgctgagcctggacctgcagggccccgtgagcaacagccccaccgaggtgcagaagcacaacctgagctacctgttctacaactggagcatcaccaagagaaccctgaccgtgtggctgatctggttcaccggcagcctgggcttctacagcttcagcctgaacagcgtgaacctgggcggcaacgagtacctgaacctgttcctgctgtag

SEQ ID NO: 99590 - DNA, 1548 bp, synthetic construct
  misc_feature 1..1548: note = Description of Artificial Sequence: Synthetic coding sequence
  source 1..1548: mol_type = other DNA
atgggcagcagacacttcgagggcatctacgaccacgtgggccacttcggcagattccagagagtgctgtacttcatctgcgccttccagaacatcagctgcggcatccactacctggccagcgtgttcatgggcgtgaccccccaccacgtgtgcagaccccccggcaacgtgagccaggtggtgttccacaaccacagcaactggagcctggaggacaccggcgccctgctgagcagcggccagaaggactacgtgaccgtgcagctgcagaacggcgagatctgggagctgagcagatgcagcagaaacaagagagagaacaccagcagcctgggctacgagtacaccggcagcaagaaggagttcccctgcgtggacggctacatctacgaccagaacacctggaagagcaccgccgtgacccagtggaacctggtgtgcgacagaaagtggctggccatgctgatccagcccctgttcatgttcggcgtgctgctgggcagcgtgaccttcggctacttcagcgacagactgggcagaagagtggtgctgtgggccaccagcagcagcatgttcctgttcggcatcgccgccgccttcgccgtggactactacaccttcatggccgccagattcttcctggccatggtggccagcggctacctggtggtgggcttcgtgtacgtgatggagttcatcggcatgaagagcagaacctgggccagcgtgcacctgcacagcttcttcgccgtgggcaccctgctggtggccctgaccggctacctggtgagaacctggtggctgtaccagatgatcctgagcaccgtgaccgtgcccttcatcctgtgctgctgggtgctgcccgagacccccttctggctgctgagcgagggcagatacgaggaggcccagaagatcgtggacatcatggccaagtggaacagagccagcagctgcaagctgagcgagctgctgagcctggacctgcagggccccgtgagcaacagccccaccgaggtgcagaagcacaacctgagctacctgttctacaactggagcatcaccaagagaaccctgaccgtgtggctgatctggttcaccggcagcctgggcttctacagcttcagcctgaacagcgtgaacctgggcggcaacgagtacctgaacctgttcctgctgggcgtggtggagatccccgcctacaccttcgtgtgcatcgccatggacaaggtgggcagaagaaccgtgctggcctacagcctgttctgcagcgccctggcctgcggcgtggtgatggtgatcccccagaagcactacatcctgggcgtggtgaccgccatggtgggcaagttcgccatcggcgccgccttcggcctgatctacctgtacaccgccgagctgtaccccaccatcgtgagaagcctggccgtgggcagcggcagcatggtgtgcagactggccagcatcctggcccccttcagcgtggacctgagcagcatctggatcttcatcccccagctgctgggccagcacctgcaggagtag

SEQ ID NO: 99591 - DNA, 1299 bp, synthetic construct
  misc_feature 1..1299: note = Description of Artificial Sequence: Synthetic coding sequence
  source 1..1299: mol_type = other DNA
gactacgtgaccgtgcagctgcagaacggcgagatctgggagctgagcagatgcagcagaaacaagagagagaacaccagcagcctgggctacgagtacaccggcagcaagaaggagttcccctgcgtggacggctacatctacgaccagaacacctggaagagcaccgccgtgacccagtggaacctggtgtgcgacagaaagtggctggccatgctgatccagcccctgttcatgttcggcgtgctgctgggcagcgtgaccttcggctacttcagcgacagactgggcagaagagtggtgctgtgggccaccagcagcagcatgttcctgttcggcatcgccgccgccttcgccgtggactactacaccttcatggccgccagattcttcctggccatggtggccagcggctacctggtggtgggcttcgtgtacgtgatggagttcatcggcatgaagagcagaacctgggccagcgtgcacctgcacagcttcttcgccgtgggcaccctgctggtggccctgaccggctacctggtgagaacctggtggctgtaccagatgatcctgagcaccgtgaccgtgcccttcatcctgtgctgctgggtgctgcccgagacccccttctggctgctgagcgagggcagatacgaggaggcccagaagatcgtggacatcatggccaagtggaacagagccagcagctgcaagctgagcgagctgctgagcctggacctgcagggccccgtgagcaacagccccaccgaggtgcagaagcacaacctgagctacctgttctacaactggagcatcaccaagagaaccctgaccgtgtggctgatctggttcaccggcagcctgggcttctacagcttcagcctgaacagcgtgaacctgggcggcaacgagtacctgaacctgttcctgctgggcgtggtggagatccccgcctacaccttcgtgtgcatcgccatggacaaggtgggcagaagaaccgtgctggcctacagcctgttctgcagcgccctggcctgcggcgtggtgatggtgatcccccagaagcactacatcctgggcgtggtgaccgccatggtgggcaagttcgccatcggcgccgccttcggcctgatctacctgtacaccgccgagctgtaccccaccatcgtgagaagcctggccgtgggcagcggcagcatggtgtgcagactggccagcatcctggcccccttcagcgtggacctgagcagcatctggatcttcatcccccagctgctgggccagcacctgcaggagtag

SEQ ID NO: 99592 - DNA, 600 bp, synthetic construct
  misc_feature 1..600: note = Description of Artificial Sequence: Synthetic coding sequence
  source 1..600: mol_type = other DNA
atgggcagcagacacttcgagggcatctacgaccacgtgggccacttcggcagattccagagagtgctgtacttcatctgcgccttccagaacatcagctgcggcatccactacctggccagcgtgttcatgggcgtgaccccccaccacgtgtgcagaccccccggcaacgtgagccaggtggtgttccacaaccacagcaactggagcctggaggacaccggcgccctgctgagcagcggccagaaggactacgtgaccgtgcagctgcagaacggcgagatctgggagctgagcagatgcagcagaaacaagagagagaacaccagcagcctgggctacgagtacaccggcagcaagaaggagttcccctgcgtggacggctacatctacgaccagaacacctggaagagcaccgccgtgacccagtggaacctggtgtgcgacagaaagtggctggccatgctgatccagcccctgttcatgttcggcgtgctgctgggcagcgtgaccttcggctacttcagcgacagagtgggcttcctgaccgcctggtacaagaccagcggcttccccaccagcagcgccccccccctgtag

SEQ ID NO: 99593 - DNA, 1674 bp, synthetic construct
  misc_feature 1..1674: note = Description of Artificial Sequence: Synthetic coding sequence
  source 1..1674: mol_type = other DNA
atgagagactacgacgaggtgaccgccttcctgggcgagtggggccccttccagagactgatcttcttcctgctgagcgccagcatcatccccaacggcttcaccggcctgagcagcgtgttcctgatcgccacccccgagcacagatgcagagtgcccgacgccgccaacctgagcagcgcctggagaaaccacaccgtgcccctgagactgagagacggcagagaggtgccccacagctgcagaagatacagactggccaccatcgccaacttcagcgccctgggcctggagcccggcagagacgtggacctgggccagctggagcaggagagctgcctggacggctgggagttcagccaggacgtgtacctgagcaccatcgtgaccgagtggaacctggtgtgcgaggacgactggaaggcccccctgaccatcagcctgttcttcgtgggcgtgctgctgggcagcttcatcagcggccagctgagcgacagattcggcagaaagaacgtgctgttcgtgaccatgggcatgcagaccggcttcagcttcctgcagatcttcagcaagaacttcgagatgttcgtggtgctgttcgtgctggtgggcatgggccagatcagcaactacgtggccgccttcgtgctgggcaccgagatcctgggcaagagcgtgagaatcatcttcagcaccctgggcgtgtgcatcttctacgccttcggctacatggtgctgcccctgttcgcctacttcatcagagactggagaatgctgctggtggccctgaccatgcccggcgtgctgtgcgtggccctgtggtggttcatccccgagagccccagatggctgatcagccagggcagattcgaggaggccgaggtgatcatcagaaaggccgccaaggccaacggcatcgtggtgcccagcaccatcttcgaccccagcgagctgcaggacctgagcagcaagaagcagcagagccacaacatcctggacctgctgagaacctggaacatcagaatggtgaccatcatgagcatcatgctgtggatgaccatcagcgtgggctacttcggcctgagcctggacacccccaacctgcacggcgacatcttcgtgaactgcttcctgagcgccatggtggaggtgcccgcctacgtgctggcctggctgctgctgcagtacctgcccagaagatacagcatggccaccgccctgttcctgggcggcagcgtgctgctgttcatgcagctggtgccccccgacctgtactacctggccaccgtgctggtgatggtgggcaagttcggcgtgaccgccgccttcagcatggtgtacgtgtacaccgccgagctgtaccccaccgtggtgagaaacatgggcgtgggcgtgagcagcaccgccagcagactgggcagcatcctgagcccctacttcgtgtacctgggcgcctacgacagattcctgccctacatcctgatgggcagcctgaccatcctgaccgccatcctgaccctgttcctgcccgagagcttcggcacccccctgcccgacaccatcgaccagatgctgagagtgaagggcatgaagcacagaaagacccccagccacaccagaatgctgaaggacggccaggagagacccaccatcctgaagagcaccgccttctag

SEQ ID NO: 99594 - DNA, 1746 bp, synthetic construct
  misc_feature 1..1746: note = Description of Artificial Sequence: Synthetic coding sequence
  source 1..1746: mol_type = other DNA
atgagagactacgacgaggtgaccgccttcctgggcgagtggggccccttccagagactgatcttcttcctgctgagcgccagcatcatccccaacggcttcaccggcctgagcagcgtgttcctgatcgccacccccgagcacagatgcagagtgcccgacgccgccaacctgagcagcgcctggagaaaccacaccgtgcccctgagactgagagacggcagagaggtgccccacagctgcagaagatacagactggccaccatcgccaacttcagcgccctgggcctggagcccggcagagacgtggacctgggccagctggagcaggagagctgcctggacggctgggagttcagccaggacgtgtacctgagcaccatcgtgaccgagcaggacagcggcgcctacaacgccatgaagaacagaatgggcaagaagcccgccctgtgcctgcccgcccagtggaacctggtgtgcgaggacgactggaaggcccccctgaccatcagcctgttcttcgtgggcgtgctgctgggcagcttcatcagcggccagctgagcgacagattcggcagaaagaacgtgctgttcgtgaccatgggcatgcagaccggcttcagcttcctgcagatcttcagcaagaacttcgagatgttcgtggtgctgttcgtgctggtgggcatgggccagatcagcaactacgtggccgccttcgtgctgggcaccgagatcctgggcaagagcgtgagaatcatcttcagcaccctgggcgtgtgcatcttctacgccttcggctacatggtgctgcccctgttcgcctacttcatcagagactggagaatgctgctggtggccctgaccatgcccggcgtgctgtgcgtggccctgtggtggttcatccccgagagccccagatggctgatcagccagggcagattcgaggaggccgaggtgatcatcagaaaggccgccaaggccaacggcatcgtggtgcccagcaccatcttcgaccccagcgagctgcaggacctgagcagcaagaagcagcagagccacaacatcctggacctgctgagaacctggaacatcagaatggtgaccatcatgagcatcatgctgtggatgaccatcagcgtgggctacttcggcctgagcctggacacccccaacctgcacggcgacatcttcgtgaactgcttcctgagcgccatggtggaggtgcccgcctacgtgctggcctggctgctgctgcagtacctgcccagaagatacagcatggccaccgccctgttcctgggcggcagcgtgctgctgttcatgcagctggtgccccccgacctgtactacctggccaccgtgctggtgatggtgggcaagttcggcgtgaccgccgccttcagcatggtgtacgtgtacaccgccgagctgtaccccaccgtggtgagaaacatgggcgtgggcgtgagcagcaccgccagcagactgggcagcatcctgagcccctacttcgtgtacctgggcgcctacgacagattcctgccctacatcctgatgggcagcctgaccatcctgaccgccatcctgaccctgttcctgcccgagagcttcggcacccccctgcccgacaccatcgaccagatgctgagagtgaagggcatgaagcacagaaagacccccagccacaccagaatgctgaaggacggccaggagagacccaccatcctgaagagcaccgccttctag

SEQ ID NO: 99595 - DNA, 1656 bp, synthetic construct
  misc_feature 1..1656: note = Description of Artificial Sequence: Synthetic coding sequence
  source 1..1656: mol_type = other DNA
atgagagactacgacgaggtgatcgccttcctgggcgagtggggccccttccagagactgatcttcttcctgctgagcgccagcatcatccccaacggcttcaacggcatgagcgtggtgttcctggccggcacccccgagcacagatgcagagtgcccgacgccgccaacctgagcagcgcctggagaaacaacagcgtgcccctgagactgagagacggcagagaggtgccccacagctgcagcagatacagactggccaccatcgccaacttcagcgccctgggcctggagcccggcagagacgtggacctgggccagctggagcaggagagctgcctggacggctgggagttcagccaggacgtgtacctgagcaccgtggtgaccgagtggaacctggtgtgcgaggacaactggaaggtgcccctgaccaccagcctgttcttcgtgggcgtgctgctgggcagcttcgtgagcggccagctgagcgacagattcggcagaaagaacgtgctgttcgccaccatggccgtgcagaccggcttcagcttcctgcagatcttcagcatcagctgggagatgttcaccgtgctgttcgtgatcgtgggcatgggccagatcagcaactacgtggtggccttcatcctgggcaccgagatcctgggcaagagcgtgagaatcatcttcagcaccctgggcgtgtgcaccttcttcgccgtgggctacatgctgctgcccctgttcgcctacttcatcagagactggagaatgctgctgctggccctgaccgtgcccggcgtgctgtgcgtgcccctgtggtggttcatccccgagagccccagatggctgatcagccagagaagattcagagaggccgaggacatcatccagaaggccgccaagatgaacaacatcgccgtgcccgccgtgatcttcgacagcgtggaggagctgaaccccctgaagcagcagaaggccttcatcctggacctgttcagaaccagaaacatcgccatcatgaccatcatgagcctgctgctgtggatgctgaccagcgtgggctacttcgccctgagcctggacgcccccaacctgcacggcgacgcctacctgaactgcttcctgagcgccctgatcgagatccccgcctacatcaccgcctggctgctgctgagaaccctgcccagaagatacatcatcgccgccgtgctgttctggggcggcggcgtgctgctgttcatccagctggtgcccgtggactactacttcctgagcatcggcctggtgatgctgggcaagttcggcatcaccagcgccttcagcatgctgtacgtgttcaccgccgagctgtaccccaccctggtgagaaacatggccgtgggcgtgaccagcaccgccagcagagtgggcagcatcatcgccccctacttcgtgtacctgggcgcctacaacagaatgctgccctacatcgtgatgggcagcctgaccgtgctgatcggcatcctgaccctgttcttccccgagagcctgggcatgaccctgcccgagaccctggagcagatgcagaaggtgaagtggttcagaagcggcaagaagaccagagacagcatggagaccgaggagaaccccaaggtgctgatcaccgccttctag

SEQ ID NO: 99596 - DNA, 1656 bp, synthetic construct
  misc_feature 1..1656: note = Description of Artificial Sequence: Synthetic coding sequence
  source 1..1656: mol_type = other DNA
atgggcttcgacgtgctgctggaccaggtgggcggcatgggcagattccagatctgcctgatcgccttcttctgcatcaccaacatcctgctgttccccaacatcgtgctggagaacttcaccgccttcacccccagccacagatgctgggtgcccctgctggacaacgacaccgtgagcgacaacgacaccggcaccctgagcaaggacgacctgctgagaatcagcatccccctggacagcaacctgagaccccagaagtgccagagattcatccacccccagtggcagctgctgcacctgaacggcaccttccccaacaccaacgagcccgacaccgagccctgcgtggacggctgggtgtacgacagaagcagcttcctgagcaccatcgtgaccgagtgggacctggtgtgcgagagccagagcctgaagagcatggtgcagagcctgttcatggccggcagcctgctgggcggcctgatctacggccacctgagcgacagagtgggcagaaagatcatctgcaagctgtgcttcctgcagctggccatcagcaacacctgcgccgccttcgcccccaccttcctggtgtactgcatcctgagattcctggccggcttcagcaccatgaccatcctgggcaacaccttcatcctgagcctggagtggaccctgcccagaagcagaagcatgaccatcatggtgctgctgtgcagctacagcgtgggccagatgctgctgggcggcctggccttcgccatccaggactggcacatcctgcagctgaccgtgagcacccccatcatcgtgctgttcctgagcagctggaagatggtggagagcgccagatggctgatcatcaacaaccagctggacgagggcctgaaggagctgagaagagtggcccacatcaacggcaagaagaacaccgaggagaccctgaccaccgagctggtgagaagcaccatgaagaaggagctggacgccgtgagaatcaagaccagcatcttcagcctgttcagagcccccaagctgagaatgagagtgttcggcctgtgcttcgtgagattcgccatcaccgtgcccttctacggcctgatcctgaacctgcagcacctgggcagcaacgtgagcctgttccagatcctgtgcggcgccgtgaccttcaccgccagatgcgtgagcctgctgaccctgaaccacatgggcagaagaatcagccagatcctgttcaccttccccgtgggcctgttcatcctggtgaacaccttcctgccccaggagatgcagatcctgagagtggtgctggccaccctgggcatcggcagcgtgagcgccgccagcaacagcgccagcgtgcaccacaacgagctggtgcccaccatcctgagaagcaccgtggccggcatcaacgccgtgagcggcagaaccggcgccgccctggcccccctgctgatgaccctgatggcctacagcccccacctgccctggatcagctacggcgtgttccccatcctggccgtgcccgtgatcctgctgctgcccgagaccagagacctgcccctgcccaacaccatccaggacgtggagaacgagaaggacagcagaaacatcaagcaggaggacacctgcatgaaggtgacccagttctag

SEQ ID NO: 99597 - DNA, 738 bp, synthetic construct
  misc_feature 1..738: note = Description of Artificial Sequence: Synthetic coding sequence
  source 1..738: mol_type = other DNA
atggaggtggaggaggccttccaggccgtgggcgagatgggcatctaccagatgtacctgtgcttcctgctggccgtgctgctgcagctgtacgtggccaccgaggccatcctgatcgccctggtgggcgccacccccagctaccactgggacctggccgagctgctgcccaaccagagccacggcaaccagagcgccggcgaggaccaggccttcggcgactggctgctgaccgccaacggcagcgagatccacaagcacgtgcacttcagcagcagcttcaccagcatcgccagcgagtggttcctgatcgccaacagaagctacaaggtgagcgccgccagcagcttcttcttcagcggcgtgttcgtgggcgtgatcagcttcggccagctgagcgacagattcggcagaaagaaggtgtacctgaccggcttcgccctggacatcctgttcgccatcgccaacggcttcagccccagctacgagttcttcgccgtgaccagattcctggtgggcatgatgaacggcggcatgagcctggtggccttcgtgctgctgaacgagtgcgtgggcaccgcctactgggccctggccggcagcatcggcggcctgttcttcgccgtgggcatcgcccagtacgccctgctgggctacttcatcagaagctggagaaccctggccatcctggtgaacctgcagggcaccgtggtgttcctgctgagcctggtggactag

SEQ ID NO: 99598 - DNA, 1644 bp, synthetic construct
  misc_feature 1..1644: note = Description of Artificial Sequence: Synthetic coding sequence
  source 1..1644: mol_type = other DNA
atggaggtggaggaggccttccaggccgtgggcgagatgggcatctaccagatgtacctgtgcttcctgctggccgtgctgctgcagctgtacgtggccaccgaggccatcctgatcgccctggtgggcgccacccccagctaccactgggacctggccgagctgctgcccaaccagagccacggcaaccagagcgccggcgaggaccaggccttcggcgactggctgctgaccgccaacggcagcgagatccacaagcacgtgcacttcagcagcagcttcaccagcatcgccagcgagtggttcctgatcgccaacagaagctacaaggtgagcgccgccagcagcttcttcttcagcggcgtgttcgtgggcgtgatcagcttcggccagctgagcgacagattcggcagaaagaaggtgtacctgaccggcttcgccctggacatcctgttcgccatcgccaacggcttcagccccagctacgagttcttcgccgtgaccagattcctggtgggcatgatgaacggcggcatgagcctggtggccttcgtgctgctgaacgagtgcgtgggcaccgcctactgggccctggccggcagcatcggcggcctgttcttcgccgtgggcatcgcccagtacgccctgctgggctacttcatcagaagctggagaaccctggccatcctggtgaacctgcagggcaccgtggtgttcctgctgagcctgttcatccccgagagccccagatggctgtacagccagggcagactgagcgaggccgaggaggccctgtacctgatcgccaagagaaacagaaagctgaagtgcaccttcagcctgacccaccccgccaacagaagctgcagagagaccggcagcttcctggacctgttcagatacagagtgctgctgggccacaccctgatcctgatgttcatctggttcgtgtgcagcctggtgtactacggcctgaccctgagcgccggcgacctgggcggcagcatctacgccaacctggccctgagcggcctgatcgagatccccagctaccccctgtgcatctacctgatcaaccagaagtggttcggcagaaagagaaccctgagcgccttcctgtgcctgggcggcctggcctgcctgatcgtgatgttcctgcccgagaagaaggacaccggcgtgttcgccgtggtgaacagccacagcctgagcctgctgggcaagctgaccatcagcgccgccttcaacatcgtgtacatctacaccagcgagctgtaccccaccgtgatcagaaacgtgggcctgggcacctgcagcatgttcagcagagtgggcggcatcatcgcccccttcatccccagcctgaagtacgtgcagtggagcctgcccttcatcgtgttcggcgccaccggcctgaccagcggcctgctgagcctgctgctgcccgagaccctgaacagccccctgctggagaccttcagcgacctgcaggtgtacagctacagaagactgggcgaggaggccctgagcctgcaggccctggacccccagcagtgcgtggacaaggagagcagcctgggcagcgagagcgaggaggaggaggagttctacgacgccgacgaggagacccagatgatcaagtag

SEQ ID NO: 99599 - DNA, 1008 bp, synthetic construct
  misc_feature 1..1008: note = Description of Artificial Sequence: Synthetic coding sequence
  source 1..1008: mol_type = other DNA
atgcccgccgtgctgggcttcgagggcagcgccaacaagatcggcgtgggcgtggtgagagacggcaaggtgctggccaaccccagaagaacctacgtgaccccccccggcaccggcttcctgcccggcgacaccgccagacaccacagagccgtgatcctggacctgctgcaggaggccctgaccgagagcggcctgaccagccaggacatcgactgcatcgcctacaccaagggccccggcatgggcgcccccctggtgagcgtggccgtggtggccagaaccgtggcccagctgtggaacaagcccctggtgggcgtgaaccactgcatcggccacatcgagatgggcagactgatcaccggcgccaccagccccaccgtgctgtacgtgagcggcggcaacacccaggtgatcgcctacagcgagcacagatacagaatcttcggcgagaccatcgacatcgccgtgggcaactgcctggacagattcgccagagtgctgaagatcagcaacgaccccagccccggctacaacatcgagcagatggccaagagaggcaagaagctggtggagctgccctacaccgtgaagggcatggacgtgagcttcagcggcatcctgagcttcatcgaggacgtggcccacagaatgctggccaccggcgagtgcacccccgaggacctgtgcttcagcctgcaggagaccgtgttcgccatgctggtggagatcaccgagagagccatggcccactgcggcagccaggaggccctgatcgtgggcggcgtgggctgcaacgtgagactgcaggagatgatggccaccatgtgccaggagagaggcgccagactgttcgccaccgacgagagattctgcatcgacaacggcgccatgatcgcccaggccggctgggagatgttcagagccggccacagaacccccctgagcgacagcggcgtgacccagagatacagaaccgacgaggtggaggtgacctggagagactag

SEQ ID NO: 99600 - DNA, 1563 bp, synthetic construct
  misc_feature 1..1563: note = Description of Artificial Sequence: Synthetic coding sequence
  source 1..1563: mol_type = other DNA
atggccagcgaccccatcttcaccctggccccccccctgcactgccactacggcgccttcccccccaacgccagcggctgggagcagccccccaacgccagcggcgtgagcgtggccagcgccgccctggccgccagcgccgccagcagagtggccaccagcaccgaccccagctgcagcggcttcgccccccccgacttcaaccactgcctgaaggactgggactacaacggcctgcccgtgctgaccaccaacgccatcggccagtgggacctggtgtgcgacctgggctggcaggtgatcctggagcagatcctgttcatcctgggcttcgccagcggctacctgttcctgggctaccccgccgacagattcggcagaagaggcatcgtgctgctgaccctgggcctggtgggcccctgcggcgtgggcggcgccgccgccggcagcagcaccggcgtgatggccctgagattcctgctgggcttcctgctggccggcgtggacctgggcgtgtacctgatgagactggagctgtgcgaccccacccagagactgagagtggccctggccggcgagctggtgggcgtgggcggccacttcctgttcctgggcctggccctggtgagcaaggactggagattcctgcagagaatgatcaccgccccctgcatcctgttcctgttctacggctggcccggcctgttcctggagagcgccagatggctgatcgtgaagagacagatcgaggaggcccagagcgtgctgagaatcctggccgagagaaacagaccccacggccagatgctgggcgaggaggcccaggaggccctgcaggacctggagaacacctgccccctgcccgccaccagcagcttcagcttcgccagcctgctgaactacagaaacatctggaagaacctgctgatcctgggcttcaccaacttcatcgcccacgccatcagacactgctaccagcccgtgggcggcggcggcagccccagcgacttctacctgtgcagcctgctggccagcggcaccgccgccctggcctgcgtgttcctgggcgtgaccgtggacagattcggcagaagaggcatcctgctgctgagcatgaccctgaccggcatcgccagcctggtgctgctgggcctgtgggactacctgaacgaggccgccatcaccaccttcagcgtgctgggcctgttcagcagccaggccgccgccatcctgagcaccctgctggccgccgaggtgatccccaccaccgtgagaggcagaggcctgggcctgatcatggccctgggcgccctgggcggcctgagcggccccgcccagagactgcacatgggccacggcgccttcctgcagcacgtggtgctggccgcctgcgccctgctgtgcatcctgagcatcatgctgctgcccgagaccaagagaaagctgctgcccgaggtgctgagagacggcgagctgtgcagaagacccagcctgctgagacagcccccccccaccagatgcgaccacgtgcccctgctggccacccccaaccccgccctgtag

SEQ ID NO: 99601 - DNA, 1617 bp, synthetic construct
  misc_feature 1..1617: note = Description of Artificial Sequence: Synthetic coding sequence
  source 1..1617: mol_type = other DNA
atggccagcgaccccatcttcaccctggccccccccctgcactgccactacggcgccttcccccccaacgccagcggctgggagcagccccccaacgccagcggcgtgagcgtggccagcgccgccctggccgccagcgccgccagcagagtggccaccagcaccgaccccagctgcagcggcttcgccccccccgacttcaaccactgcctgaaggactgggactacaacggcctgcccgtgctgaccaccaacgccatcggccagtgggacctggtgtgcgacctgggctggcaggtgatcctggagcagatcctgttcatcctgggcttcgccagcggctacctgttcctgggctaccccgccgacagattcggcagaagaggcatcgtgctgctgaccctgggcctggtgggcccctgcggcgtgggcggcgccgccgccggcagcagcaccggcgtgatggccctgagattcctgctgggcttcctgctggccggcgtggacctgggcgtgtacctgatgagactggagctgtgcgaccccacccagagactgagagtggccctggccggcgagctggtgggcgtgggcggccacttcctgttcctgggcctggccctggtgagcaaggactggagattcctgcagagaatgatcaccgccccctgcatcctgttcctgttctacggctggcccggcctgttcctggagagcgccagatggctgatcgtgaagagacagatcgaggaggcccagagcgtgctgagaatcctggccgagagaaacagaccccacggccagatgctgggcgaggaggcccaggaggccctgcaggacctggagaacacctgccccctgcccgccaccagcagcttcagcttcgccagcctgctgaactacagaaacatctggaagaacctgctgatcctgggcttcaccaacttcatcgcccacgccatcagacactgctaccagcccgtgggcggcggcggcagccccagcgacttctacctgtgcagcctgctggccagcggcaccgccgccctggcctgcgtgttcctgggcgtgaccgtggacagattcggcagaagaggcatcctgctgctgagcatgaccctgaccggcatcgccagcctggtgctgctgggcctgtgggactgcgagcaccccatcttccccaccgtgtgggcccagcagggcaaccccaacagagacctgaacgaggccgccatcaccaccttcagcgtgctgggcctgttcagcagccaggccgccgccatcctgagcaccctgctggccgccgaggtgatccccaccaccgtgagaggcagaggcctgggcctgatcatggccctgggcgccctgggcggcctgagcggccccgcccagagactgcacatgggccacggcgccttcctgcagcacgtggtgctggccgcctgcgccctgctgtgcatcctgagcatcatgctgctgcccgagaccaagagaaagctgctgcccgaggtgctgagagacggcgagctgtgcagaagacccagcctgctgagacagcccccccccaccagatgcgaccacgtgcccctgctggccacccccaaccccgccctgtag

SEQ ID NO: 99602 - DNA, 1086 bp, synthetic construct
  misc_feature 1..1086: note = Description of Artificial Sequence: Synthetic coding sequence
  source 1..1086: mol_type = other DNA
atggccatcgacagaagaagagaggccgccggcggcggccccggcagacagcccgcccccgccgaggagaacggcagcctgccccccggcgacgccgccgccagcgcccccctgggcggcagagccggccccggcggcggcgccgagatccagcccctgccccccctgcaccccggcggcggcccccaccccagctgctgcagcgccgccgccgcccccagcctgctgctgctggactacgacggcagcgtgctgcccttcctgggcggcctgggcggcggctaccagaagaccctggtgctgctgacctggatccccgccctgttcatcggcttcagccagttcagcgacagcttcctgctggaccagcccaacttctggtgcagaggcgccggcaagggcaccgagctggccggcgtgaccaccaccggcagaggcggcgacatgggcaactggaccagcctgcccaccacccccttcgccaccgccccctgggaggccgccggcaacagaagcaacagcagcggcgccgacggcggcgacaccccccccctgcccagcccccccgacaagggcgacaacgccagcaactgcgactgcagagcctgggactacggcatcagagccggcctggtgcagaacgtggtgagcaagtgggacctggtgtgcgacaacgcctggaaggtgcacatcgccaagttcagcctgctggtgggcctgatcttcggctacctgatcaccggctgcatcgccgactgggtgggcagaagacccgtgctgctgttcagcatcatcttcatcctgatcttcggcctgaccgtggccctgagcgtgaacgtgaccatgttcagcaccctgagattcttcgagggcttctgcctggccggcatcatcctgaccctgtacgccctgagaatcgagctgtgcccccccggcaagagattcatgatcaccatggtggccagcttcgtggccatggccggccagttcctgatgcccggcctggccgccctgtgcagagactggcaggtgctgcaggccctgatcatctgccccttcctgctgatgctgctgtactggagctag

SEQ ID NO: 99603 - DNA, 1218 bp, synthetic construct
  misc_feature 1..1218: note = Description of Artificial Sequence: Synthetic coding sequence
  source 1..1218: mol_type = other DNA
atgttcagcaccctgagattcttcgagggcttctgcctggccggcatcatcctgaccctgtacgccctgagaatcgagctgtgcccccccggcaagagattcatgatcaccatggtggccagcttcgtggccatggccggccagttcctgatgcccggcctggccgccctgtgcagagactggcaggtgctgcaggccctgatcatctgccccttcctgctgatgctgctgtactggagcatcttccccgagagcctgagatggctgatggccacccagcagttcgagagcgccaagagactgatcctgcacttcacccagaagaacagaatgaaccccgagggcgacatcaagggcgtgatccccgagctggagaaggagctgagcagaagacccaagaaggtgtgcatcgtgaaggtggtgggcaccagaaacctgtggaagaacatcgtggtgctgtgcgtgaacagcctgaccggctacggcatccaccactgcttcgccagaagcatgatgggccacgaggtgaaggtgcccctgctggagaacttctacgccgactactacaccaccgccagcatcgccctggtgagctgcctggccatgtgcgtggtggtgagattcctgggcagaagaggcggcctgctgctgttcatgatcctgaccgccctggccagcctgctgcagctgggcctgctgaacctgatcggcaagtacagccagcaccccgacagcggcatgagcgacagcgtgaaggacaagttcagcatcgccttcagcatcgtgggcatgttcgccagccacgccgtgggcagcctgagcgtgttcttctgcgccgagatcacccccaccgtgatcagatgcggcggcctgggcctggtgctggccagcgccggcttcggcatgctgaccgcccccatcatcgagctgcacaaccagaagggctacttcctgcaccacatcatcttcgcctgctgcaccctgatctgcatcatctgcatcctgctgctgcccgagagcagagaccagaacctgcccgagaacatcagcaacggcgagcactacaccagacagcccctgctgccccacaagaagggcgagcagcccctgctgctgaccaacgccgagctgaaggactacagcggcctgcacgacgccgccgccgccggcgacaccctgcccgagggcgccaccgccaacggcatgaaggccatgtag

SEQ ID NO: 99604 - DNA, 2061 bp, synthetic construct
  misc_feature 1..2061: note = Description of Artificial Sequence: Synthetic coding sequence
  source 1..2061: mol_type = other DNA
atggccatcgacagaagaagagaggccgccggcggcggccccggcagacagcccgcccccgccgaggagaacggcagcctgccccccggcgacgccgccgccagcgcccccctgggcggcagagccggccccggcggcggcgccgagatccagcccctgccccccctgcaccccggcggcggcccccaccccagctgctgcagcgccgccgccgcccccagcctgctgctgctggactacgacggcagcgtgctgcccttcctgggcggcctgggcggcggctaccagaagaccctggtgctgctgacctggatccccgccctgttcatcggcttcagccagttcagcgacagcttcctgctggaccagcccaacttctggtgcagaggcgccggcaagggcaccgagctggccggcgtgaccaccaccggcagaggcggcgacatgggcaactggaccagcctgcccaccacccccttcgccaccgccccctgggaggccgccggcaacagaagcaacagcagcggcgccgacggcggcgacaccccccccctgcccagcccccccgacaagggcgacaacgccagcaactgcgactgcagagcctgggactacggcatcagagccggcctggtgcagaacgtggtgagcaagtgggacctggtgtgcgacaacgcctggaaggtgcacatcgccaagttcagcctgctggtgggcctgatcttcggctacctgatcaccggctgcatcgccgactgggtgggcagaagacccgtgctgctgttcagcatcatcttcatcctgatcttcggcctgaccgtggccctgagcgtgaacgtgaccatgttcagcaccctgagattcttcgagggcttctgcctggccggcatcatcctgaccctgtacgccctgagaatcgagctgtgcccccccggcaagagattcatgatcaccatggtggccagcttcgtggccatggccggccagttcctgatgcccggcctggccgccctgtgcagagactggcaggtgctgcaggccctgatcatctgccccttcctgctgatgctgctgtactggagcatcttccccgagagcctgagatggctgatggccacccagcagttcgagagcgccaagagactgatcctgcacttcacccagaagaacagaatgaaccccgagggcgacatcaagggcgtgatccccgagctggagaaggagctgagcagaagacccaagaaggtgtgcatcgtgaaggtggtgggcaccagaaacctgtggaagaacatcgtggtgctgtgcgtgaacagcctgaccggctacggcatccaccactgcttcgccagaagcatgatgggccacgaggtgaaggtgcccctgctggagaacttctacgccgactactacaccaccgccagcatcgccctggtgagctgcctggccatgtgcgtggtggtgagattcctgggcagaagaggcggcctgctgctgttcatgatcctgaccgccctggccagcctgctgcagctgggcctgctgaacctgatcggcaagtacagccagcaccccgacagcggcatgagcgacagcgtgaaggacaagttcagcatcgccttcagcatcgtgggcatgttcgccagccacgccgtgggcagcctgagcgtgttcttctgcgccgagatcacccccaccgtgatcagatgcggcggcctgggcctggtgctggccagcgccggcttcggcatgctgaccgcccccatcatcgagctgcacaaccagaagggctacttcctgcaccacatcatcttcgcctgctgcaccctgatctgcatcatctgcatcctgctgctgcccgagagcagagaccagaacctgcccgagaacatcagcaacggcgagcactacaccagacagcccctgctgccccacaagaagggcgagcagcccctgctgctgaccaacgccgagctgaaggactacagcggcctgcacgacgccgccgccgccggcgacaccctgcccgagggcgccaccgccaacggcatgaaggccatgtag

SEQ ID NO: 99605 - DNA, 1218 bp, synthetic construct; identical to SEQ ID NO: 99603
  misc_feature 1..1218: note = Description of Artificial Sequence: Synthetic coding sequence
  source 1..1218: mol_type = other DNA

SEQ ID NO: 99606 - DNA, 969 bp, synthetic construct
  misc_feature 1..969: note = Description of Artificial Sequence: Synthetic coding sequence
  source 1..969: mol_type = other DNA
atgggcttcgacgtgctgctggaccaggtgggcggcatgggcagattccagatctgcctgatcgccttcttctgcatcaccaacatcctgctgttccccaacatcgtgctggagaacttcaccgccttcacccccagccacagatgctgggtgcccctgctggacaacgacaccgtgagcgacaacgacaccggcaccctgagcaaggacgacctgctgagaatcagcatccccctggacagcaacctgagaccccagaagtgccagagattcatccacccccagtggcagctgctgcacctgaacggcaccttccccaacaccaacgagcccgacaccgagccctgcgtggacggctgggtgtacgacagaagcagcttcctgagcaccatcgtgaccgagtgggacctggtgtgcgagagccagagcctgaagagcatggtgcagagcctgttcatggccggcagcctgctgggcggcctgatctacggccacctgagcgacagagtgggcagaaagatcatctgcaagctgtgcttcctgcagctggccatcagcaacacctgcgccgccttcgcccccaccttcctggtgtactgcatcctgagattcctggccggcttcagcaccatgaccatcctgggcaacaccttcatcctgagcctggagtggaccctgcccagaagcagaagcatgaccatcatggtgctgctgtgcagctacagcgtgggccagatgctgctgggcggcctggccttcgccatccaggactggcacatcctgcagctgaccgtgagcacccccatcatcgtgctgttcctgagcagctggtacgagcagagcccccacagcctgcccgtgagcgaggccatggtggacatcgagagaaagatcctgacccccggcatctgcagcgtgagcggcctggtgctgagccacgacgtgcacagcacctactgcgtgacctag

SEQ ID NO: 99607 - DNA, 780 bp, synthetic construct
  misc_feature 1..780: note = Description of Artificial Sequence: Synthetic coding sequence
  source 1..780: mol_type = other DNA
atgagagcccaggaggacctggagggcagaacccagcacgagaccaccagagaccccagcacccccctgcccaccgagcccaagttcgacatgctgtacaagatcgaggacgtgcccccctggtacctgtgcatcctgctgggcttccagcactacctgacctgcttcagcggcaccatcgccgtgcccttcctgctggccgaggccctgtgcgtgggccacgaccagcacatggtgagccagctgatcggcaccatcttcacctgcgtgggcatgttctgcaccctgttcggcatgatcaccgccgtgggcctgagcaacctgcagttcgtggacatgaacagcagcagaaacctgttcgtgctgggcttcagcatgttcttcggcctgaccctgcccaactacctggagagcaaccccggcgccatcaacaccggcatcctggaggtggaccagatcctgatcgtgctgctgaccaccgagatgttcgtgggcggctgcctggccttcatcctggacaacaccgtgcccggcagccccgaggagagaggcctgatccagtggaaggccggcgcccacgccaacagcgacatgagcagcagcctgaagagctacgacttccccatcggcatgggcatcgtgaagagaatcaccttcctgaagtacatccccatctgccccgtgttcaagggcttcagcagcagcagcaaggaccagatcgccatccccgaggacacccccgagaacaccgagaccgccagcgtgtgcaccaaggtgtag

SEQ ID NO: 99608 - DNA, 1797 bp, synthetic construct
  misc_feature 1..1797: note = Description of Artificial Sequence: Synthetic coding sequence
  source 1..1797: mol_type = other DNA
atgagagcccaggaggacctggagggcagaacccagcacgagaccaccagagaccccagcacccccctgcccaccgagcccaagttcgacatgctgtacaagatcgaggacgtgcccccctggtacctgtgcatcctgctgggcttccagcactacctgacctgcttcagcggcaccatcgccgtgcccttcctgctggccgaggccctgtgcgtgggccacgaccagcacatggtgagccagctgatcggcaccatcttcacctgcgtgggcatcaccaccctgatccagaccaccgtgggcatcagactgcccctgttccaggccagcgccttcgccttcctggtgcccgccaaggccatcctggccctggagagatggaagtgcccccccgaggaggagatctacggcaactggagcctgcccctgaacaccagccacatctggcaccccagaatcagagaggtgcagggcgccatcatggtgagcagcgtggtggaggtggtgatcggcctgctgggcctgcccggcgccctgctgaactacatcggccccctgaccgtgacccccaccgtgagcctgatcggcctgagcgtgttccaggccgccggcgacagagccggcagccactggggcatcagcgcctgcagcatcctgctgatcatcctgttcagccagtacctgagaaacctgaccttcctgctgcccgtgtacagatggggcaagggcctgaccctgctgagaatccagatcttcaagatgttccccatcatgctggccatcatgaccgtgtggctgctgtgctacgtgctgaccctgaccgacgtgctgcccaccgaccccaaggcctacggcttccaggccagaaccgacgccagaggcgacatcatggccatcgccccctggatcagaatcccctacccctgccagtggggcctgcccaccgtgaccgccgccgccgtgctgggcatgttcagcgccaccctggccggcatcatcgagagcatcggcgactactacgcctgcgccagactggccggcgccccccccccccccgtgcacgccatcaacagaggcatcttcaccgagggcatctgctgcatcatcgccggcctgctgggcaccggcaacggcagcaccagcagcagccccaacatcggcgtgctgggcatcaccaaggtgggcagcagaagagtggtgcagtacggcgccgccatcatgctggtgctgggcaccatcggcaagttcaccgccctgttcagcagcctgcccgaccccatcctgggcggcatgttctgcaccctgttcggcatgatcaccgccgtgggcctgagcaacctgcagttcgtggacatgaacagcagcagaaacctgttcgtgctgggcttcagcatgttcttcggcctgaccctgcccaactacctggagagcaaccccggcgccatcaacaccggcatcctggaggtggaccagatcctgatcgtgctgctgaccaccgagatgttcgtgggcggctgcctggccttcatcctggacaacaccgtgcccggcagccccgaggagagaggcctgatccagtggaaggccggcgcccacgccaacagcgacatgagcagcagcctgaagagctacgacttccccatcggcatgggcatcgtgaagagaatcaccttcctgaagtacatccccatctgccccgtgttcaagggcttcagcagcagcagcaaggaccagatcgccatccccgaggacacccccgagaacaccgagaccgccagcgtgtgcaccaaggtgtag

SEQ ID NO: 99609 - DNA, 1809 bp, synthetic construct
  misc_feature 1..1809: note = Description of Artificial Sequence: Synthetic coding sequence
  source 1..1809: mol_type = other DNA
atgagagcccaggaggacctggagggcagaacccagcacgagaccaccagagaccccagcacccccctgcccaccgagcccaagttcgacatgctgtacaagatcgaggacgtgcccccctggtacctgtgcatcctgctgggcttccagcactacctgacctgcttcagcggcaccatcgccgtgcccttcctgctggccgaggccctgtgcgtgggccacgaccagcacatggtgagccagctgatcggcaccatcttcacctgcgtgggcatcaccaccctgatccagaccaccgtgggcatcagactgcccctgttccaggccagcgccttcgccttcctggtgcccgccaaggccatcctggccctggagagatggaagtgcccccccgaggaggagatctacggcaactggagcctgcccctgaacaccagccacatctggcaccccagaatcagagaggtgggcctgcacgtgcagggcgccatcatggtgagcagcgtggtggaggtggtgatcggcctgctgggcctgcccggcgccctgctgaactacatcggccccctgaccgtgacccccaccgtgagcctgatcggcctgagcgtgttccaggccgccggcgacagagccggcagccactggggcatcagcgcctgcagcatcctgctgatcatcctgttcagccagtacctgagaaacctgaccttcctgctgcccgtgtacagatggggcaagggcctgaccctgctgagaatccagatcttcaagatgttccccatcatgctggccatcatgaccgtgtggctgctgtgctacgtgctgaccctgaccgacgtgctgcccaccgaccccaaggcctacggcttccaggccagaaccgacgccagaggcgacatcatggccatcgccccctggatcagaatcccctacccctgccagtggggcctgcccaccgtgaccgccgccgccgtgctgggcatgttcagcgccaccctggccggcatcatcgagagcatcggcgactactacgcctgcgccagactggccggcgccccccccccccccgtgcacgccatcaacagaggcatcttcaccgagggcatctgctgcatcatcgccggcctgctgggcaccggcaacggcagcaccagcagcagccccaacatcggcgtgctgggcatcaccaaggtgggcagcagaagagtggtgcagtacggcgccgccatcatgctggtgctgggcaccatcggcaagttcaccgccctgttcagcagcctgcccgaccccatcctgggcggcatgttctgcaccctgttcggcatgatcaccgccgtgggcctgagcaacctgcagttcgtggacatgaacagcagcagaaacctgttcgtgctgggcttcagcatgttcttcggcctgaccctgcccaactacctggagagcaaccccggcgccatcaacaccggcatcctggaggtggaccagatcctgatcgtgctgctgaccaccgagatgttcgtgggcggctgcctggccttcatcctggacaacaccgtgcccggcagccccgaggagagaggcctgatccagtggaaggccggcgcccacgccaacagcgacatgagcagcagcctgaagagctacgacttccccatcggcatgggcatcgtgaagagaatcaccttcctgaagtacatccccatctgccccgtgttcaagggcttcagcagcagcagcaaggaccagatcgccatccccgaggacacccccgagaacaccgagaccgccagcgtgtgcaccaaggtgtag

SEQ ID NO: 99610 - DNA, 1179 bp, synthetic construct
  misc_feature 1..1179: note = Description of Artificial Sequence: Synthetic coding sequence
  source 1..1179: mol_type = other DNA
atgagagcccaggaggacctggagggcagaacccagcacgagaccaccagagaccccagcacccccctgcccaccgagcccaagttcgacatgctgtacaagatcgaggacgtgcccccctggtacctgtgcatcctgctgggcttccagcactacctgacctgcttcagcggcaccatcgccgtgcccttcctgctggccgaggccctgtgcgtgggccacgaccagcacatggtgagccagctgatcggcaccatcttcacctgcgtgggcatcaccaccctgatccagaccaccgtgggcatcagactgcccctgttccaggccagcgccttcgccttcctggtgcccgccaaggccatcctggccctggagagatggaagtgcccccccgaggaggagatctacggcaactggagcctgcccctgaacaccagccacatctggcaccccagaatcagagaggtgggcctgcacgtgagcatcgaggaggccggcggctacatgggcgtgagagtggccgccgagttcggcgacctgagaagatggagcagaagcttcgtgcccgccagcagcagccaggtgcagggcgccatcatggtgagcagcgtggtggaggtggtgatcggcctgctgggcctgcccggcgccctgctgaactacatcggccccctgaccgtgacccccaccgtgagcctgatcggcctgagcgtgttccaggccgccggcgacagagccggcagccactggggcatcagcgcctgcagcatcctgctgatcatcctgttcagccagtacctgagaaacctgaccttcctgctgccctgcgcccagcagagcgcccccctgtggcaggccagcctgagccccagcgagatcaccacccccgtgcccgcctggctggtgcaccaccccctgcagtacatgctgagcaccggcgccagcagccccaaggccttcgccgccagcagcagaggctactgggccagagccaccggcccccccagacccgtgcccaccctggccagctgggagctgcccagatgggccgccggcgcctggtgcagcatggtgagactgagctgctggagctgggcccccagcgccagcagcagacccagcagccccagaagcctgacccccagctggggcgcctgcagcgccctgagcctggcctag

SEQ ID NO: 99611 - DNA, 1953 bp, synthetic construct
  misc_feature 1..1953: note = Description of Artificial Sequence: Synthetic coding sequence
  source 1..1953: mol_type = other DNA
atgatgggcatcggcaagaacaccaccagcaagagcatggaggccggcagcagcaccgagggcaagtacgaggacgaggccaagcaccccgccttcttcaccctgcccgtggtgatcaacggcggcgccaccagcagcggcgagcaggacaacgaggacaccgagctgatggccatctacaccaccgagaacggcatcgccgagaagagcagcctggccgagaccctggacagcaccggcagcctggacccccagagaagcgacatgatctacaccatcgaggacgtgcccccctggtacctgtgcatcttcctgggcctgcagcactacctgacctgcttcagcggcaccatcgccgtgcccttcctgctggccgacgccatgtgcgtgggctacgaccagtgggccaccagccagctgatcggcaccatcttcttctgcgtgggcatcaccaccctgctgcagaccaccttcggctgcagactgcccctgttccaggccagcgccttcgccttcctggcccccgccagagccatcctgagcctggacaagtggaagtgcaacaccaccgacgtgagcgtggccaacggcaccgccgagctgctgcacaccgagcacatctggtaccccagaatcagagagatccagggcgccatcatcatgagcagcctgatcgaggtggtgatcggcctgctgggcctgcccggcgccctgctgaagtacatcggccccctgaccatcacccccaccgtggccctgatcggcctgagcggcttccaggccgccggcgagagagccggcaagcactggggcatcgccatgctgaccatcttcctggtgctgctgttcagccagtacgccagaaacgtgaagttccccctgcccatctacaagagcaagaagggctggaccgcctacaagctgcagctgttcaagatgttccccatcatcctggccatcctggtgagctggctgctgtgcttcatcttcaccgtgaccgacgtgttcccccccgacagcaccaagtacggcttctacgccagaaccgacgccagacagggcgtgctgctggtggccccctggttcaaggtgccctaccccttccagtggggcctgcccaccgtgagcgccgccggcgtgatcggcatgctgagcgccgtggtggccagcatcatcgagagcatcggcgactactacgcctgcgccagactgagctgcgccccccccccccccatccacgccatcaacagaggcatcttcgtggagggcctgagctgcgtgctggacggcatcttcggcaccggcaacggcagcaccagcagcagccccaacatcggcgtgctgggcatcaccaaggtgggcagcagaagagtgatccagtgcggcgccgccctgatgctggccctgggcatgatcggcaagttcagcgccctgttcgccagcctgcccgaccccgtgctgggcgccctgttctgcaccctgttcggcatgatcaccgccgtgggcctgagcaacctgcagttcatcgacctgaacagcagcagaaacctgttcgtgctgggcttcagcatcttcttcggcctggtgctgcccagctacctgagacagaaccccctggtgaccggcatcaccggcatcgaccaggtgctgaacgtgctgctgaccaccgccatgttcgtgggcggctgcgtggccttcatcctggacaacaccatccccggcacccccgaggagagaggcatcagaaagtggaagaagggcgtgggcaagggcaacaagagcctggacggcatggagagctacaacctgcccttcggcatgaacatcatcaagaagtacagatgcttcagctacctgcccatcagccccaccttcgtgggctacacctggaagggcctgagaaagagcgacaacagcagaagcagcgacgaggacagccaggccaccggctag

SEQ ID NO: 99612 - DNA, 1953 bp, synthetic construct; identical to SEQ ID NO: 99611
  misc_feature 1..1953: note = Description of Artificial Sequence: Synthetic coding sequence
  source 1..1953: mol_type = other DNA

SEQ ID NO: 99613 - DNA, 915 bp, synthetic construct
  misc_feature 1..915: note = Description of Artificial Sequence: Synthetic coding sequence
  source 1..915: mol_type = other DNA
tgaggctacgaccagtgggccaccagccagctgatcggcaccatcttcttctgcgtgggcatcaccaccctgctgcagaccaccttcggctgcagaaccatcttcctggtgctgctgttcagccagtacgccagaaacgtgaagttccccctgcccatctacaagagcaagaagggctggaccgcctacaagctgcagctgttcaagatgttccccatcatcctggccatcctggtgagctggctgctgtgcttcatcttcaccgtgaccgacgtgttcccccccgacagcaccaagtacggcttctacgccagaaccgacgccagacagggcgtgctgctggtggccccctggttcaaggtgccctaccccttccagtggggcctgcccaccgtgagcgccgccggcgtgatcggcatgctgagcgccgtggtggccagcatcatcgagagcatcggcgactactacgcctgcgccagactgagctgcgccccccccccccccatccacgccatcaacagaggcatcttcgtggagggcctgagctgcgtgctggacggcatcttcggcaccggcaacggcagcaccagcagcagccccaacatcggcgtgctgggcatcaccaaggtgggcagcagaagagtgatccagtgcggcgccgccctgatgctggccctgggcatgatcggcaagttcagcgccctgttcgccagcctgcccgaccccgtgctgggcgccctgttctgcaccctgttcggcatgatcaccgccgtgggcctgagcaacctgcagttcatcgacctgaacagcagcagaaacctgttcgtgctgggcttcagcatcttcttcggcctggtgctgcccagctacctgagacagaaccccctggtgaccggcatcaccggcatcgactag

SEQ ID NO: 99614 - DNA, 1611 bp, synthetic construct
  misc_feature 1..1611: note = Description of Artificial Sequence: Synthetic coding sequence
  source 1..1611: mol_type = other DNA
atgatgggcatcggcaagaacaccaccagcaagagcatggaggccggcagcagcaccgagggcaagtacgaggacgaggccaagcaccccgccttcttcaccctgcccgtggtgatcaacggcggcgccaccagcagcggcgagcaggacaacgaggacaccgagctgatggccatctacaccaccgagaacggcatcgccgagaagagcagcctggccgagaccctggacagcaccggcagcctggacccccagagaagcgacatgatctacaccatcgaggacgtgcccccctggtacctgtgcatcttcctgggcctgcagcactacctgacctgcttcagcggcaccatcgccgtgcccttcctgctggccgacgccatgtgcgtgggctacgaccagtgggccaccagccagctgatcggcaccatcttcttctgcgtgggcatcaccaccctgctgcagaccaccttcggctgcagaaccatcttcctggtgctgctgttcagccagtacgccagaaacgtgaagttccccctgcccatctacaagagcaagaagggctggaccgcctacaagctgcagctgttcaagatgttccccatcatcctggccatcctggtgagctggctgctgtgcttcatcttcaccgtgaccgacgtgttcccccccgacagcaccaagtacggcttctacgccagaaccgacgccagacagggcgtgctgctggtggccccctggttcaaggtgccctaccccttccagtggggcctgcccaccgtgagcgccgccggcgtgatcggcatgctgagcgccgtggtggccagcatcatcgagagcatcggcgactactacgcctgcgccagactgagctgcgccccccccccccccatccacgccatcaacagaggcatcttcgtggagggcctgagctgcgtgctggacggcatcttcggcaccggcaacggcagcaccagcagcagccccaacatcggcgtgctgggcatcaccaaggtgggcagcagaagagtgatccagtgcggcgccgccctgatgctggccctgggcatgatcggcaagttcagcgccctgttcgccagcctgcccgaccccgtgctgggcgccctgttctgcaccctgttcggcatgatcaccgccgtgggcctgagcaacctgcagttcatcgacctgaacagcagcagaaacctgttcgtgctgggcttcagcatcttcttcggcctggtgctgcccagctacctgagacagaaccccctggtgaccggcatcaccggcatcgaccaggtgctgaacgtgctgctgaccaccgccatgttcgtgggcggctgcgtggccttcatcctggacaacaccatccccggcacccccgaggagagaggcatcagaaagtggaagaagggcgtgggcaagggcaacaagagcctggacggcatggagagctacaacctgcccttcggcatgaacatcatcaagaagtacagatgcttcagctacctgcccatcagccccaccttcgtgggctacacctggaagggcctgagaaagagcgacaacagcagaagcagcgacgaggacagccaggccaccggctag

SEQ ID NO: 99615 - DNA, 3300 bp, synthetic construct
  misc_feature 1..3300: note = Description of Artificial Sequence: Synthetic coding sequence
  source 1..3300: mol_type = other DNA
atgggcaagctgatcagaatgggcccccaggagagatggctgctgagaaccaagagactgcactggagcagactgctgttcctgctgggcatgctgatcatcggcagcacctaccagcacctgagaagacccagaggcctgagcagcctgtgggccgccgtgagcagccaccagcccatcaagctggccagcagagacctgagcagcgaggagatgatgatgatgagcagcagccccagcaagcccagcagcgagatgggcggcaagatgctggtgccccaggccagcgtgggcagcgacgaggccaccctgagcatgaccgtggagaacatccccagcatgcccaagagaaccgccaagatgatccccaccaccaccaagaacaactacagccccaccgccgccggcaccgagagaagaaaggaggacacccccaccagcagcagaaccctgacctactacaccagcaccagcagcagacagatcgtgaagaagtacacccccacccccagaggcgagatgaagagctacagccccacccaggtgagagagaaggtgaagtacacccccagccccagaggcagaagagtgggcacctacgtgcccagcaccttcatgaccatggagaccagccacgccatcacccccagaaccaccgtgaaggacagcgacatcaccgccacctacaagatcctggagaccaacagcctgaagagaatcatggaggagaccacccccaccaccctgaagggcatgttcgacagcacccccaccttcctgacccacgaggtggaggccaacgtgctgaccagccccagaagcgtgatggagaagaacaacctgttcccccccagaagagtggagagcaacagcagcgcccacccctggggcctggtgggcaagagcaaccccaagaccccccagggcaccgtgctgctgcacacccccgccaccagcgagggccaggtgaccatcagcaccatgaccggcagcagccccgccgagaccaaggccttcaccgccgcctggagcctgagaaaccccagccccagaaccagcgtgagcgccatcaagaccgcccccgccatcgtgtggagactggccaagaagcccagcaccgcccccagcaccagcaccacccccaccgtgagagccaagctgaccatgcaggtgcaccactgcgtggtggtgaagcccacccccgccatgctgaccacccccagccccagcctgaccaccgccctgctgcccgaggagctgagccccagccccagcgtgctgccccccagcctgcccgacctgcaccccaagggcgagtacccccccgacctgttcagcgtggaggagagaagacagggctgggtggtgctgcacgtgttcggcatgatgtacgtgttcgtggccctggccatcgtgtgcgacgagtacttcgtgcccgccctgggcgtgatcaccgacaagctgcagatcagcgaggacgtggccggcgccaccttcatggccgccggcggcagcgcccccgagctgttcaccagcctgatcggcgtgttcatcagccacagcaacgtgggcatcggcaccatcgtgggcagcgccgtgttcaacatcctgttcgtgatcggcacctgcagcctgttcagcagagagatcctgaacctgacctggtggcccctgttcagagacgtgagcttctacatcctggacctgatcatgctgatcctgttcttcctggacagcctgatcgcctggtgggagagcctgctgctgctgctggcctacgccttctacgtgttcaccatgaagtggaacaagcacatcgaggtgtgggtgaaggagcagctgagcagaagacccgtggccaaggtgatggccctggaggacctgagcaagcccggcgacggcgccatcgccgtggacgagctgcaggacaacaagaagctgaagctgcccagcctgctgaccagaggcagcagcagcaccagcctgcacaacagcaccatcagaagcaccatctaccagctgatgctgcacagcctggaccccctgagagaggtgagactggccaaggagaaggaggaggagagcctgaaccagggcgccagagcccagccccaggccaaggccgagagcaagcccgaggaggaggagcccgccaagctgcccgccgtgaccgtgacccccgcccccgtgcccgacatcaagggcgaccagaaggagaaccccggcggccaggaggacgtggccgaggccgagagcaccggcgagatgcccggcgaggagggcgagaccgccggcgagggcgagaccgaggagaagagcggcggcgagacccagcccgagggcgagggcgagaccgagacccagggcaagggcgaggagtgcgaggacgagaacgaggccgagggcaagggcgacaacgagggcgaggacgagggcgagatccacgccgaggacggcgagatgaagggcaacgagggcgagaccgagagccaggagctgagcgccgagaaccacggcgaggccaagaacgacgagaagggcgtggaggacggcggcggcagcgacggcggcgacagcgaggaggaggaggaggaggaggaggagcaggaggaggaggaggaggaggaggagcaggaggaggaggaggaggaggaggaggaggaggaggagaagggcaacgaggagcccctgagcctggactggcccgagaccagacagaagcaggccatctacctgttcctgctgcccatcgtgttccccctgtggctgaccgtgcccgacgtgagaagacaggagagcagaaagttcttcgtgttcaccttcctgggcagcatcatgtggatcgccatgttcagctacctgatggtgtggtgggcccaccaggtgggcgagaccatcggcatcagcgaggagatcatgggcctgaccatcctggccgccggcaccagcatccccgacctgatcaccagcgtgatcgtggccagaaagggcctgggcgacatggccgtgagcagcagcgtgggcagcaacatcttcgacatcaccgtgggcctgcccgtgccctggctgctgttcagcctgatcaacggcctgcagcccgtgcccgtgagcagcaacggcctgttctgcgccatcgtgctgctgttcctgatgctgctgttcgtgatcagcagcatcgccagctgcaagtggagaatgaacaagatcctgggcttcaccatgttcctgctgtacttcgtgttcctgatcatcagcgtgatgctggaggacagaatcatcagctgccccgtgagcgtgtag

SEQ ID NO: 99616 - DNA, 3246 bp, synthetic construct
  misc_feature 1..3246: note = Description of Artificial Sequence: Synthetic coding sequence
  source 1..3246: mol_type = other DNA
atgggcaagctgatcagaatgggcccccaggagagatggctgctgagaaccaagagactgcactggagcagactgctgttcctgctgggcatgctgatcatcggcagcacctaccagcacctgagaagacccagaggcctgagcagcctgtgggccgccgtgagcagccaccagcccatcaagctggccagcagagacctgagcagcgaggagatgatgatgatgagcagcagccccagcaagcccagcagcgagatgggcggcaagatgctggtgccccaggccagcgtgggcagcgacgaggccaccctgagcatgaccgtggagaacatccccagcatgcccaagagaaccgccaagatgatccccaccaccaccaagaacaactacagccccaccgccgccggcaccgagagaagaaaggaggacacccccaccagcagcagaaccctgacctactacaccagcaccagcagcagacagatcgtgaagaagtacacccccacccccagaggcgagatgaagagctacagccccacccaggtgagagagaaggtgaagtacacccccagccccagaggcagaagagtgggcacctacgtgcccagcaccttcatgaccatggagaccagccacgccatcacccccagaaccaccgtgaaggacagcgacatcaccgccacctacaagatcctggagaccaacagcctgaagagaatcatggaggagaccacccccaccaccctgaagggcatgttcgacagcacccccaccttcctgacccacgaggtggaggccaacgtgctgaccagccccagaagcgtgatggagaagaacaacctgttcccccccagaagagtggagagcaacagcagcgcccacccctggggcctggtgggcaagagcaaccccaagaccccccagggcaccgtgctgctgcacacccccgccaccagcgagggccaggtgaccatcagcaccatgaccggcagcagccccgccgagaccaaggccttcaccgccgcctggagcctgagaaaccccagccccagaaccagcgtgagcgccatcaagaccgcccccgccatcgtgtggagactggccaagaagcccagcaccgcccccagcaccagcaccacccccaccgtgagagccaagctgaccatgcaggtgcaccactgcgtggtggtgaagcccacccccgccatgctgaccacccccagccccagcctgaccaccgccctgctgcccgaggagctgagccccagccccagcgtgctgccccccagcctgcccgacctgcaccccaagggcgagtacccccccgacctgttcagcgtggaggagagaagacagggctgggtggtgctgcacgtgttcggcatgatgtacgtgttcgtggccctggccatcgtgtgcgacgagtacttcgtgcccgccctgggcgtgatcaccgacaagctgcagatcagcgaggacgtggccggcgccaccttcatggccgccggcggcagcgcccccgagctgttcaccagcctgatcggcgtgttcatcagccacagcaacgtgggcatcggcaccatcgtgggcagcgccgtgttcaacatcctgttcgtgatcggcacctgcagcctgttcagcagagagatcctgaacctgacctggtggcccctgttcagagacgtgagcttctacatcctggacctgatcatgctgatcctgttcttcctggacagcctgatcgcctggtgggagagcctgctgctgctgctggcctacgccttctacgtgttcaccatgaagtggaacaagcacatcgaggtgtgggtgaaggagcagctgagcagaagacccgtggccaaggtgatggccctggaggacctgagcaagctgcccagcctgctgaccagaggcagcagcagcaccagcctgcacaacagcaccatcagaagcaccatctaccagctgatgctgcacagcctggaccccctgagagaggtgagactggccaaggagaaggaggaggagagcctgaaccagggcgccagagcccagccccaggccaaggccgagagcaagcccgaggaggaggagcccgccaagctgcccgccgtgaccgtgacccccgcccccgtgcccgacatcaagggcgaccagaaggagaaccccggcggccaggaggacgtggccgaggccgagagcaccggcgagatgcccggcgaggagggcgagaccgccggcgagggcgagaccgaggagaagagcggcggcgagacccagcccgagggcgagggcgagaccgagacccagggcaagggcgaggagtgcgaggacgagaacgaggccgagggcaagggcgacaacgagggcgaggacgagggcgagatccacgccgaggacggcgagatgaagggcaacgagggcgagaccgagagccaggagctgagcgccgagaaccacggcgaggccaagaacgacgagaagggcgtggaggacggcggcggcagcgacggcggcgacagcgaggaggaggaggaggaggaggaggagcaggaggaggaggaggaggaggaggagcaggaggaggaggaggaggaggaggaggaggaggaggagaagggcaacgaggagcccctgagcctggactggcccgagaccagacagaagcaggccatctacctgttcctgctgcccatcgtgttccccctgtggctgaccgtgcccgacgtgagaagacaggagagcagaaagttcttcgtgttcaccttcctgggcagcatcatgtggatcgccatgttcagctacctgatggtgtggtgggcccaccaggtgggcgagaccatcggcatcagcgaggagatcatgggcctgaccatcctggccgccggcaccagcatccccgacctgatcaccagcgtgatcgtggccagaaagggcctgggcgacatggccgtgagcagcagcgtgggcagcaacatcttcgacatcaccgtgggcctgcccgtgccctggctgctgttcagcctgatcaacggcctgcagcccgtgcccgtgagcagcaacggcctgttctgcgccatcgtgctgctgttcctgatgctgctgttcgtgatcagcagcatcgccagctgcaagtggagaatgaacaagatcctgggcttcaccatgttcctgctgtacttcgtgttcctgatcatcagcgtgatgctggaggacagaatcatcagctgccccgtgagcgtgtag

SEQ ID NO: 99617 - DNA, 3210 bp, synthetic construct
  misc_feature 1..3210: note = Description of Artificial Sequence: Synthetic coding sequence
  source 1..3210: mol_type = other DNA
atgggcaagctgatcagaatgggcccccaggagagatggctgctgagaaccaagagactgcactggagcagactgctgttcctgctgggcatgctgatcatcggcagcacctaccagcacctgagaagacccagaggcctgagcagcctgtgggccgccgtgagcagccaccagcccatcaagctggccagcagagacctgagcagcgaggagatgatgatgatgagcagcagccccagcaagcccagcagcgagatgggcggcaagatgctggtgccccaggccagcgtgggcagcgacgaggccaccctgagcatgaccgtggagaacatccccagcatgcccaagagaaccgccaagatgatccccaccaccaccaagaacaactacagccccaccgccgccggcaccgagagaagaaaggaggacacccccaccagcagcagaaccctgacctactacaccagcaccagcagcagacagatcgtgaagaagtacacccccacccccagaggcgagatgaagagctacagccccacccaggtgagagagaaggtgaagtacacccccagccccagaggcagaagagtgggcacctacgtgcccagcaccttcatgaccatggagaccagccacgccatcacccccagaaccaccgtgaaggacagcgacatcaccgccacctacaagatcctggagaccaacagcctgaagagaatcatggaggagaccacccccaccaccctgaagggcatgttcgacagcacccccaccttcctgacccacgaggtggaggccaacgtgctgaccagccccagaagcgtgatggagaagaacaacctgttcccccccagaagagtggagagcaacagcagcgcccacccctggggcctggtgggcaagagcaaccccaagaccccccagggcaccgtgctgctgcacacccccgccaccagcgagggccaggtgaccatcagcaccatgaccggcagcagccccgccgagaccaaggccttcaccgccgcctggagcctgagaaaccccagccccagaaccagcgtgagcgccatcaagaccgcccccgccatcgtgtggagactggccaagaagcccagcaccgcccccagcaccagcaccacccccaccgtgagagccaagctgaccatgcaggtgcaccactgcgtggtggtgaagcccacccccgccatgctgaccacccccagccccagcctgaccaccgccctgctgcccgaggagctgagccccagccccagcgtgctgccccccagcctgcccgacctgcaccccaagggcgagtacccccccgacctgttcagcgtggaggagagaagacagggctgggtggtgctgcacgtgttcggcatgatgtacgtgttcgtggccctggccatcgtgtgcgacgagtacttcgtgcccgccctgggcgtgatcaccgacaagctgcagatcagcgaggacgtggccggcgccaccttcatggccgccggcggcagcgcccccgagctgttcaccagcctgatcggcgtgttcatcagccacagcaacgtgggcatcggcaccatcgtgggcagcgccgtgttcaacatcctgttcgtgatcggcacctgcagcctgttcagcagagagatcctgaacctgacctggtggcccctgttcagagacgtgagcttctacatcctggacctgatcatgctgatcctgttcttcctggacagcctgatcgcctggtgggagagcctgctgctgctgctggcctacgccttctacgtgttcaccatgaagtggaacaagcacatcgaggtgtgggtgaaggagcagctgagcagaagacccgtggccaaggtgatggccctggaggacctgagcaagcccggcgacggcgccatcgccgtggacgagctgcaggacaacaagaagctgaagctgcccagcctgctgaccagaggcagcagcagcaccagcctgcacaacagcaccatcagaagcaccatctaccagctgatgctgcacagcctggaccccctgagagaggtgagactggccaaggagaaggaggaggagagcctgaaccagggcgccagagcccagccccaggccaaggccgagagcaagcccgaggaggaggagcccgccaagctgcccgccgtgaccgtgacccccgcccccgtgcccgacatcaagggcgaccagaaggagaaccccggcggccaggaggacgtggccgaggccgagagcaccggcgagatgcccggcgaggagggcgagaccgccggcgagggcgagaccgaggagaagagcggcggcgagacccagcccgagggcgagggcgagaccgagacccagggcaagggcgaggagtgcgaggacgagaacgaggccgagggcaagggcgacaacgagggcgaggacgagggcgagatccacgccgaggacggcgagatgaagggcaacgagggcgagaccgagagccaggagctgagcgccgagaaccacggcgaggccaagaacgacgagaagggcgtggaggacggcggcggcagcgacggcggcgacagcgaggaggaggaggaggaggaggaggagcaggaggaggaggaggaggaggaggagcaggaggaggaggaggaggaggaggaggaggaggaggagaagggcaacgaggagcccctgagcctggactggcccgagaccagacagaagcaggccatctacctgttcctgctgcccatcgtgttccccctgtggctgaccgtgcccgacgtgagaagacaggtgggcgagaccatcggcatcagcgaggagatcatgggcctgaccatcctggccgccggcaccagcatccccgacctgatcaccagcgtgatcgtggccagaaagggcctgggcgacatggccgtgagcagcagcgtgggcagcaacatcttcgacatcaccgtgggcctgcccgtgccctggctgctgttcagcctgatcaacggcctgcagcccgtgcccgtgagcagcaacggcctgttctgcgccatcgtgctgctgttcctgatgctgctgttcgtgatcagcagcatcgccagctgcaagtggagaatgaacaagatcctgggcttcaccatgttcctgctgtacttcgtgttcctgatcatcagcgtgatgctggaggacagaatcatcagctgccccgtgagcgtgtag

SEQ ID NO: 99618 - DNA, 3246 bp, synthetic construct; identical to SEQ ID NO: 99616
  misc_feature 1..3246: note = Description of Artificial Sequence: Synthetic coding sequence
  source 1..3246: mol_type = other DNA

SEQ ID NO: 99619 - DNA, 1935 bp, synthetic construct
  misc_feature 1..1935: note = Description of Artificial Sequence: Synthetic coding sequence
  source 1..1935: mol_type = other DNA
atggacctgcagcagagcaccaccatcaccagcctggagaagtggtgcctggacgagagcctgagcggctgcagaagacactacagcgtgaagaagaagctgaagctgatcagagtgctgggcctgttcatgggcctggtggccatcagcaccgtgagcttcagcatcagcgccttcagcgagaccgacacccagagcaccggcgaggccagcgtggtgagcggccccagagtggcccagggctaccaccagagaaccctgctggacctgaacgacaagatcctggactacaccccccagccccccctgagcaaggagggcgagagcgagaacagcaccgaccacgcccagggcgactaccccaaggacatcttcagcctggaggagagaagaaagggcgccatcatcctgcacgtgatcggcatgatctacatgttcatcgccctggccatcgtgtgcgacgagttcttcgtgcccagcctgaccgtgatcaccgagaagctgggcatcagcgacgacgtggccggcgccaccttcatggccgccggcggcagcgcccccgagctgttcaccagcctgatcggcgtgttcatcgcccacagcaacgtgggcatcggcaccatcgtgggcagcgccgtgttcaacatcctgttcgtgatcggcatgtgcgccctgttcagcagagagatcctgaacctgacctggtggcccctgttcagagacgtgagcttctacatcgtggacctgatcatgctgatcatcttcttcctggacaacgtgatcatgtggtgggagagcctgctgctgctgaccgcctacttctgctacgtggtgttcatgaagttcaacgtgcaggtggagaagtgggtgaagcagatgatcaacagaaacaaggtggtgaaggtgaccgcccccgaggcccaggccaagcccagcgccgccagagacaaggacgagcccaccctgcccgccaagcccagactgcagagaggcggcagcagcgccagcctgcacaacagcctgatgagaaacagcatcttccagctgatgatccacaccctggaccccctggccgagggcagattcagagagaaggccagcatcctgcacaagatcgccaagaagaagtgccacgtggacgagaacgagagacagaacggcgccgccaaccacgtggagaagatcgagctgcccaacagcaccagcaccgacgtggagatgacccccagcagcgacgccagcgagcccgtgcagaacggcaacctgagccacaacatcgagggcgccgaggcccagaccgccgacgaggaggaggaccagcccctgagcctggcctggcccagcgagaccagaaagcaggtgaccttcctgatcgtgttccccatcgtgttccccctgtggatcaccctgcccgacgtgagaaagcccagcagcagaaagttcttccccatcaccttcttcggcagcatcacctggatcgccgtgttcagctacctgatggtgtggtgggcccaccaggtgggcgagaccatcggcatcagcgaggagatcatgggcctgaccatcctggccgccggcaccagcatccccgacctgatcaccagcgtgatcgtggccagaaagggcctgggcgacatggccgtgagcagcagcgtgggcagcaacatcttcgacatcaccgtgggcctgcccctgccctggctgctgtacaccgtgatccacagattccagcccgtggccgtgagcagcaacggcctgttctgcgccatcgtgctgctgttcatcatgctgctgttcgtgatcctgagcatcgccctgtgcaagtggagaatgaacaagatcctgggcttcatcatgttcggcctgtacttcgtgttcctggtggtgagcgtgctgctggaggacagaatcctgacctgccccgtgagcatctag

SEQ ID NO: 99620 - DNA, 1986 bp, synthetic construct
  misc_feature 1..1986: note = Description of Artificial Sequence: Synthetic coding sequence
  source 1..1986: mol_type = other DNA
atggacctgcagcagagcaccaccatcaccagcctggagaagtggtgcctggacgagagcctgagcggctgcagaagacactacagcgtgaagaagaagctgaagctgatcagagtgctgggcctgttcatgggcctggtggccatcagcaccgtgagcttcagcatcagcgccttcagcgagaccgacacccagagcaccggcgaggccagcgtggtgagcggccccagagtggcccagggctaccaccagagaaccctgctggacctgaacgacaagatcctggactacaccccccagccccccctgagcaaggagggcgagagcgagaacagcaccgaccacgcccagggcgactaccccaaggacatcttcagcctggaggagagaagaaagggcgccatcatcctgcacgtgatcggcatgatctacatgttcatcgccctggccatcgtgtgcgacgagttcttcgtgcccagcctgaccgtgatcaccgagaagctgggcatcagcgacgacgtggccggcgccaccttcatggccgccggcggcagcgcccccgagctgttcaccagcctgatcggcgtgttcatcgcccacagcaacgtgggcatcggcaccatcgtgggcagcgccgtgttcaacatcctgttcgtgatcggcatgtgcgccctgttcagcagagagatcctgaacctgacctggtggcccctgttcagagacgtgagcttctacatcgtggacctgatcatgctgatcatcttcttcctggacaacgtgatcatgtggtgggagagcctgctgctgctgaccgcctacttctgctacgtggtgttcatgaagttcaacgtgcaggtggagaagtgggtgaagcagatgatcaacagaaacaaggtggtgaaggtgaccgcccccgaggcccaggccaagcccagcgccgccagagacaaggacgagcccaccctgcccgccaagcccagactgcagagaggcggcagcagcgccagcctgcacaacagcctgatgagaaacagcatcttccagctgatgatccacaccctggaccccctggccgaggagctgggcagctacggcaagctgaagtactacgacaccatgaccgaggagggcagattcagagagaaggccagcatcctgcacaagatcgccaagaagaagtgccacgtggacgagaacgagagacagaacggcgccgccaaccacgtggagaagatcgagctgcccaacagcaccagcaccgacgtggagatgacccccagcagcgacgccagcgagcccgtgcagaacggcaacctgagccacaacatcgagggcgccgaggcccagaccgccgacgaggaggaggaccagcccctgagcctggcctggcccagcgagaccagaaagcaggtgaccttcctgatcgtgttccccatcgtgttccccctgtggatcaccctgcccgacgtgagaaagcccagcagcagaaagttcttccccatcaccttcttcggcagcatcacctggatcgccgtgttcagctacctgatggtgtggtgggcccaccaggtgggcgagaccatcggcatcagcgaggagatcatgggcctgaccatcctggccgccggcaccagcatccccgacctgatcaccagcgtgatcgtggccagaaagggcctgggcgacatggccgtgagcagcagcgtgggcagcaacatcttcgacatcaccgtgggcctgcccctgccctggctgctgtacaccgtgatccacagattccagcccgtggccgtgagcagcaacggcctgttctgcgccatcgtgctgctgttcatcatgctgctgttcgtgatcctgagcatcgccctgtgcaagtggagaatgaacaagatcctgggcttcatcatgttcggcctgtacttcgtgttcctggtggtgagcgtgctgctggaggacagaatcctgacctgccccgtgagcatctag

SEQ ID NO: 99621 - DNA, 1935 bp, synthetic construct
  misc_feature 1..1935: note = Description of Artificial Sequence: Synthetic coding sequence
  source 1..1935: mol_type = other DNA
atgagacccagcggcgacgaggacagagccagaagaagaagaagaagaagaagaagaagagacctgctgctgagccagctgtgcttcctggccagcgtggccctgctgctgtggagcctgagcagcctgagagagcagaaggagctggacctgatggacctggtgggcgaggacagaaagtggatgatggccagaaagctgatgcaggtgaacgacaccctgaccagcgaggacgccggcctgagaaacagcaagaactgcaccgagcccgccctgcacgagttccccaacgacatcttcaccaacgaggacagaagacagggcgccgtggtgctgcacgtgctgtgcgccatctacatgttctacgccctggccatcgtgtgcgacgacttcttcgtgcccagcctggagaagatctgcgagagactgcacctgagcgaggacgtggccggcgccaccttcatggccgccggcagcagcgcccccgagctgttcaccagcgtgatcggcgtgttcatcaccaagggcgacgtgggcgtgggcaccatcgtgggcagcgccgtgttcaacatcctgtgcatcatcggcgtgtgcggcctgttcgccggccaggtggtggccctgagcagctggtgcctgctgagagacagcatctactacaccctgagcgtgatcgccctgatcgtgttcatctacgacgagaaggtgagctggtgggagagcctggtgctggtgctgatgtacctgatctacatcgtgatcatgaagtacaacgcctgcatccaccagtgcttcgagagaagaaccaagggcgccggcaacatggtgaacggcctggccaacaacgccgagatcgacgacagcagcaactgcgacgccaccgtggtgctgctgaagaaggccaacttccacagaaaggccagcgtgatcatggtggacgagctgctgagcgcctacccccaccagctgagcttcagcgaggccggcctgagaatcatgatcaccagccacttcccccccaagaccagactgagcatggccagcagaatgctgatcaacgagagacagagactgatcaacagcagagcctacaccaacggcgagagcgaggtggccatcaagatccccatcaagcacaccgtggagaacggcaccggccccagcagcgcccccgacagaggcgtgaacggcaccagaagagacgacgtggtggccgaggccggcaacgagaccgagaacgagaacgaggacaacgagaacgacgaggaggaggaggaggacgaggacgacgacgagggcccctacacccccttcgacacccccagcggcaagctggagaccgtgaagtgggccttcacctggcccctgagcttcgtgctgtacttcaccgtgcccaactgcaacaagcccagatgggagaagtggttcatggtgaccttcgccagcagcaccctgtggatcgccgccttcagctacatgatggtgtggatggtgaccatcatcggctacaccctgggcatccccgacgtgatcatgggcatcaccttcctggccgccggcaccagcgtgcccgactgcatggccagcctgatcgtggccagacagggcatgggcgacatggccgtgagcaacagcatcggcagcaacgtgttcgacatcctgatcggcctgggcctgccctgggccctgcagaccctggccgtggactacggcagctacatcagactgaacagcagaggcctgatctacagcgtgggcctgctgctggccagcgtgttcgtgaccgtgttcggcgtgcacctgaacaagtggcagctggacaagaagctgggctgcggctgcctgctgctgtacggcgtgttcctgtgcttcagcatcatgaccgagttcaacgtgttcaccttcgtgaacctgcccatgtgcggcgaccactag

SEQ ID NO: 99622 - DNA, 1755 bp, synthetic construct
  misc_feature 1..1755: note = Description of Artificial Sequence: Synthetic coding sequence
  source 1..1755: mol_type = other DNA
atggccggcagaagactgaacctgagatgggccctgagcgtgctgtgcgtgctgctgatggccgagaccgtgagcggcaccagaggcagcagcaccggcgcccacatcagcccccagttccccgccagcggcgtgaaccagacccccgtggtggactgcagaaaggtgtgcggcctgaacgtgagcgacagatgcgacttcatcagaaccaaccccgactgccacagcgacggcggctacctggactacctggagggcatcttctgccacttcccccccagcctgctgcccctggccgtgaccctgtacgtgagctggctgctgtacctgttcctgatcctgggcgtgaccgccgccaagttcttctgccccaacctgagcgccatcagcaccaccctgaagctgagccacaacgtggccggcgtgaccttcctggccttcggcaacggcgcccccgacatcttcagcgccctggtggccttcagcgacccccacaccgccggcctggccctgggcgccctgttcggcgccggcgtgctggtgaccaccgtggtggccggcggcatcaccatcctgcaccccttcatggccgccagcagacccttcttcagagacatcgtgttctacatggtggccgtgttcctgaccttcctgatgctgttcagaggcagagtgaccctggcctgggccctgggctacctgggcctgtacgtgttctacgtggtgaccgtgatcctgtgcacctggatctaccagagacagagaagaggcagcctgttctgccccatgcccgtgacccccgagatcctgagcgacagcgaggaggacagagtgagcagcaacaccaacagctacgactacggcgacgagtacagacccctgttcttctaccaggagaccaccgcccagatcctggtgagagccctgaaccccctggactacatgaagtggagaagaaagagcgcctactggaaggccctgaaggtgttcaagctgcccgtggagttcctgctgctgctgaccgtgcccgtggtggaccccgacaaggacgaccagaactggaagagacccctgaactgcctgcacctggtgatcagccccctggtggtggtgctgaccctgcagagcggcacctacggcgtgtacgagatcggcggcctggtgcccgtgtgggtggtggtggtgatcgccggcaccgccctggccagcgtgaccttcttcgccaccagcgacagccagccccccagactgcactggctgttcgccttcctgggcttcctgaccagcgccctgtggatcaacgccgccgccaccgaggtggtgaacatcctgagaagcctgggcgtggtgttcagactgagcaacaccgtgctgggcctgaccctgctggcctggggcaacagcatcggcgacgccttcagcgacttcaccctggccagacagggctaccccagaatggccttcagcgcctgcttcggcggcatcatcttcaacatcctggtgggcgtgggcctgggctgcctgctgcagatcagcagaagccacaccgaggtgaagctggagcccgacggcctgctggtgtgggtgctggccggcgccctgggcctgagcctggtgttcagcctggtgagcgtgcccctgcagtgcttccagctgagcagagtgtacggcttctgcctgctgctgttctacctgaacttcctggtggtggccctgctgaccgagttcggcgtgatccacctgaagagcatgtag

SEQ ID NO: 99623 - DNA, 1587 bp, synthetic construct
  misc_feature 1..1587: note = Description of Artificial Sequence: Synthetic coding sequence
  source 1..1587: mol_type = other DNA
atggccggcagaagactgaacctgagatgggccctgagcgtgctgtgcgtgctgctgatggccgagaccgtgagcggcaccagaggcagcagcaccggcgcccacatcagcccccagttccccgccagcggcgtgaaccagacccccgtggtggactgcagaaaggtgtgcggcctgaacgtgagcgacagatgcgacttcatcagaaccaaccccgactgccacagcgacggcggctacctggactacctggagggcatcttctgccacttcccccccagcctgctgcccctggccgtgaccctgtacgtgagctggctgctgtacctgttcctgatcctgggcgtgaccgccgccaagttcttctgccccaacctgagcgccatcagcaccaccctgaagctgagccacaacgtggccggcgtgaccttcctggccttcggcaacggcgcccccgacatcttcagcgccctggtggccttcagcgacccccacaccgccggcctggccctgggcgccctgttcggctacctgggcctgtacgtgttctacgtggtgaccgtgatcctgtgcacctggatctaccagagacagagaagaggcagcctgttctgccccatgcccgtgacccccgagatcctgagcgacagcgaggaggacagagtgagcagcaacaccaacagctacgactacggcgacgagtacagacccctgttcttctaccaggagaccaccgcccagatcctggtgagagccctgaaccccctggactacatgaagtggagaagaaagagcgcctactggaaggccctgaaggtgttcaagctgcccgtggagttcctgctgctgctgaccgtgcccgtggtggaccccgacaaggacgaccagaactggaagagacccctgaactgcctgcacctggtgatcagccccctggtggtggtgctgaccctgcagagcggcacctacggcgtgtacgagatcggcggcctggtgcccgtgtgggtggtggtggtgatcgccggcaccgccctggccagcgtgaccttcttcgccaccagcgacagccagccccccagactgcactggctgttcgccttcctgggcttcctgaccagcgccctgtggatcaacgccgccgccaccgaggtggtgaacatcctgagaagcctgggcgtggtgttcagactgagcaacaccgtgctgggcctgaccctgctggcctggggcaacagcatcggcgacgccttcagcgacttcaccctggccagacagggctaccccagaatggccttcagcgcctgcttcggcggcatcatcttcaacatcctggtgggcgtgggcctgggctgcctgctgcagatcagcagaagccacaccgaggtgaagctggagcccgacggcctgctggtgtgggtgctggccggcgccctgggcctgagcctggtgttcagcctggtgagcgtgcccctgcagtgcttccagctgagcagagtgtacggcttctgcctgctgctgttctacctgaacttcctggtggtggccctgctgaccgagttcggcgtgatccacctgaagagcatgtag

SEQ ID NO: 99624 - DNA, 1587 bp, synthetic construct; identical to SEQ ID NO: 99623
  misc_feature 1..1587: note = Description of Artificial Sequence: Synthetic coding sequence
  source 1..1587: mol_type = other DNA

SEQ ID NO: 99625 - DNA, 396 bp, synthetic construct
  misc_feature 1..396: note = Description of Artificial Sequence: Synthetic coding sequence
  source 1..396: mol_type = other DNA
atggccggcagaagactgaacctgagatgggccctgagcgtgctgtgcgtgctgctgatggccgagaccgtgagcggcaccagaggcagcagcaccggcgcccacatcagcccccagttccccgccagcggcgtgaaccagacccccgtggtggactgcagaaaggtgtgcggcctgaacgtgagcgacagatgcgacttcatcagaaccaaccccgactgccacagcgacggcggctacctggactacctggagggcatcttctgccacttcccccccagcctgctgcccctggccgtgaccctgtacgtgagctggctgctgtacctgttcctgatcctgggcgtgaccgccgccaagttcttctgccccaacctgagcgccatcagcacctag

SEQ ID NO: 99626 - DNA, 696 bp, synthetic construct
  misc_feature 1..696: note = Description of Artificial Sequence: Synthetic coding sequence
  source 1..696: mol_type = other DNA
atggccggcagaagactgaacctgagatgggccctgagcgtgctgtgcgtgctgctgatggccgagaccgtgagcggcaccagaggcagcagcaccggcgcccacatcagcccccagttccccgccagcggcgtgaaccagacccccgtggtggactgcagaaaggtgtgcggcctgaacgtgagcgacagatgcgacttcatcagaaccaaccccgactgccacagcgacggcggctacctggactacctggagggcatcttctgccacttcccccccagcctgctgcccctggccgtgaccctgtacgtgagctggctgctgtacctgttcctgatcctgggcgtgaccgccgccaagttcttctgccccaacctgagcgccatcagcaccaccctgaagctgagccacaacgtggccggcgtgaccttcctggccttcggcaacggcgcccccgacatcttcagcgccctggtggccttcagcgacccccacaccgccggcctggccctgggcgccctgttcggcgccggcgtgctggtgaccaccgtggtggccggcggcatcaccatcctgcaccccttcatggccgccagcagacccttcttcagagacatcgtgttctacatggtggccgtgttcctgaccttcctgatgctgttcagaggcagagtgaccctggcctgggccctgtag

SEQ ID NO: 99627 - DNA, 312 bp, synthetic construct
  misc_feature 1..312: note = Description of Artificial Sequence: Synthetic coding sequence
  source 1..312: mol_type = other DNA
atggccggcagaagactgaacctgagatgggccctgagcgtgctgtgcgtgctgctgatggccgagaccgtgagcggcaccagaggcagcagcaccggcgcccacatcagcccccagttccccgccagcggcgtgaaccagacccccgtggtggactgcagaaaggtgtgcggcctgaacgtgagcgacagatgcgacttcatcagaaccaaccccgactgccacagcgacggcggctacctggactacctggagggcatcttctgccacttcccccccagcctgctgcccctggccgtgaccctgtactag

SEQ ID NO: 99628 - DNA, 1755 bp, synthetic construct; identical to SEQ ID NO: 99622
  misc_feature 1..1755: note = Description of Artificial Sequence: Synthetic coding sequence
  source 1..1755: mol_type = other DNA

SEQ ID NO: 99629 - DNA, 906 bp, synthetic construct
  misc_feature 1..906: note = Description of Artificial Sequence: Synthetic coding sequence
  source 1..906: mol_type = other DNA
atggccgaccagcccaagcccatcagccccctgaagaacctgctggccggcggcttcggcggcgtgtgcctggtgttcgtgggccaccccctggacaccgtgaaggtgagactgcagacccagccccccagcctgcccggccagccccccatgtacagcggcaccttcgactgcttcagaaagaccctgttcagagagggcatcaccggcctgtacagaggcatggccgcccccatcatcggcgtgacccccatgttcgccgtgtgcttcttcggcttcggcctgggcaagaagctgcagcagaagcaccccgaggacgtgctgagctacccccagctgttcgccgccggcatgctgagcggcgtgttcaccaccggcatcatgacccccggcgagagaatcaagtgcctgctgcagatccaggccagcagcggcgagagcaagtacaccggcaccctggactgcgccaagaagctgtaccaggagttcggcatcagaggcatctacaagggcaccgtgctgaccctgatgagagacgtgcccgccagcggcatgtacttcatgacctacgagtggctgaagaacatcttcacccccgagggcaagagagtgagcgagctgagcgcccccagaatcctggtggccggcggcatcgccggcatcttcaactgggccgtggccatcccccccgacgtgctgaagagcagattccagaccgccccccccggcaagtaccccaacggcttcagagacgtgctgagagagctgatcagagacgagggcgtgaccagcctgtacaagggcttcaacgccgtgatgatcagagccttccccgccaacgccgcctgcttcctgggcttcgaggtggccatgaagttcctgaactgggccacccccaacctgtag

SEQ ID NO: 99630 - DNA, 756 bp, synthetic construct
  misc_feature 1..756: note = Description of Artificial Sequence: Synthetic coding sequence
  source 1..756: mol_type = other DNA
atgtacagcggcaccttcgactgcttcagaaagaccctgttcagagagggcatcaccggcctgtacagaggcatggccgcccccatcatcggcgtgacccccatgttcgccgtgtgcttcttcggcttcggcctgggcaagaagctgcagcagaagcaccccgaggacgtgctgagctacccccagctgttcgccgccggcatgctgagcggcgtgttcaccaccggcatcatgacccccggcgagagaatcaagtgcctgctgcagatccaggccagcagcggcgagagcaagtacaccggcaccctggactgcgccaagaagctgtaccaggagttcggcatcagaggcatctacaagggcaccgtgctgaccctgatgagagacgtgcccgccagcggcatgtacttcatgacctacgagtggctgaagaacatcttcacccccgagggcaagagagtgagcgagctgagcgcccccagaatcctggtggccggcggcatcgccggcatcttcaactgggccgtggccatcccccccgacgtgctgaagagcagattccagaccgccccccccggcaagtaccccaacggcttcagagacgtgctgagagagctgatcagagacgagggcgtgaccagcctgtacaagggcttcaacgccgtgatgatcagagccttccccgccaacgccgcctgcttcctgggcttcgaggtggccatgaagttcctgaactgggccacccccaacctgtag

SEQ ID NO: 99631 - DNA, 948 bp, synthetic construct
  misc_feature 1..948: note = Description of Artificial Sequence: Synthetic coding sequence
  source 1..948: mol_type = other DNA
atgacccaccaggacctgagcatcaccgccaagctgatcaacggcggcgtggccggcctggtgggcgtgacctgcgtgttccccatcgacctggccaagaccagactgcagaaccagcacggcaaggccatgtacaagggcatgatcgactgcctgatgaagaccgccagagccgagggcttcttcggcatgtacagaggcgccgccgtgaacctgaccctggtgacccccgagaaggccatcaagctggccgccaacgacttcttcagaagactgctgatggaggacggcatgcagagaaacctgaagatggagatgctggccggctgcggcgccggcatgtgccaggtggtggtgacctgccccatggagatgctgaagatccagctgcaggacgccggcagactggccgtgcaccaccagggcagcgccagcgcccccagcaccagcagaagctacaccaccggcagcgccagcacccacagaagacccagcgccaccctgatcgcctgggagctgctgagaacccagggcctggccggcctgtacagaggcctgggcgccaccctgctgagagacatccccttcagcatcatctacttccccctgttcgccaacctgaacaacctgggcttcaacgagctggccggcaaggccagcttcgcccacagcttcgtgagcggctgcgtggccggcagcatcgccgccgtggccgtgacccccctggacgtgctgaagaccagaatccagaccctgaagaagggcctgggcgaggacatgtacagcggcatcaccgactgcgccagaaagctgtggatccaggagggccccagcgccttcatgaagggcgccggctgcagagccctggtgatcgcccccctgttcggcatcgcccagggcgtgtacttcatcggcatcggcgagagaatcctgaagtgcttcgactag

SEQ ID NO: 99632 - DNA, 948 bp, synthetic construct; identical to SEQ ID NO: 99631
  misc_feature 1..948: note = Description of Artificial Sequence: Synthetic coding sequence
  source 1..948: mol_type = other DNA

SEQ ID NO: 99633 - DNA, 1716 bp, synthetic construct
  misc_feature 1..1716: note = Description of Artificial Sequence: Synthetic coding sequence
  source 1..1716: mol_type = other DNA
atggagaacgtgaaggagatcttcggccagaccatcatccaccaccacatccccttcaactgggactgcgagttcatcagactgcacttcggccacaacagaaagaagcacctgaactacaccgagttcacccagttcctgcaggagctgcagctggagcacgccagacaggccttcgccctgaaggacaagagcaagagcggcatgatcagcggcctggacttcagcgacatcatggtgaccatcagaagccacatgctgacccccttcgtggaggagaacctggtgagcgccgccggcggcagcatcagccaccaggtgagcttcagctacttcaacgccttcaacagcctgctgaacaacatggagctggtgagaaagatctacagcaccctggccggcaccagaaaggacgtggaggtgaccaaggaggagttcgcccagagcgccatcagatacggccaggtgacccccctggagatcgacatcctgtaccagctggccgacctgtacaacgccagcggcagactgaccctggccgacatcgagagaatcgcccccctggccgagggcgccctgccctacaacctggccgagctgcagagacagcagagccccggcctgggcagacccatctggctgcagatcgccgagagcgcctacagattcaccctgggcagcgtggccggcgccgtgggcgccaccgccgtgtaccccatcgacctggtgaagaccagaatgcagaaccagagaggcagcggcagcgtggtgggcgagctgatgtacaagaacagcttcgactgcttcaagaaggtgctgagatacgagggcttcttcggcctgtacagaggcctgatcccccagctgatcggcgtggcccccgagaaggccatcaagctgaccgtgaacgacttcgtgagagacaagttcaccagaagagacggcagcgtgcccctgcccgccgaggtgctggccggcggctgcgccggcggcagccaggtgatcttcaccaaccccctggagatcgtgaagatcagactgcaggtggccggcgagatcaccaccggccccagagtgagcgccctgaacgtgctgagagacctgggcatcttcggcctgtacaagggcgccaaggcctgcttcctgagagacatccccttcagcgccatctacttccccgtgtacgcccactgcaagctgctgctggccgacgagaacggccacgtgggcggcctgaacctgctggccgccggcgccatggccggcgtgcccgccgccagcctggtgacccccgccgacgtgatcaagaccagactgcaggtggccgccagagccggccagaccacctacagcggcgtgatcgactgcttcagaaagatcctgagagaggagggccccagcgccttctggaagggcaccgccgccagagtgttcagaagcagcccccagttcggcgtgaccctggtgacctacgagctgctgcagagatggttctacatcgacttcggcggcctgaagcccgccggcagcgagcccacccccaagagcagaatcgccgacctgccccccgccaaccccgaccacatcggcggctacagactggccaccgccaccttcgccggcatcgagaacaagttcggcctgtacctgcccaagttcaagagccccagcgtggccgtggtgcagcccaaggccgccgtggccgccacccagtag

SEQ ID NO: 99634 - DNA, 2037 bp, synthetic construct
  misc_feature 1..2037: note = Description of Artificial Sequence: Synthetic coding sequence
  source 1..2037: mol_type = other DNA
atggccgtgaaggtgcagaccaccaagagaggcgacccccacgagctgagaaacatcttcctgcagtacgccagcaccgaggtggacggcgagagatacatgacccccgaggacttcgtgcagagatacctgggcctgtacaacgaccccaacagcaaccccaagatcgtgcagctgctggccggcgtggccgaccagaccaaggacggcctgatcagctaccaggagttcctggccttcgagagcgtgctgtgcgcccccgacagcatgttcatcgtggccttccagctgttcgacaagagcggcaacggcgaggtgaccttcgagaacgtgaaggagatcttcggccagaccatcatccaccaccacatccccttcaactgggactgcgagttcatcagactgcacttcggccacaacagaaagaagcacctgaactacaccgagttcacccagttcctgcaggagctgcagctggagcacgccagacaggccttcgccctgaaggacaagagcaagagcggcatgatcagcggcctggacttcagcgacatcatggtgaccatcagaagccacatgctgacccccttcgtggaggagaacctggtgagcgccgccggcggcagcatcagccaccaggtgagcttcagctacttcaacgccttcaacagcctgctgaacaacatggagctggtgagaaagatctacagcaccctggccggcaccagaaaggacgtggaggtgaccaaggaggagttcgcccagagcgccatcagatacggccaggtgacccccctggagatcgacatcctgtaccagctggccgacctgtacaacgccagcggcagactgaccctggccgacatcgagagaatcgcccccctggccgagggcgccctgccctacaacctggccgagctgcagagacagcagagccccggcctgggcagacccatctggctgcagatcgccgagagcgcctacagattcaccctgggcagcgtggccggcgccgtgggcgccaccgccgtgtaccccatcgacctggtgaagaccagaatgcagaaccagagaggcagcggcagcgtggtgggcgagctgatgtacaagaacagcttcgactgcttcaagaaggtgctgagatacgagggcttcttcggcctgtacagaggcctgatcccccagctgatcggcgtggcccccgagaaggccatcaagctgaccgtgaacgacttcgtgagagacaagttcaccagaagagacggcagcgtgcccctgcccgccgaggtgctggccggcggctgcgccggcggcagccaggtgatcttcaccaaccccctggagatcgtgaagatcagactgcaggtggccggcgagatcaccaccggccccagagtgagcgccctgaacgtgctgagagacctgggcatcttcggcctgtacaagggcgccaaggcctgcttcctgagagacatccccttcagcgccatctacttccccgtgtacgcccactgcaagctgctgctggccgacgagaacggccacgtgggcggcctgaacctgctggccgccggcgccatggccggcgtgcccgccgccagcctggtgacccccgccgacgtgatcaagaccagactgcaggtggccgccagagccggccagaccacctacagcggcgtgatcgactgcttcagaaagatcctgagagaggagggccccagcgccttctggaagggcaccgccgccagagtgttcagaagcagcccccagttcggcgtgaccctggtgacctacgagctgctgcagagatggttctacatcgacttcggcggcctgaagcccgccggcagcgagcccacccccaagagcagaatcgccgacctgccccccgccaaccccgaccacatcggcggctacagactggccaccgccaccttcgccggcatcgagaacaagttcggcctgtacctgcccaagttcaagagccccagcgtggccgtggtgcagcccaaggccgccgtggccgccacccagtag

SEQ ID NO: 99635 - DNA, 1944 bp, synthetic construct
  misc_feature 1..1944: note = Description of Artificial Sequence: Synthetic coding sequence
  source 1..1944: mol_type = other DNA
atggccgccggcctggccacctggctgcccttcgccagagccgccgccgtgggctggctgcccctggcccagcagcccctgccccccgcccccggcgtgaaggccagcagaggcgacgaggtgctggtggtgaacgtgagcggcagaagattcgagacctggaagaacaccctggacagataccccgacaccctgctgggcagcagcgagaaggagttcttctacgacgccgacagcggcgagtacttcttcgacagagaccccgacatgttcagacacgtgctgaacttctacagaaccggcagactgcactgccccagacaggagtgcatccaggccttcgacgaggagctggccttctacggcctggtgcccgagctggtgggcgactgctgcctggaggagtacagagacagaaagaaggagaacgccgagagactggccgaggacgaggaggccgagcaggccggcgacggccccgccctgcccgccggcagcagcctgagacagagactgtggagagccttcgagaacccccacaccagcaccgccgccctggtgttctactacgtgaccggcttcttcatcgccgtgagcgtgatcgccaacgtggtggagaccatcccctgcagaggcagcgccagaagaagcagcagagagcagccctgcggcgagagattcccccaggccttcttctgcatggacaccgcctgcgtgctgatcttcaccggcgagtacctgctgagactgttcgccgcccccagcagatgcagattcctgagaagcgtgatgagcctgatcgacgtggtggccatcctgccctactacatcggcctgctggtgcccaagaacgacgacgtgagcggcgccttcgtgaccctgagagtgttcagagtgttcagaatcttcaagttcagcagacacagccagggcctgagaatcctgggctacaccctgaagagctgcgccagcgagctgggcttcctgctgttcagcctgaccatggccatcatcatcttcgccaccgtgatgttctacgccgagaagggcaccaacaagaccaacttcaccagcatccccgccgccttctggtacaccatcgtgaccatgaccaccctgggctacggcgacatggtgcccagcaccatcgccggcaagatcttcggcagcatctgcagcctgagcggcgtgctggtgatcgccctgcccgtgcccgtgatcgtgagcaacttcagcagaatctaccaccagaaccagagagccgacaagagaagagcccagcagaaggtgagactggccagaatcagactggccaagagcggcaccaccaacgccttcctgcagtacaagcagaacggcggcctggaggacagcggcagcggcgaggagcaggccctgtgcgtgagaaacagaagcgccttcgagcagcagcaccaccacctgctgcactgcctggagaagaccacctgccacgagttcaccgacgagctgaccttcagcgaggccctgggcgccgtgagccccggcggcagaaccagcagaagcaccagcgtgagcagccagcccgtgggccccggcagcctgctgagcagctgctgccccagaagagccaagagaagagccatcagactggccaacagcaccgccagcgtgagcagaggcagcatgcaggagctggacatgctggccggcctgagaagaagccacgccccccagagcagaagcagcctgaacgccaagccccacgacagcctggacctgaactgcgacagcagagacttcgtggccgccatcatcagcatccccaccccccccgccaacacccccgacgagagccagcccagcagccccggcggcggcggcagagccggcagcaccctgagaaacagcagcctgggcaccccctgcctgttccccgagaccgtgaagatcagcagcctgtag

SEQ ID NO: 99636 - DNA, 1062 bp, synthetic construct
  misc_feature 1..1062: note = Description of Artificial Sequence: Synthetic coding sequence
  source 1..1062: mol_type = other DNA
atgggcatcttccccggcatcatcctgatcttcctgagagtgaagttcgccaccgccgccgtgatccaccagaagagcaccaccgtgagccacgagatgagcggcctgaactggaagcccttcgtgtacggcggcctggccagcatcgtggccgagttcggcaccttccccgtggacctgaccaagaccagactgcaggtgcagggccagagcatcgacgccagattcaaggagatcaagtacagaggcatgttccacgccctgttcagaatctgcaaggaggagggcgtgctggccctgtacagcggcatcgcccccgccctgctgagacaggccagctacggcaccatcaagatcggcatctaccagagcctgaagagactgttcgtggagagactggaggacgagaccctgctgatcaacatgatctgcggcgtggtgagcggcgtgatcagcagcaccatcgccaaccccaccgacgtgctgaagatcagaatgcaggcccagggcagcctgttccagggcagcatgatcggcagcttcatcgacatctaccagcaggagggcaccagaggcctgtggagatgcctgtgcagcaaggccgtgaccggctgcgtgctgtggctgatgcccgtgatccccgccctgtgggaggccaacgccggcggcagcctggagggcgtggtgcccaccgcccagagagccgccatcgtggtgggcgtggagctgcccgtgtacgacatcaccaagaagcacctgatcctgagcggcatgatgggcgacaccatcctgacccacttcgtgagcagcttcacctgcggcctggccggcgccctggccagcaaccccgtggacgtggtgagaaccagaatgatgaaccagagagccatcgtgggccacgtggacctgtacaagggcaccgtggacggcatcctgaagatgtggaagcacgagggcttcttcgccctgtacaagggcttctggcccaactggctgagactgggcccctggaacatcatcttcttcatcacctacgagcagctgaagagactgcagatctag

SEQ ID NO: 99637 - DNA, 969 bp, synthetic construct
  misc_feature 1..969: note = Description of Artificial Sequence: Synthetic coding sequence
  source 1..969: mol_type = other DNA
atgggcatcttccccggcatcatcctgatcttcctgagagtgaagttcgccaccgccgccgtgatccaccagaagagcaccaccgtgagccacgagatgagcggcctgaactggaagcccttcgtgtacggcggcctggccagcatcgtggccgagttcggcaccttccccgtggacctgaccaagaccagactgcaggtgcagggccagagcatcgacgccagattcaaggagatcaagtacagaggcatgttccacgccctgttcagaatctgcaaggaggagggcgtgctggccctgtacagcggcatcgcccccgccctgctgagacaggccagctacggcaccatcaagatcggcatctaccagagcctgaagagactgttcgtggagagactggaggacgagaccctgctgatcaacatgatctgcggcgtggtgagcggcgtgatcagcagcaccatcgccaaccccaccgacgtgctgaagatcagaatgcaggcccagggcagcctgttccagggcagcatgatcggcagcttcatcgacatctaccagcaggagggcaccagaggcctgtggagaggcgtggtgcccaccgcccagagagccgccatcgtggtgggcgtggagctgcccgtgtacgacatcaccaagaagcacctgatcctgagcggcatgatgggcgacaccatcctgacccacttcgtgagcagcttcacctgcggcctggccggcgccctggccagcaaccccgtggacgtggtgagaaccagaatgatgaaccagagagccatcgtgggccacgtggacctgtacaagggcaccgtggacggcatcctgaagatgtggaagcacgagggcttcttcgccctgtacaagggcttctggcccaactggctgagactgggcccctggaacatcatcttcttcatcacctacgagcagctgaagagactgcagatctag

SEQ ID NO: 99638 - DNA, 597 bp, synthetic construct
  misc_feature 1..597: note = Description of Artificial Sequence: Synthetic coding sequence
  source 1..597: mol_type = other DNA
atgggcatcttccccggcatcatcctgatcttcctgagagtgaagttcgccaccgccgccgtgatcgtgagcggccaccagaagagcaccaccgtgagccacgagatgagcggcctgaactggaagcccttcgtgtacggcggcctggccagcatcgtggccgagttcggcaccttccccgtggacctgaccaagaccagactgcaggtgcagggccagagcatcgacgccagattcaaggagatcaagtacagaggcatgttccacgccctgttcagaatctgcaaggaggagggcgtgctggccctgtacagcggcatcgcccccgccctgctgagacaggccagctacggcaccatcaagatcggcatctaccagagcctgaagagactgttcgtggagagactggaggacgagaccctgctgatcaacatgatctgcggcgtggtgagcggcgtgatcagcagcaccatcgccaaccccaccgacgtgctgaagatcagaatgcaggcccagggcagcctgttccagggcagcatgatcggcagcttcatcgacatctaccagcaggagggcaccagaggcctgtggagatag

SEQ ID NO: 99639 - DNA, 618 bp, synthetic construct
  misc_feature 1..618: note = Description of Artificial Sequence: Synthetic coding sequence
  source 1..618: mol_type = other DNA
atgagcggcctgaactggaagcccttcgtgtacggcggcctggccagcatcgtggccgagttcggcaccttccccgtggacctgaccaagaccagactgcaggtgcagggccagagcatcgacgccagattcaaggagatcaagtacagaggcatgttccacgccctgttcagaatctgcaaggaggagggcgtgctggccctgtacagcggcatcgcccccgccctgctgagacaggccagctacggcaccatcaagatcggcatctaccagagcctgaagagactgttcgtggagagactggaggacgagaccctgctgatcaacatgatctgcggcgtggtgagcggcgtgatcagcagcaccatcgccaaccccaccgacgtgctgaagatcagaatgcaggcccagggcagcctgttccagggcagcatgatcggcagcttcatcgacatctaccagcaggagggcaccagaggcctgtggagaggcgtggtgcccaccgcccagagagccgccatcgtggtgggcgtggagctgcccgtgtacgacatcaccaagaagcacctgatcctgagcggcatgatgggcgacaccatcctgacccacttcgtgtag

SEQ ID NO: 99640 - DNA, 723 bp, synthetic construct
  misc_feature 1..723: note = Description of Artificial Sequence: Synthetic coding sequence
  source 1..723: mol_type = other DNA
atgggcatcttccccggcatcatcctgatcttcctgagagtgaagttcgccaccgccgccgtgatcgtgagcggccaccagaagagcaccaccgtgagccacgagatgagcggcctgaactggaagcccttcgtgtacggcggcctggccagcatcgtggccgagttcggcaccttccccgtggacctgaccaagaccagactgcaggtgcagggccagagcatcgacgccagattcaaggagatcaagtacagaggcatgttccacgccctgttcagaatctgcaaggaggagggcgtgctggccctgtacagcggcatcgcccccgccctgctgagacaggccagctacggcaccatcaagatcggcatctaccagagcctgaagagactgttcgtggagagactggaggacgagaccctgctgatcaacatgatctgcggcgtggtgagcggcgtgatcagcagcaccatcgccaaccccaccgacgtgctgaagatcagaatgcaggcccagggcagcctgttccagggcagcatgatcggcagcttcatcgacatctaccagcaggagggcaccagaggcctgtggagaggcgtggtgcccaccgcccagagagccgccatcgtggtgggcgtggagctgcccgtgtacgacatcaccaagaagcacctgatcctgagcggcatgatgggcgacaccatcctgacccacttcgtgtag

SEQ ID NO: 99641 - DNA, 972 bp, synthetic construct
  misc_feature 1..972: note = Description of Artificial Sequence: Synthetic coding sequence
  source 1..972: mol_type = other DNA
atggccgacaagcagatcagcctgcccgccaagctgatcaacggcggcatcgccggcctgatcggcgtgacctgcgtgttccccatcgacctggccaagaccagactgcagaaccagcagaacggccagagagtgtacaccagcatgagcgactgcctgatcaagaccgtgagaagcgagggctacttcggcatgtacagaggcgccgccgtgaacctgaccctggtgacccccgagaaggccatcaagctggccgccaacgacttcttcagacaccagctgagcaaggacggccagaagctgaccctgctgaaggagatgctggccggctgcggcgccggcacctgccaggtgatcgtgaccacccccatggagatgctgaagatccagctgcaggacgccggcagaatcgccgcccagagaaagatcctggccgcccagggccagctgagcgcccagggcggcgcccagcccagcgtggaggcccccgccgcccccagacccaccgccacccagctgaccagagacctgctgagaagcagaggcatcgccggcctgtacaagggcctgggcgccaccctgctgagagacgtgcccttcagcgtggtgtacttccccctgttcgccaacctgaaccagctgggcagacccgccagcgaggagaagagccccttctacgtgagcttcctggccggctgcgtggccggcagcgccgccgccgtggccgtgaacccctgcgacgtggtgaagaccagactgcagagcctgcagagaggcgtgaacgaggacacctacagcggcatcctggactgcgccagaaagatcctgagacacgagggccccagcgccttcctgaagggcgcctactgcagagccctggtgatcgcccccctgttcggcatcgcccaggtggtgtacttcctgggcatcgccgagagcctgctgggcctgctgcaggacccccaggcctag

SEQ ID NO: 99642 - DNA, 333 bp, synthetic construct
  misc_feature 1..333: note = Description of Artificial Sequence: Synthetic coding sequence
  source 1..333: mol_type = other DNA
atggccgacaagcagatcagcctgcccgccaagctgatcaacggcggcatcgccggcctgatcggcgtgacctgcgtgttccccatcgacctggccaagaccagactgcagaaccagcagaacggccagagagtgtacaccagcatgagcgactgcctgatcaagaccgtgagaagcgagggctacttcggcatgtacagaggcgccgccgtgaacctgaccctggtgacccccgagaaggccatcaagctggccgccaacgacttcttcagacaccagctgagcaaggacggccagaagctgaccctgctgaaggagatgctggccggctag

SEQ ID NO: 99643 - DNA, 384 bp, synthetic construct
  misc_feature 1..384: note = Description of Artificial Sequence: Synthetic coding sequence
  source 1..384: mol_type = other DNA
atggccgacaagcagatcagcctgcccgccaagctgatcaacggcggcatcgccggcctgatcggcgtgacctgcgtgttccccatcgacctggccaagaccagactgcagaaccagcagaacggccagagagtgtacaccagcatgagcgactgcctgatcaagaccgtgagaagcgagggctacttcggcatgtacagaggcgccgccgtgaacctgaccctggtgacccccgagaaggccatcaagctggccgccaacgacttcttcagacaccagctgagcaaggacggccagaagctgaccctgctgaaggagatgctggccggctgcggcgccggcacctgccaggtgatcgtgaccacccccatggagatgctgtag

SEQ ID NO: 99644 - DNA, 360 bp, synthetic construct
  misc_feature 1..360: note = Description of Artificial Sequence: Synthetic coding sequence
  source 1..360: mol_type = other DNA
atggccgacaagcagatcagcctgcccgccaagctgatcaacggcggcatcgccggcctgatcggcgtgacctgcgtgttccccatcgacctggccaagaccagactgcagaaccagcagaacggccagagagtgtacaccagcatgagcgactgcctgatcaagaccgtgagaagcgagggctacttcggcatgtacagaggcgccgccgtgaacctgaccctggtgacccccgagaaggccatcaagctggccgccaacgacttcttcagacaccagctgagcaaggacggccagaagctgaccctgctgaaggagatgctggccggctgcggcgccggcacctgccaggtgatctag

SEQ ID NO: 99645 - DNA, 372 bp, synthetic construct
  misc_feature 1..372: note = Description of Artificial Sequence: Synthetic coding sequence
  source 1..372: mol_type = other DNA
atggccgacaagcagatcagcctgcccgccaagctgatcaacggcggcatcgccggcctgatcggcgtgacctgcgtgttccccatcgacctggccaagaccagactgcagaaccagcagaacggccagagagtgtacaccagcatgagcgactgcctgatcaagaccgtgagaagcgagggctacttcggcatgtacagaggcgccgccgtgaacctgaccctggtgacccccgagaaggccatcaagctggccgccaacgacttcttcagacaccagctgagcaaggacggccagaagctgaccctgctgaaggagatgctggccggctgcggcgccggcacctgccaggtgatcgtgaccaccccctag

SEQ ID NO: 99646 - DNA, 342 bp, synthetic construct
  misc_feature 1..342: note = Description of Artificial Sequence: Synthetic coding sequence
  source 1..342: mol_type = other DNA
atggccgacaagcagatcagcctgcccgccaagctgatcaacggcggcatcgccggcctgatcggcgtgacctgcgtgttccccatcgacctggccaagaccagactgcagaaccagcagaacggccagagagtgtacaccagcatgagcgactgcctgatcaagaccgtgagaagcgagggctacttcggcatgtacagaggcgccgccgtgaacctgaccctggtgacccccgagaaggccatcaagctggccgccaacgacttcttcagacaccagctgagcaaggacggccagaagctgaccctgctgaaggagatgctggccggctgcggcgcctag

SEQ ID NO: 99647 - DNA, 237 bp, synthetic construct
  misc_feature 1..237: note = Description of Artificial Sequence: Synthetic coding sequence
  source 1..237: mol_type = other DNA
atggccgacaagcagatcagcctgcccgccaagctgatcaacggcggcatcgccggcctgatcggcgtgacctgcgtgttccccatcgacctggccaagaccagactgcagaaccagcagaacggccagagagtgtacaccagcatgagcgactgcctgatcaagaccgtgagaagcgagggctacttcggcatgtacagaggcgccgccgtgaacctgaccctggtgaccccctag

SEQ ID NO: 99648 - DNA, 180 bp, synthetic construct
  misc_feature 1..180: note = Description of Artificial Sequence: Synthetic coding sequence
  source 1..180: mol_type = other DNA
atggccgacaagcagatcagcctgcccgccaagctgatcaacggcggcatcgccggcctgatcggcgtgacctgcgtgttccccatcgacctggccaagaccagactgcagaaccagcagaacggccagagagtgtacaccagcatgagcgactgcctgatcaagaccgtgagaagctag

SEQ ID NO: 99649 - DNA, 972 bp, synthetic construct; identical to SEQ ID NO: 99641
  misc_feature 1..972: note = Description of Artificial Sequence: Synthetic coding sequence
  source 1..972: mol_type = other DNA

SEQ ID NO: 99650 - DNA, 345 bp, synthetic construct
  misc_feature 1..345: note = Description of Artificial Sequence: Synthetic coding sequence
  source 1..345: mol_type = other DNA
atggccgacaagcagatcagcctgcccgccaagctgatcaacggcggcatcgccggcctgatcggcgtgacctgcgtgttccccatcgacctggccaagaccagactgcagaaccagcagaacggccagagagtgtacaccagcatgagcgactgcctgatcaagaccgtgagaagcgagggctacttcggcatgtacagaggcgccgccgtgaacctgaccctggtgacccccgagaaggccatcaagctggccgccaacgacttcttcagacaccagctgagcaaggacggccagaagctgaccctgctgaaggagatgctggccggctgcggcgccggctag

SEQ ID NO: 99651 - DNA, 237 bp, synthetic construct; identical to SEQ ID NO: 99647
  misc_feature 1..237: note = Description of Artificial Sequence: Synthetic coding sequence
  source 1..237: mol_type = other DNA

SEQ ID NO: 99652 - DNA, 321 bp, synthetic construct
  misc_feature 1..321: note = Description of Artificial Sequence: Synthetic coding sequence
  source 1..321: mol_type = other DNA
atggccgacaagcagatcagcctgcccgccaagctgatcaacggcggcatcgccggcctgatcggcgtgacctgcgtgttccccatcgacctggccaagaccagactgcagaaccagcagaacggccagagagtgtacaccagcatgagcgactgcctgatcaagaccgtgagaagcgagggctacttcggcatgtacagaggcgccgccgtgaacctgaccctggtgacccccgagaaggccatcaagctggccgccaacgacttcttcagacaccagctgagcaaggacggccagaagctgaccctgctgaaggagtag

SEQ ID NO: 99653 - DNA, 408 bp, synthetic construct
  misc_feature 1..408: note = Description of Artificial Sequence: Synthetic coding sequence
  source 1..408: mol_type = other DNA
atggccgacaagcagatcagcctgcccgccaagctgatcaacggcggcatcgccggcctgatcggcgtgacctgcgtgttccccatcgacctggccaagaccagactgcagaaccagcagaacggccagagagtgtacaccagcatgagcgactgcctgatcaagaccgtgagaagcgagggctacttcggcatgtacagaggcgccgccgtgaacctgaccctggtgacccccgagaaggccatcaagctggccgccaacgacttcttcagacaccagctgagcaaggacggccagaagctgaccctgctgaaggagatgctggccggctgcggcgccggcacctgccaggtgatcgtgaccacccccatggagatgctgaagatccagctgcaggacgccggctag

SEQ ID NO: 99654 - DNA, 948 bp, synthetic construct
  misc_feature 1..948: note = Description of Artificial Sequence: Synthetic coding sequence
  source 1..948: mol_type = other DNA
atgcacagagagcccgccaagaagaaggccgagaagagactgttcgacgccagcagcttcggcaaggacctgctggccggcggcgtggccgccgccgtgagcaagaccgccgtggcccccatcgagagagtgaagctgctgctgcaggtgcaggccagcagcaagcagatcagccccgaggccagatacaagggcatggtggactgcctggtgagaatccccagagagcagggcttcttcagcttctggagaggcaacctggccaacgtgatcagatacttccccacccaggccctgaacttcgccttcaaggacaagtacaagcagctgttcatgagcggcgtgaacaaggagaagcagttctggagatggttcctggccaacctggccagcggcggcgccgccggcgccaccagcctgtgcgtggtgtaccccctggacttcgccagaaccagactgggcgtggacatcggcaagggccccgaggagagacagttcaagggcctgggcgactgcatcatgaagatcgccaagagcgacggcatcgccggcctgtaccagggcttcggcgtgagcgtgcagggcatcatcgtgtacagagccagctacttcggcgcctacgacaccgtgaagggcctgctgcccaagcccaagaagacccccttcctggtgagcttcttcatcgcccaggtggtgaccacctgcagcggcatcctgagctaccccttcgacaccgtgagaagaagaatgatgatgcagagcggcgaggccaagagacagtacaagggcaccctggactgcttcgtgaagatctaccagcacgagggcatcagcagcttcttcagaggcgccttcagcaacgtgctgagaggcaccggcggcgccctggtgctggtgctgtacgacaagatcaaggagttcttccacatcgacatcggcggcagatag

SEQ ID NO: 99655 - DNA, 897 bp, synthetic construct
  misc_feature 1..897: note = Description of Artificial Sequence: Synthetic coding sequence
  source 1..897: mol_type = other DNA
atgggcgaccacgcctggagcttcctgaaggacttcctggccggcggcgtggccgccgccgtgagcaagaccgccgtggcccccatcgagagagtgaagctgctgctgcaggtgcagcacgccagcaagcagatcagcgccgagaagcagtacaagggcatcatcgactgcgtggtgagaatccccaaggagcagggcttcctgagcttctggagaggcaacctggccaacgtgatcagatacttccccacccaggccctgaacttcgccttcaaggacaagtacaagcagctgttcctgggcggcgtggacagacacaagcagttctggagatacttcgccggcaacctggccagcggcggcgccgccggcgccaccagcctgtgcttcgtgtaccccctggacttcgccagaaccagactggccgccgacgtgggcaagggcgccgcccagagagagttccacggcctgggcgactgcatcatcaagatcttcaagagcgacggcctgagaggcctgtaccagggcttcaacgtgagcgtgcagggcatcatcatctacagagccgcctacttcggcgtgtacgacaccgccaagggcatgctgcccgaccccaagaacgtgcacatcttcgtgagctggatgatcgcccagagcgtgaccgccgtggccggcctggtgagctaccccttcgacaccgtgagaagaagaatgatgatgcagagcggcagaaagggcgccgacatcatgtacaccggcaccgtggactgctggagaaagatcgccaaggacgagggcgccaaggccttcttcaagggcgcctggagcaacgtgctgagaggcatgggcggcgccttcgtgctggtgctgtacgacgagatcaagaagtacgtgtag

SEQ ID NO: 99656 - DNA, 897 bp, synthetic construct
  misc_feature 1..897: note = Description of Artificial Sequence: Synthetic coding sequence
  source 1..897: mol_type = other DNA
atgaccgacgccgccgtgagcttcgccaaggacttcctggccggcggcgtggccgccgccatcagcaagaccgccgtggcccccatcgagagagtgaagctgctgctgcaggtgcagcacgccagcaagcagatcaccgccgacaagcagtacaagggcatcatcgactgcgtggtgagaatccccaaggagcagggcgtgctgagcttctggagaggcaacctggccaacgtgatcagatacttccccacccaggccctgaacttcgccttcaaggacaagtacaagcagatcttcctgggcggcgtggacaagagaacccagttctggctgtacttcgccggcaacctggccagcggcggcgccgccggcgccaccagcctgtgcttcgtgtaccccctggacttcgccagaaccagactggccgccgacgtgggcaaggccggcgccgagagagagttcagaggcctgggcgactgcctggtgaagatctacaagagcgacggcatcaagggcctgtaccagggcttcaacgtgagcgtgcagggcatcatcatctacagagccgcctacttcggcatctacgacaccgccaagggcatgctgcccgaccccaagaacacccacatcgtgatcagctggatgatcgcccagaccgtgaccgccgtggccggcctgaccagctaccccttcgacaccgtgagaagaagaatgatgatgcagagcggcagaaagggcaccgacatcatgtacaccggcaccctggactgctggagaaagatcgccagagacgagggcggcaaggccttcttcaagggcgcctggagcaacgtgctgagaggcatgggcggcgccttcgtgctggtgctgtacgacgagatcaagaagtacacctag

SEQ ID NO: 99657 - DNA, 897 bp, synthetic construct
  misc_feature 1..897: note = Description of Artificial Sequence: Synthetic coding sequence
  source 1..897: mol_type = other DNA
atgaccgagcaggccatcagcttcgccaaggacttcctggccggcggcatcgccgccgccatcagcaagaccgccgtggcccccatcgagagagtgaagctgctgctgcaggtgcagcacgccagcaagcagatcgccgccgacaagcagtacaagggcatcgtggactgcatcgtgagaatccccaaggagcagggcgtgctgagcttctggagaggcaacctggccaacgtgatcagatacttccccacccaggccctgaacttcgccttcaaggacaagtacaagcagatcttcctgggcggcgtggacaagcacacccagttctggagatacttcgccggcaacctggccagcggcggcgccgccggcgccaccagcctgtgcttcgtgtaccccctggacttcgccagaaccagactggccgccgacgtgggcaagagcggcaccgagagagagttcagaggcctgggcgactgcctggtgaagatcaccaagagcgacggcatcagaggcctgtaccagggcttcagcgtgagcgtgcagggcatcatcatctacagagccgcctacttcggcgtgtacgacaccgccaagggcatgctgcccgaccccaagaacacccacatcgtggtgagctggatgatcgcccagaccgtgaccgccgtggccggcgtggtgagctaccccttcgacaccgtgagaagaagaatgatgatgcagagcggcagaaagggcgccgacatcatgtacaccggcaccgtggactgctggagaaagatcttcagagacgagggcggcaaggccttcttcaagggcgcctggagcaacgtgctgagaggcatgggcggcgccttcgtgctggtgctgtacgacgagctgaagaaggtgatctag

SEQ ID NO: 99658 - DNA, 477 bp, synthetic construct
  misc_feature 1..477: note = Description of Artificial Sequence: Synthetic coding sequence
  source 1..477: mol_type = other DNA
atgaccgagcaggccatcagcttcgccaaggacttcctggccggcggcatcgccgccgccatcagcaagaccgccgtggcccccatcgagagagtgaagctgctgctgcaggtgcagcacgccagcaagcagatcgccgccgacaagcagtacaagggcatcgtggactgcatcgtgagaatccccaaggagcagggcgtgctgagcttctggagaggcaacctggccaacgtgatcagatacttccccacccaggccctgaacttcgccttcaaggacaagtacaagcagatcttcctgggcggcgtggacaagcacacccagttctggagatacttcgccggcaacctggccagcggcggcgccgccggcgccaccagcctgtgcttcgtgtaccccctggacttcgccagaaccagactggccgccgacgtgggcaagagcggcaccgagagagagttcagaggcctgggctag

SEQ ID NO: 99659 - DNA, 2913 bp, synthetic construct
  misc_feature 1..2913: note = Description of Artificial Sequence: Synthetic coding sequence
  source 1..2913: mol_type = other DNA
atgctgtgcttcctggacgacggcgccggcatggaccccagcgacgccgccagcgtgatccagttcggcaagagcgccaagagaacccccgagagcacccagatcggccagtacggcaacggcctgaagagcggcagcatgagaatcggcaaggacttcatcctgttcaccaagaaggaggacaccatgacctgcctgttcctgagcagaaccttccacgaggaggagggcatcgacgaggtgatcgtgcccctgcccacctggaacgccagaaccagagagcccgtgaccgacaacgtggagaagttcgccatcgagaccgagctgatctacaagtacagccccttcagaaccgaggaggaggtgatgacccagttcatgaagatccccggcgacagcggcaccctggtgatcatcttcaacctgaagctgatggacaacggcgagcccgagctggacatcatcagcaaccccagagacatccagatggccgagaccagccccgagggcaccaagcccgagagaagaagcttcagagcctacgccgccgtgctgtacatcgaccccagaatgagaatcttcatccacggccacaaggtgcagaccaagagactgagctgctgcctgtacaagcccagaatgtacaagtacaccagcagcagattcaagaccagagccgagcaggaggtgaagaaggccgagcacgtggccagaatcgccgaggagaaggccagagaggccgagagcaaggccagaaccctggaggtgagactgggcggcgacctgaccagagacagcagagtgatgctgagacaggtgcagaacagagccatcaccctgagaagagaggccgacgtgaagaagagaatcaaggaggccaagcagagagccctgaaggagcccaaggagctgaacttcgtgttcggcgtgaacatcgagcacagagacctggacggcatgttcatctacaactgcagcagactgatcaagatgtacgagaaggtgggcccccagctggagggcggcatggcctgcggcggcgtggtgggcgtggtggacgtgccctacctggtgctggagcccacccacaacaagcaggacttcgccgacgccaaggagtacagacacctgctgagagccatgggcgagcacctggcccagtactggaaggacatcgccatcgcccagagaggcatcatcaagttctgggacgagttcggctacctgagcgccaactggaaccagccccccagcagcgagctgagatacaagagaagaagagccatggagatccccaccaccatccagtgcgacctgtgcctgaagtggagaaccctgcccttccagctgagcagcgtggagaaggactaccccgacacctgggtgtgcagcatgaaccccgaccccgagcaggacagatgcgaggccagcgagcagaagcagaaggtgcccctgggcaccttcagaaaggacatgaagacccaggaggagaagcagaagcagctgaccgagaagatcagacagcagcaggagaagctggaggccctgcagaagaccacccccatcagaagccaggccgacctgaagaagctgcccctggaggtgaccaccagacccagcaccgaggagcccgtgagaagaccccagagacccagaagcccccccctgcccgccgtgatcagaaacgcccccagcagaccccccagcctgcccacccccagacccgccagccagcccagaaaggcccccgtgatcagcagcacccccaagctgcccgccctggccgccagagaggaggccagcaccagcagactgctgcagccccccgaggcccccagaaagcccgccaacaccctggtgaagaccgccagcagacccgcccccctggtgcagcagctgagccccagcctgctgcccaacagcaagagccccagagaggtgcccagccccaaggtgatcaagacccccgtggtgaagaagaccgagagccccatcaagctgagccccgccacccccagcagaaagagaagcgtggccgtgagcgacgaggaggaggtggaggaggaggccgagagaagaaaggagagatgcaagagaggcagattcgtggtgaaggaggagaagaaggacagcaacgagctgagcgacagcgccggcgaggaggacagcgccgacctgaagagagcccagaaggacaagggcctgcacgtggaggtgagagtgaacagagagtggtacaccggcagagtgaccgccgtggaggtgggcaagcacgtggtgagatggaaggtgaagttcgactacgtgcccaccgacaccacccccagagacagatgggtggagaagggcagcgaggacgtgagactgatgaagccccccagccccgagcaccagagcctggacacccagcaggagggcggcgaggaggaggtgggccccgtggcccagcaggccatcgccgtggccgagcccagcaccagcgagtgcctgagaatcgagcccgacaccaccgccctgagcaccaaccacgagaccatcgacctgctggtgcagatcctgagaaactgcctgagatacttcctgccccccagcttccccatcagcaagaagcagctgagcgccatgaacagcgacgagctgatcagcttccccctgaaggagtacttcaagcagtacgaggtgggcctgcagaacctgtgcaacagctaccagagcagagccgacagcagagccaaggccagcgaggagagcctgagaaccagcgagagaaagctgagagagaccgaggagaagctgcagaagctgagaaccaacatcgtggccctgctgcagaaggtgcaggaggacatcgacatcaacaccgacgacgagctggacgcctacatcgaggacctgatcaccaagggcgactag

SEQ ID NO: 99660 - DNA, 627 bp, synthetic construct
  misc_feature 1..627: note = Description of Artificial Sequence: Synthetic coding sequence
  source 1..627: mol_type = other DNA
atgttcgagttcctgagcaaccacatgagagacgcccagggcagactggacagcaccagaggcctgctgtgcggcctgggcgccggcgtggccgaggccgtggtggtggtgtgccccatggagaccatcaaggtgaagttcatccacgaccagaccagccccaaccccaagtacagaggcttcttccacggcgtgagagagatcgtgagagagcagggcctgaagggcacctaccagggcctgaccgccaccgtgctgaagcagggcagcaaccaggccatcagattcttcgtgatgaccagcctgagaaactggtacagaggcgacaaccccaacaagcccatgaaccccctgatcaccggcgtgttcggcgccatcgccggcgccgccagcgtgttcggcaacacccccctggacgtgatcaagaccagaatgcagggcctggaggcccacaagtacagaaacacctgggactgcggcctgcagatcctgaagaaggagggcctgaaggccttctacaagggcaccgtgcccagactgggcagagtgtgcctggacgtggccatcgtgttcgtgatctacgacgaggtggtgaagctgctgaacaaggtgtggaagaccgactag

SEQ ID NO: 99661 - DNA, 999 bp, synthetic construct
  misc_feature 1..999: note = Description of Artificial Sequence: Synthetic coding sequence
  source 1..999: mol_type = other DNA
atggccgccgccaccgccgccgccgccctggccgccgccgaccccccccccgccatgccccaggccgccggcgccggcggccccaccaccagaagagacttctactggctgagaagcttcctggccggcggcatcgccggctgctgcgccaagaccaccgtggcccccctggacagagtgaaggtgctgctgcaggcccacaaccaccactacaagcacctgggcgtgttcagcgccctgagagccgtgccccagaaggagggcttcctgggcctgtacaagggcaacggcgccatgatgatcagaatcttcccctacggcgccatccagttcatggccttcgagcactacaagaccctgatcaccaccaagctgggcatcagcggccacgtgcacagactgatggccggcagcatggccggcatgaccgccgtgatctgcacctaccccctggacatggtgagagtgagactggccttccaggtgaagggcgagcacagctacaccggcatcatccacgccttcaagaccatctacgccaaggagggcggcttcttcggcttctacagaggcctgatgcccaccatcctgggcatggccccctacgccggcgtgagcttcttcaccttcggcaccctgaagagcgtgggcctgagccacgcccccaccctgctgggcagacccagcagcgacaaccccaacgtgctggtgctgaagacccacgtgaacctgctgtgcggcggcgtggccggcgccatcgcccagaccatcagctaccccttcgacgtgaccagaagaagaatgcagctgggcaccgtgctgcccgagttcgagaagtgcctgaccatgagagacaccatgaagtacgtgtacggccaccacggcatcagaaagggcctgtacagaggcctgagcctgaactacatcagatgcatccccagccaggccgtggccttcaccacctacgagctgatgaagcagttcttccacctgaactag

SEQ ID NO: 99662 - DNA, 705 bp, synthetic construct
  misc_feature 1..705: note = Description of Artificial Sequence: Synthetic coding sequence
  source 1..705: mol_type = other DNA
atgatgatcagaatcttcccctacggcgccatccagttcatggccttcgagcactacaagaccctgatcaccaccaagctgggcatcagcggccacgtgcacagactgatggccggcagcatggccggcatgaccgccgtgatctgcacctaccccctggacatggtgagagtgagactggccttccaggtgaagggcgagcacagctacaccggcatcatccacgccttcaagaccatctacgccaaggagggcggcttcttcggcttctacagaggcctgatgcccaccatcctgggcatggccccctacgccggcgtgagcttcttcaccttcggcaccctgaagagcgtgggcctgagccacgcccccaccctgctgggcagacccagcagcgacaaccccaacgtgctggtgctgaagacccacgtgaacctgctgtgcggcggcgtggccggcgccatcgcccagaccatcagctaccccttcgacgtgaccagaagaagaatgcagctgggcaccgtgctgcccgagttcgagaagtgcctgaccatgagagacaccatgaagtacgtgtacggccaccacggcatcagaaagggcctgtacagaggcctgagcctgaactacatcagatgcatccccagccaggccgtggccttcaccacctacgagctgatgaagcagttcttccacctgaactag

SEQ ID NO: 99663 - DNA, 906 bp, synthetic construct
  misc_feature 1..906: note = Description of Artificial Sequence: Synthetic coding sequence
  source 1..906: mol_type = other DNA
atgaagagcaaccccgccatccaggccgccatcgacctgaccgccggcgccgccggcggcaccgcctgcgtgctgaccggccagcccttcgacaccatgaaggtgaagatgcagaccttccccgacctgtacagaggcctgaccgactgctgcctgaagacctacagccaggtgggcttcagaggcttctacaagggcaccagccccgccctgatcgccaacatcgccgagaacagcgtgctgttcatgtgctacggcttctgccagcaggtggtgagaaaggtggccggcctggacaagcaggccaagctgagcgacctgcagaacgccgccgccggcagcttcgccagcgccttcgccgccctggtgctgtgccccaccgagctggtgaagtgcagactgcagaccatgtacgagatggagaccagcggcaagatcgccaagagccagaacaccgtgtggagcgtgatcaagagcatcctgagaaaggacggccccctgggcttctaccacggcctgagcagcaccctgctgagagaggtgcccggctacttcttcttcttcggcggctacgagctgagcagaagcttcttcgccagcggcagaagcaaggacgagctgggccccgtgcccctgatgctgagcggcggcgtgggcggcatctgcctgtggctggccgtgtaccccgtggactgcatcaagagcagaatccaggtgctgagcatgagcggcaagcaggccggcttcatcagaaccttcatcaacgtggtgaagaacgagggcatcaccgccctgtacagcggcctgaagcccaccatgatcagagccttccccgccaacggcgccctgttcctggcctacgagtacagcagaaagctgatgatgaaccagctggaggcctactag

SEQ ID NO: 99664 - DNA, 402 bp, synthetic construct
  misc_feature 1..402: note = Description of Artificial Sequence: Synthetic coding sequence
  source 1..402: mol_type = other DNA
atgaagagcaaccccgccatccaggccgccatcgacctgaccgccggcgccgccggcggcaccgcctgcgtgctgaccggccagcccttcgacaccatgaaggtgaagatgcagaccttccccgacctgtacagaggcctgaccgactgctgcctgaagacctacagccaggtgggcttcagaggcttctacaagggcaccagccccgccctgatcgccaacatcgccgagaacagcgtgctgttcatgtgctacggcttctgccagcaggtggtgagaaaggtggccggcctggacaagcaggccaagctgagcaccgtgtggagcgtgatcaagagcatcctgagaaaggacggccccctgggcttctaccacggcctgagcagcaccctgctgagatag

SEQ ID NO: 99665 - DNA, 402 bp, synthetic construct; identical to SEQ ID NO: 99664
  misc_feature 1..402: note = Description of Artificial Sequence: Synthetic coding sequence
  source 1..402: mol_type = other DNA

SEQ ID NO: 99666 - DNA, 906 bp, synthetic construct; identical to SEQ ID NO: 99663
  misc_feature 1..906: note = Description of Artificial Sequence: Synthetic coding sequence
  source 1..906: mol_type = other DNA

SEQ ID NO: 99667 - DNA, 726 bp, synthetic construct
  misc_feature 1..726: note = Description of Artificial Sequence: Synthetic coding sequence
  source 1..726: mol_type = other DNA
atgaagagcaaccccgccatccaggccgccatcgacctgaccgccggcgccgccggcggcaccgcctgcgtgctgaccggccagcccttcgacaccatgaaggtggccggcctggacaagcaggccaagctgagcgacctgcagaacgccgccgccggcagcttcgccagcgccttcgccgccctggtgctgtgccccaccgagctggtgaagtgcagactgcagaccatgtacgagatggagaccagcggcaagatcgccaagagccagaacaccgtgtggagcgtgatcaagagcatcctgagaaaggacggccccctgggcttctaccacggcctgagcagcaccctgctgagagaggtgcccggctacttcttcttcttcggcggctacgagctgagcagaagcttcttcgccagcggcagaagcaaggacgagctgggccccgtgcccctgatgctgagcggcggcgtgggcggcatctgcctgtggctggccgtgtaccccgtggactgcatcaagagcagaatccaggtgctgagcatgagcggcaagcaggccggcttcatcagaaccttcatcaacgtggtgaagaacgagggcatcaccgccctgtacagcggcctgaagcccaccatgatcagagccttccccgccaacggcgccctgttcctggcctacgagtacagcagaaagctgatgatgaaccagctggaggcctactag

SEQ ID NO: 99668 - DNA, 906 bp, synthetic construct
  misc_feature 1..906: note = Description of Artificial Sequence: Synthetic coding sequence
  source 1..906: mol_type = other DNA
atgaagagcggccccggcatccaggccgccatcgacctgaccgccggcgccgccggcggcaccgcctgcgtgctgaccggccagcccttcgacaccatcaaggtgaagatgcagaccttccccgacctgtacaagggcctgaccgactgcttcctgaagacctacgcccaggtgggcctgagaggcttctacaagggcaccggccccgccctgatggcctacgtggccgagaacagcgtgctgttcatgtgctacggcttctgccagcagttcgtgagaaaggtggccggcatggacaagcaggccaagctgagcgacctgcagaccgccgccgccggcagcttcgccagcgccttcgccgccctggccctgtgccccaccgagctggtgaagtgcagactgcagaccatgtacgagatggagatgagcggcaagatcgccaagagccacaacaccatctggagcgtggtgaagggcatcctgaagaaggacggccccctgggcttctaccacggcctgagcagcaccctgctgcaggaggtgcccggctacttcttcttcttcggcggctacgagctgagcagaagcttcttcgccagcggcagaagcaaggacgagctgggccccgtgcacctgatgctgagcggcggcgtggccggcatctgcctgtggctggtggtgttccccgtggactgcatcaagagcagaatccaggtgctgagcatgtacggcaagcaggccggcttcatcggcaccctgctgagcgtggtgagaaacgagggcatcgtggccctgtacagcggcctgaaggccaccatgatcagagccatccccgccaacggcgccctgttcgtggcctacgagtacagcagaaagatgatgatgaagcagctggaggcctactag

SEQ ID NO: 99669 - DNA, 423 bp, synthetic construct
  misc_feature 1..423: note = Description of Artificial Sequence: Synthetic coding sequence
  source 1..423: mol_type = other DNA
atggccggctggaacgcctacatcgacaacctgatggccgacggcacctgccaggacgccgccatcgtgggctacaaggacagccccagcgtgtgggccgccgtgcccggcaagaccttcgtgaacatcacccccgccgaggtgggcgtgctggtgggcaaggacagaagcagcttctacgtgaacggcctgaccctgggcggccagaagtgcagcgtgatcagagacagcctgctgcaggacggcgagttcagcatggacctgagaaccaagagcaccggcggcgcccccaccttcaacgtgaccgtgaccaagaccgacaagaccctggtgctgctgatgggcaaggagggcgtgcacggcggcctgatcaacaagaagtgctacgagatggccagccacctgagaagaagccagtactag

SEQ ID NO: 99670 - DNA, 792 bp, synthetic construct
  misc_feature 1..792: note = Description of Artificial Sequence: Synthetic coding sequence
  source 1..792: mol_type = other DNA
atggccgccaccgccagcgccggcgccggcggcatcgacggcaagcccagaaccagccccaagagcgtgaagttcctgttcggcggcctggccggcctgagcgccggcctgctgagacaggccacctacaccaccaccagactgggcatctacaccgtgctgttcgagagactgaccggcgccgacggcaccccccccggcttcctgctgaaggccgtgatcggcatgaccgccggcgccaccggcgccttcgtgggcacccccgccgaggtggccctgatcagaatgaccgccgacggcagactgcccgccgaccagagaagaggctacaagaacgtgttcaacgccctgatcagaatcaccagagaggagggcgtgctgaccctgtggagaggctgcatccccaccatggccagagccgtggtggtgaacgccgcccagctggccagctacagccagagcaagcagttcctgctggacagcggctacttcagcgacaacatcctgtgccacttctgcgccagcatgatcagcggcctggtgaccaccgccgccagcatgcccgtggacatcgccaagaccagaatccagaacatgagaatgatcgacggcaagcccgagtacaagaacggcctggacgtgctgttcaaggtggtgagatacgagggcttcttcagcctgtggaagggcttcaccccctactacgccagactgggcccccacaccgtgctgaccttcatcttcctggagcagatgaacaaggcctacaagagactgttcctgagcggctag

SEQ ID NO: 99671 - DNA, 678 bp, synthetic construct
  misc_feature 1..678: note = Description of Artificial Sequence: Synthetic coding sequence
  source 1..678: mol_type = other DNA
atggagtactggtacgtggccctgaagcagcagagcctgaaggccgacatcctgcccagcctgttcctgagcatcttcctggtgaagggcgtggtgaacgtgctgctgaccacccccctgtgggtggtgaacaccagactgaagctgcagggcgccaagttcagaaacgaggacatcgtgcccaccaactacaagggcatcatcgacgccttccaccagatcatcagagacgagggcatcagcgccctgtggaacggcaccttccccagcctgctgctggtgttcaaccccgccatccagttcatgttctacgagggcctgaagagacagctgctgaagaagagaatgaagctgagcagcctggacgtgttcatcatcggcgccgtggccaaggccatcgccaccaccgtgacctaccccctgcagaccgtgcagagcatcctgagattcggcagacacagactgaaccccgagaacagaaccctgggcagcctgagaaacatcctgtacctgctgcaccagagagtgagaagattcggcatcatgggcctgtacaagggcctggaggccaagctgctgcagaccgtgctgaccgccgccctgatgttcctggtgtacgagaagctgaccgccgccaccttcaccgtgatgggcctgaagagagcccaccagcactag

SEQ ID NO: 99672 - DNA, 279 bp, synthetic construct
  misc_feature 1..279: note = Description of Artificial Sequence: Synthetic coding sequence
  source 1..279: mol_type = other DNA
atgggcagcgtgaccgccatgaccgtgttcttccccctggacaccgccagactgagactgcaggtggacgagaagagaaagagcaagaccacccacatggtgctgctggagatcatcaaggaggagggcctgctggccccctacagaggctggttccccgtgatcagcagcctgtgctgcagcaacttcgtgtacttctacaccttcaacagcctgaaggccctgtgggtgaagggccagcacagcaccaccggcaaggacctggtggtgggcttctag

SEQ ID NO: 99673 - DNA, 924 bp, synthetic construct
  misc_feature 1..924: note = Description of Artificial Sequence: Synthetic coding sequence
  source 1..924: mol_type = other DNA
atggccagcgtgctgagctacgagagcctggtgcacgccgtggccggcgccgtgggcagcgtgaccgccatgaccgtgttcttccccctggacaccgccagactgagactgcaggtggacgagaagagaaagagcaagaccacccacatggtgctgctggagatcatcaaggaggagggcctgctggccccctacagaggctggttccccgtgatcagcagcctgtgctgcagcaacttcgtgtacttctacaccttcaacagcctgaaggccctgtgggtgaagggccagcacagcaccaccggcaaggacctggtggtgggcttcgtggccggcgtggtgaacgtgctgctgaccacccccctgtgggtggtgaacaccagactgaagctgcagggcgccaagttcagaaacgaggacatcgtgcccaccaactacaagggcatcatcgacgccttccaccagatcatcagagacgagggcatcagcgccctgtggaacggcaccttccccagcctgctgctggtgttcaaccccgccatccagttcatgttctacgagggcctgaagagacagctgctgaagaagagaatgaagctgagcagcctggacgtgttcatcatcggcgccgtggccaaggccatcgccaccaccgtgacctaccccctgcagaccgtgcagagcatcctgagattcggcagacacagactgaaccccgagaacagaaccctgggcagcctgagaaacatcctgtacctgctgcaccagagagtgagaagattcggcatcatgggcctgtacaagggcctggaggccaagctgctgcagaccgtgctgaccgccgccctgatgttcctggtgtacgagaagctgaccgccgccaccttcaccgtgatgggcctgaagagagcccaccagcactag

SEQ ID NO: 99674 - DNA, 705 bp, synthetic construct
  misc_feature 1..705: note = Description of Artificial Sequence: Synthetic coding sequence
  source 1..705: mol_type = other DNA
atggccagcgtgctgagctacgagagcctggtgcacgccgtggccggcgccgtgggcagcgtgaccgccatgaccgtgttcttccccctggacaccgccagactgagactgcagggcgtggtgaacgtgctgctgaccacccccctgtgggtggtgaacaccagactgaagctgcagggcgccaagttcagaaacgaggacatcgtgcccaccaactacaagggcatcatcgacgccttccaccagatcatcagagacgagggcatcagcgccctgtggaacggcaccttccccagcctgctgctggtgttcaaccccgccatccagttcatgttctacgagggcctgaagagacagctgctgaagaagagaatgaagctgagcagcctggacgtgttcatcatcggcgccgtggccaaggccatcgccaccaccgtgacctaccccctgcagaccgtgcagagcatcctgagattcggcagacacagactgaaccccgagaacagaaccctgggcagcctgagaaacatcctgtacctgctgcaccagagagtgagaagattcggcatcatgggcctgtacaagggcctggaggccaagctgctgcagaccgtgctgaccgccgccctgatgttcctggtgtacgagaagctgaccgccgccaccttcaccgtgatgggcctgaagagagcccaccagcactag

SEQ ID NO: 99675 - DNA, 813 bp, synthetic construct
  misc_feature 1..813: note = Description of Artificial Sequence: Synthetic coding sequence
  source 1..813: mol_type = other DNA
atgatcgacgagaagagaaagagcaagaccacccacatggtgctgctggagatcatcaaggaggagggcctgctggccccctacagaggctggttccccgtgatcagcagcctgtgctgcagcaacttcgtgtacttctacaccttcaacagcctgaaggccctgtgggtgaagggccagcacagcaccaccggcaaggacctggtggtgggcttcgtggccggcgtggtgaacgtgctgctgaccacccccctgtgggtggtgaacaccagactgaagctgcagggcgccaagttcagaaacgaggacatcgtgcccaccaactacaagggcatcatcgacgccttccaccagatcatcagagacgagggcatcagcgccctgtggaacggcaccttccccagcctgctgctggtgttcaaccccgccatccagttcatgttctacgagggcctgaagagacagctgctgaagaagagaatgaagctgagcagcctggacgtgttcatcatcggcgccgtggccaaggccatcgccaccaccgtgacctaccccctgcagaccgtgcagagcatcctgagattcggcagacacagactgaaccccgagaacagaaccctgggcagcctgagaaacatcctgtacctgctgcaccagagagtgagaagattcggcatcatgggcctgtacaagggcctggaggccaagctgctgcagaccgtgctgaccgccgccctgatgttcctggtgtacgagaagctgaccgccgccaccttcaccgtgatgggcctgaagagagcccaccagcactag

SEQ ID NO: 99676 - DNA, 1086 bp, synthetic construct
  misc_feature 1..1086: note = Description of Artificial Sequence: Synthetic coding sequence
  source 1..1086: mol_type = other DNA
atgttcagcagcgtggcccacctggccagagccaaccccttcaacaccccccacctgcagctggtgcacgacggcctgggcgacctgagaagcagcagccccggccccaccggccagcccagaagacccagaaacctggccgccgccgccgtggaggagtacagctgcgagttcggcagcgccaagtactacgccctgtgcggcttcggcggcgtgctgagctgcggcctgacccacaccgccgtggtgcccctggacctggtgaagtgcagaatgcaggtggacccccagaagtacaagggcatcttcaacggcttcagcgtgaccctgaaggaggacggcgtgagaggcctggccaagggctgggcccccaccttcctgggctacagcatgcagggcctgtgcaagttcggcttctacgaggtgttcaaggtgctgtacagcaacatgctgggcgaggagaacacctacctgtggagaaccagcctgtacctggccgccagcgccagcgccgagttcttcgccgacatcgccctggcccccatggaggccgccaaggtgagaatccagacccagcccggctacgccaacaccctgagagacgccgcccccaagatgtacaaggaggagggcctgaaggccttctacaagggcgtggcccccctgtggatgagacagatcccctacaccatgatgaagttcgcctgcttcgagagaaccgtggaggccctgtacaagttcgtggtgcccaagcccagaagcgagtgcagcaagcccgagcagctggtggtgaccttcgtggccggctacatcgccggcgtgttctgcgccatcgtgagccaccccgccgacagcgtggtgagcgtgctgaacaaggagaagggcagcagcgccagcctggtgctgaagagactgggcttcaagggcgtgtggaagggcctgttcgccagaatcatcatgatcggcaccctgaccgccctgcagtggttcatctacgacagcgtgaaggtgtacttcagactgcccagaccccccccccccgagatgcccgagagcctgaagaagaagctgggcctgacccagtag

SEQ ID NO: 99677 - DNA, 1776 bp, synthetic construct
  misc_feature 1..1776: note = Description of Artificial Sequence: Synthetic coding sequence
  source 1..1776: mol_type = other DNA
atggacgacctggacgccctgctggccgacctggagagcaccaccagccacatcagcaagagacccgtgttcctgagcgaggagaccccctacagctaccccaccggcaaccacacctaccaggagatcgccgtgcccccccccgtgccccccccccccagcagcgaggccctgaacggcaccatcctggaccccctggaccagtggcagcccagcagcagcagattcatccaccagcagccccagagcagcagccccgtgtacggcagcagcgccaagaccagcagcgtgagcaacccccaggacagcgtgggcagcccctgcagcagagtgggcgaggaggagcacgtgtacagcttccccaacaagcagaagagcgccgagcccagccccaccgtgatgagcaccagcctgggcagcaacctgagcgagctggacagactgctgctggagctgaacgccgtgcagcacaacccccccggcttccccgccgacgaggccaacagcagcccccccctgcccggcgccctgagccccctgtacggcgtgcccgagaccaacagccccctgggcggcaaggccggccccctgaccaaggagaagcccaagagaaacggcggcagaggcctggaggacgtgagacccagcgtggagagcctgctggacgagctggagagcagcgtgcccagccccgtgcccgccatcaccgtgaaccagggcgagatgagcagcccccagagagtgaccagcacccagcagcagaccagaatcagcgccagcagcgccaccagagagctggacgagctgatggccagcctgagcgacttcaagatccagggcctggagcagagagccgacggcgagagatgctgggccgccggctggcccagagacggcggcagaagcagccccggcggccaggacgagggcggcttcatggcccagggcaagaccggcagcagcagcccccccggcggcccccccaagcccggcagccagctggacagcatgctgggcagcctgcagagcgacctgaacaagctgggcgtggccaccgtggccaagggcgtgtgcggcgcctgcaagaagcccatcgccggccaggtggtgaccgccatgggcaagacctggcaccccgagcacttcgtgtgcacccactgccaggaggagatcggcagcagaaacttcttcgagagagacggccagccctactgcgagaaggactaccacaacctgttcagccccagatgctactactgcaacggccccatcctggacaaggtggtgaccgccctggacagaacctggcaccccgagcacttcttctgcgcccagtgcggcgccttcttcggccccgagggcttccacgagaaggacggcaaggcctactgcagaaaggactacttcgacatgttcgcccccaagtgcggcggctgcgccagagccatcctggagaactacatcagcgccctgaacaccctgtggcaccccgagtgcttcgtgtgcagagagtgcttcacccccttcgtgaacggcagcttcttcgagcacgacggccagccctactgcgaggtgcactaccacgagagaagaggcagcctgtgcagcggctgccagaagcccatcaccggcagatgcatcaccgccatggccaagaagttccaccccgagcacttcgtgtgcgccttctgcctgaagcagctgaacaagggcaccttcaaggagcagaacgacaagccctactgccagaactgcttcctgaagctgttctgctag

SEQ ID NO: 99678 - DNA, 1086 bp, synthetic construct; identical to SEQ ID NO: 99676
  misc_feature 1..1086: note = Description of Artificial Sequence: Synthetic coding sequence
  source 1..1086: mol_type = other DNA

SEQ ID NO: 99679 - DNA, 1086 bp, synthetic construct; identical to SEQ ID NO: 99676
  misc_feature 1..1086: note = Description of Artificial Sequence: Synthetic coding sequence
  source 1..1086: mol_type = other DNA

SEQ ID NO: 99680 - DNA, 1089 bp, synthetic construct; identical to SEQ ID NO: 90888
  misc_feature 1..1089: note = Description of Artificial Sequence: Synthetic coding sequence
  source 1..1089: mol_type = other DNA

SEQ ID NO: 99681 - DNA, 1086 bp, synthetic construct; identical to SEQ ID NO: 99676
  misc_feature 1..1086: note = Description of Artificial Sequence: Synthetic coding sequence
  source 1..1086: mol_type = other DNA

SEQ ID NO: 99682 - DNA, 897 bp, synthetic construct
  misc_feature 1..897: note = Description of Artificial Sequence: Synthetic coding sequence
  source 1..897: mol_type = other DNA
atgagcgccaagcccgaggtgagcctggtgagagaggccagcagacagatcgtggccggcggcagcgccggcctggtggagatctgcctgatgcaccccctggacgtggtgaagaccagattccagatccagagatgcgccaccgaccccaacagctacaagagcctggtggacagcttcagaatgatcttccagatggagggcctgttcggcttctacaagggcatcctgccccccatcctggccgagacccccaagagagccgtgaagttcttcaccttcgagcagtacaagaagctgctgggctacgtgagcctgagccccgccctgaccttcgccatcgccggcctgggcagcggcctgaccgaggccatcgtggtgaaccccttcgaggtggtgaaggtgggcctgcaggccaacagaaacaccttcgccgagcagcccagcaccgtgggctacgccagacagatcatcaagaaggagggctggggcctgcagggcctgaacaagggcctgaccgccaccctgggcagacacggcgtgttcaacatggtgtacttcggcttctactacaacgtgaagaacatgatccccgtgaacaaggaccccatcctggagttctggagaaagttcggcatcggcctgctgagcggcaccatcgccagcgtgatcaacatccccttcgacgtggccaagagcagaatccagggcccccagcccgtgcccggcgagatcaagtacagaacctgcttcaagaccatggccaccgtgtaccaggaggagggcatcctggccctgtacaagggcctgctgcccaagatcatgagactgggccccggcggcgccgtgatgctgctggtgtacgagtacacctacagctggctgcaggagaactag

SEQ ID NO: 99683 - DNA, 900 bp, synthetic construct
  misc_feature 1..900: note = Description of Artificial Sequence: Synthetic coding sequence
  source 1..900: mol_type = other DNA
atgagcgccaagcccgaggtgagcctggtgagagaggccagcagacagatcgtggccggcggcagcgccggcctggtggagatctgcctgatgcaccccctggacgtggtgaagaccagattccagatccagagatgcgccaccgaccccaacagctacaagagcctggtggacagcttcagaatgatcttccagatggagggcctgttcggcttctacaagggcatcctgccccccatcctggccgagacccccaagagagccgtgaagttcttcaccttcgagcagtacaagaagctgctgggctacgtgagcctgagccccgccctgaccttcgccatcgccggcctgggcagcggcctgaccgaggccatcgtggtgaaccccttcgaggtggtgaaggtgggcctgcaggccaacagaaacaccttcgccgagcagcccagcaccgtgggctacgccagacagatcatcaagaaggagggctggggcctgcagggcctgaacaagggcctgaccgccaccctgggcagacacggcgtgttcaacatggtgtacttcggcttctactacaacgtgaagaacatgatccccgtgaacaaggaccccatcctggagttctggagaaagttcggcatcggcctgctgagcggcaccatcgccagcgtgatcaacatccccttcgacgtggccaagagcagaatccagggcccccagcccgtgcccggcgagatcaagtacagaacctgcttcaagaccatggccaccgtgtaccaggaggagggcatcctggccctgtacaagggcctgctgcccaagatcatgagactgggccccggcggcgccgtgatgctgctggtgtacgagtacacctacagctggctgcaggagaactggtag

SEQ ID NO: 99684 - DNA, 963 bp, synthetic construct
  misc_feature 1..963: note = Description of Artificial Sequence: Synthetic coding sequence
  source 1..963: mol_type = other DNA
atggtgggctacgaccccaagcccgacggcagaaacaacaccaagttccaggtggccgtggccggcagcgtgagcggcctggtgaccagagccctgatcagccccttcgacgtgatcaagatcagattccagctgcagcacgagagactgagcagaagcgaccccagcgccaagtaccacggcatcctgcaggccagcagacagatcctgcaggaggagggccccaccgccttctggaagggccacgtgcccgcccagatcctgagcatcggctacggcgccgtgcagttcctgagcttcgagatgctgaccgagctggtgcacagaggcagcgtgtacgacgccagagagttcagcgtgcacttcgtgtgcggcggcctggccgcctgcatggccaccctgaccgtgcaccccgtggacgtgctgagaaccagattcgccgcccagggcgagcccaaggtgtacaacaccctgagacacgccgtgggcaccatgtacagaagcgagggcccccaggtgttctacaagggcctggcccccaccctgatcgccatcttcccctacgccggcctgcagttcagctgctacagcagcctgaagcacctgtacaagtgggccatccccgccgagggcaagaagaacgagaacctgcagaacctgctgtgcggcagcggcgccggcgtgatcagcaagaccctgacctaccccctggacctgttcaagaagagactgcaggtgggcggcttcgagcacgccagagccgccttcggccaggtgagaagatacaagggcctgatggactgcgccaagcaggtgctgcagaaggagggcgccctgggcttcttcaagggcctgagccccagcctgctgaaggccgccctgagcaccggcttcatgttcttcagctacgagttcttctgcaacgtgttccactgcatgaacagaaccgccagccagagatag

SEQ ID NO: 99685 - DNA, 963 bp, synthetic construct; identical to SEQ ID NO: 99684
  misc_feature 1..963: note = Description of Artificial Sequence: Synthetic coding sequence
  source 1..963: mol_type = other DNA

SEQ ID NO: 99686 - DNA, 792 bp, synthetic construct
  misc_feature 1..792: note = Description of Artificial Sequence: Synthetic coding sequence
  source 1..792: mol_type = other DNA
atggtgggctacgaccccaagcccgacggcagaaacaacaccaagttccaggtggccgtggccggcagcgtgagcggcctggtgaccagagccctgatcagccccttcgacgtgatcaagatcagattccagctgcagcacgagagactgagcagaagcgaccccagcgccaagtaccacggcatcctgcaggccagcagacagatcctgcaggaggagggccccaccgccttctggaagggccacgtgcccgcccagatcctgagcatcggctacggcgccgtgcaggtgtacaacaccctgagacacgccgtgggcaccatgtacagaagcgagggcccccaggtgttctacaagggcctggcccccaccctgatcgccatcttcccctacgccggcctgcagttcagctgctacagcagcctgaagcacctgtacaagtgggccatccccgccgagggcaagaagaacgagaacctgcagaacctgctgtgcggcagcggcgccggcgtgatcagcaagaccctgacctaccccctggacctgttcaagaagagactgcaggtgggcggcttcgagcacgccagagccgccttcggccaggtgagaagatacaagggcctgatggactgcgccaagcaggtgctgcagaaggagggcgccctgggcttcttcaagggcctgagccccagcctgctgaaggccgccctgagcaccggcttcatgttcttcagctacgagttcttctgcaacgtgttccactgcatgaacagaaccgccagccagagatag

SEQ ID NO: 99687 - DNA, 963 bp, synthetic construct; identical to SEQ ID NO: 99684
  misc_feature 1..963: note = Description of Artificial Sequence: Synthetic coding sequence
  source 1..963: mol_type = other DNA

SEQ ID NO: 99688 - DNA, 963 bp, synthetic construct; identical to SEQ ID NO: 99684
  misc_feature 1..963: note = Description of Artificial Sequence: Synthetic coding sequence
  source 1..963: mol_type = other DNA

SEQ ID NO: 99689 - DNA, 963 bp, synthetic construct; identical to SEQ ID NO: 99684
  misc_feature 1..963: note = Description of Artificial Sequence: Synthetic coding sequence
  source 1..963: mol_type = other DNA

SEQ ID NO: 99690 - DNA, 2028 bp, synthetic construct
  misc_feature 1..2028: note = Description of Artificial Sequence: Synthetic coding sequence
  source 1..2028: mol_type = other DNA
atggccgccgccaaggtggccctgaccaagagagccgaccccgccgagctgagaaccatcttcctgaagtacgccagcatcgagaagaacggcgagttcttcatgagccccaacgacttcgtgaccagatacctgaacatcttcggcgagagccagcccaaccccaagaccgtggagctgctgagcggcgtggtggaccagaccaaggacggcctgatcagcttccaggagttcgtggccttcgagagcgtgctgtgcgcccccgacgccctgttcatggtggccttccagctgttcgacaaggccggcaagggcgaggtgaccttcgaggacgtgaagcaggtgttcggccagaccaccatccaccagcacatccccttcaactgggacagcgagttcgtgcagctgcacttcggcaaggagagaaagagacacctgacctacgccgagttcacccagttcctgctggagatccagctggagcacgccaagcaggccttcgtgcagagagacaacgccagaaccggcagagtgaccgccatcgacttcagagacatcatggtgaccatcagaccccacgtgctgacccccttcgtggaggagtgcctggtggccgccgccggcggcaccaccagccaccaggtgagcttcagctacttcaacggcttcaacagcctgctgaacaacatggagctgatcagaaagatctacagcaccctggccggcaccagaaaggacgtggaggtgaccaaggaggagttcgtgctggccgcccagaagttcggccaggtgacccccatggaggtggacatcctgttccagctggccgacctgtacgagcccagaggcagaatgaccctggccgacatcgagagaatcgcccccctggaggagggcaccctgcccttcaacctggccgaggcccagagacagaaggccagcggcgacagcgccagacccgtgctgctgcaggtggccgagagcgcctacagattcggcctgggcagcgtggccggcgccgtgggcgccaccgccgtgtaccccatcgacctggtgaagaccagaatgcagaaccagagaagcaccggcagcttcgtgggcgagctgatgtacaagaacagcttcgactgcttcaagaaggtgctgagatacgagggcttcttcggcctgtacagaggcctgctgccccagctgctgggcgtggcccccgagaaggccatcaagctgaccgtgaacgacttcgtgagagacaagttcatgcacaaggacggcagcgtgcccctggccgccgagatcctggccggcggctgcgccggcggcagccaggtgatcttcaccaaccccctggagatcgtgaagatcagactgcaggtggccggcgagatcaccaccggccccagagtgagcgccctgagcgtggtgagagacctgggcttcttcggcatctacaagggcgccaaggcctgcttcctgagagacatccccttcagcgccatctacttcccctgctacgcccacgtgaaggccagcttcgccaacgaggacggccaggtgagccccggcagcctgctgctggccggcgccatcgccggcatgcccgccgccagcctggtgacccccgccgacgtgatcaagaccagactgcaggtggccgccagagccggccagaccacctacagcggcgtgatcgactgcttcagaaagatcctgagagaggagggccccaaggccctgtggaagggcgccggcgccagagtgttcagaagcagcccccagttcggcgtgaccctgctgacctacgagctgctgcagagatggttctacatcgacttcggcggcgtgaagcccatgggcagcgagcccgtgcccaagagcagaatcaacctgcccgcccccaaccccgaccacgtgggcggctacaagctggccgtggccaccttcgccggcatcgagaacaagttcggcctgtacctgcccctgttcaagcccagcgtgagcaccagcaaggccatcggcggcggcccctag

SEQ ID NO: 99691 - DNA, 2031 bp, synthetic construct
  misc_feature 1..2031: note = Description of Artificial Sequence: Synthetic coding sequence
  source 1..2031: mol_type = other DNA
atggccgccgccaaggtggccctgaccaagagagccgaccccgccgagctgagaaccatcttcctgaagtacgccagcatcgagaagaacggcgagttcttcatgagccccaacgacttcgtgaccagatacctgaacatcttcggcgagagccagcccaaccccaagaccgtggagctgctgagcggcgtggtggaccagaccaaggacggcctgatcagcttccaggagttcgtggccttcgagagcgtgctgtgcgcccccgacgccctgttcatggtggccttccagctgttcgacaaggccggcaagggcgaggtgaccttcgaggacgtgaagcaggtgttcggccagaccaccatccaccagcacatccccttcaactgggacagcgagttcgtgcagctgcacttcggcaaggagagaaagagacacctgacctacgccgagttcacccagttcctgctggagatccagctggagcacgccaagcaggccttcgtgcagagagacaacgccagaaccggcagagtgaccgccatcgacttcagagacatcatggtgaccatcagaccccacgtgctgacccccttcgtggaggagtgcctggtggccgccgccggcggcaccaccagccaccaggtgagcttcagctacttcaacggcttcaacagcctgctgaacaacatggagctgatcagaaagatctacagcaccctggccggcaccagaaaggacgtggaggtgaccaaggaggagttcgtgctggccgcccagaagttcggccaggtgacccccatggaggtggacatcctgttccagctggccgacctgtacgagcccagaggcagaatgaccctggccgacatcgagagaatcgcccccctggaggagggcaccctgcccttcaacctggccgaggcccagagacagcagaaggccagcggcgacagcgccagacccgtgctgctgcaggtggccgagagcgcctacagattcggcctgggcagcgtggccggcgccgtgggcgccaccgccgtgtaccccatcgacctggtgaagaccagaatgcagaaccagagaagcaccggcagcttcgtgggcgagctgatgtacaagaacagcttcgactgcttcaagaaggtgctgagatacgagggcttcttcggcctgtacagaggcctgctgccccagctgctgggcgtggcccccgagaaggccatcaagctgaccgtgaacgacttcgtgagagacaagttcatgcacaaggacggcagcgtgcccctggccgccgagatcctggccggcggctgcgccggcggcagccaggtgatcttcaccaaccccctggagatcgtgaagatcagactgcaggtggccggcgagatcaccaccggccccagagtgagcgccctgagcgtggtgagagacctgggcttcttcggcatctacaagggcgccaaggcctgcttcctgagagacatccccttcagcgccatctacttcccctgctacgcccacgtgaaggccagcttcgccaacgaggacggccaggtgagccccggcagcctgctgctggccggcgccatcgccggcatgcccgccgccagcctggtgacccccgccgacgtgatcaagaccagactgcaggtggccgccagagccggccagaccacctacagcggcgtgatcgactgcttcagaaagatcctgagagaggagggccccaaggccctgtggaagggcgccggcgccagagtgttcagaagcagcccccagttcggcgtgaccctgctgacctacgagctgctgcagagatggttctacatcgacttcggcggcgtgaagcccatgggcagcgagcccgtgcccaagagcagaatcaacctgcccgcccccaaccccgaccacgtgggcggctacaagctggccgtggccaccttcgccggcatcgagaacaagttcggcctgtacctgcccctgttcaagcccagcgtgagcaccagcaaggccatcggcggcggcccctag

SEQ ID NO: 99692 - DNA, 1704 bp, synthetic construct
  misc_feature 1..1704: note = Description of Artificial Sequence: Synthetic coding sequence
  source 1..1704: mol_type = other DNA
atggaggacgtgaagcaggtgttcggccagaccaccatccaccagcacatccccttcaactgggacagcgagttcgtgcagctgcacttcggcaaggagagaaagagacacctgacctacgccgagttcacccagttcctgctggagatccagctggagcacgccaagcaggccttcgtgcagagagacaacgccagaaccggcagagtgaccgccatcgacttcagagacatcatggtgaccatcagaccccacgtgctgacccccttcgtggaggagtgcctggtggccgccgccggcggcaccaccagccaccaggtgagcttcagctacttcaacggcttcaacagcctgctgaacaacatggagctgatcagaaagatctacagcaccctggccggcaccagaaaggacgtggaggtgaccaaggaggagttcgtgctggccgcccagaagttcggccaggtgacccccatggaggtggacatcctgttccagctggccgacctgtacgagcccagaggcagaatgaccctggccgacatcgagagaatcgcccccctggaggagggcaccctgcccttcaacctggccgaggcccagagacagaaggccagcggcgacagcgccagacccgtgctgctgcaggtggccgagagcgcctacagattcggcctgggcagcgtggccggcgccgtgggcgccaccgccgtgtaccccatcgacctggtgaagaccagaatgcagaaccagagaagcaccggcagcttcgtgggcgagctgatgtacaagaacagcttcgactgcttcaagaaggtgctgagatacgagggcttcttcggcctgtacagaggcctgctgccccagctgctgggcgtggcccccgagaaggccatcaagctgaccgtgaacgacttcgtgagagacaagttcatgcacaaggacggcagcgtgcccctggccgccgagatcctggccggcggctgcgccggcggcagccaggtgatcttcaccaaccccctggagatcgtgaagatcagactgcaggtggccggcgagatcaccaccggccccagagtgagcgccctgagcgtggtgagagacctgggcttcttcggcatctacaagggcgccaaggcctgcttcctgagagacatccccttcagcgccatctacttcccctgctacgcccacgtgaaggccagcttcgccaacgaggacggccaggtgagccccggcagcctgctgctggccggcgccatcgccggcatgcccgccgccagcctggtgacccccgccgacgtgatcaagaccagactgcaggtggccgccagagccggccagaccacctacagcggcgtgatcgactgcttcagaaagatcctgagagaggagggccccaaggccctgtggaagggcgccggcgccagagtgttcagaagcagcccccagttcggcgtgaccctgctgacctacgagctgctgcagagatggttctacatcgacttcggcggcgtgaagcccatgggcagcgagcccgtgcccaagagcagaatcaacctgcccgcccccaaccccgaccacgtgggcggctacaagctggccgtggccaccttcgccggcatcgagaacaagttcggcctgtacctgcccctgttcaagcccagcgtgagcaccagcaaggccatcggcggcggcccctag

SEQ ID NO: 99693 - DNA, 561 bp, synthetic construct
  misc_feature 1..561: note = Description of Artificial Sequence: Synthetic coding sequence
  source 1..561: mol_type = other DNA
atgaagcacatgctggccgccagcgccggcgaggtggtggcctgcctgatcagagtgcccagcgaggtggtgaagcagagagcccaggtgagcgccagcaccagaaccttccagatcttcagcaacatcctgtacgaggagggcatccagggcctgtacagaggctacaagagcaccgtgctgagagagatccccttcagcctggtgcagttccccctgtgggagagcctgaaggccctgtggagctggagacaggaccacgtggtggacagctggcagagcgccgtgtgcggcgccttcgccggcggcttcgccgccgccgtgaccacccccctggacgtggccaagaccagaatcaccctggccaaggccggcagcagcaccgccgacggcaacgtgctgagcgtgctgcacggcgtgtggagaagccagggcctggccggcctgttcgccggcgtgttccccagaatggccgccatcagcctgggcggcttcatcttcctgggcgcctacgacagaacccacagcctgctgctggaggtgggcagaaagagcccctag

SEQ ID NO: 99694 - DNA, 825 bp, synthetic construct
  misc_feature 1..825: note = Description of Artificial Sequence: Synthetic coding sequence
  source 1..825: mol_type = other DNA
atggacagacccggcttcgtggccgccctggtggccggcggcgtggccggcgtgagcgtggacctgatcctgttccccctggacaccatcaagaccagactgcagagcccccagggcttcagcaaggccggcggcttccacggcatctacgccggcgtgcccagcgccgccatcggcagcttccccaacgccgccgccttcttcatcacctacgagtacgtgaagtggttcctgcacgccgacagcagcagctacctgacccccatgaagcacatgctggccgccagcgccggcgaggtggtggcctgcctgatcagagtgcccagcgaggtggtgaagcagagagcccaggtgagcgccagcaccagaaccttccagatcttcagcaacatcctgtacgaggagggcatccagggcctgtacagaggctacaagagcaccgtgctgagagagatccccttcagcctggtgcagttccccctgtgggagagcctgaaggccctgtggagctggagacaggaccacgtggtggacagctggcagagcgccgtgtgcggcgccttcgccggcggcttcgccgccgccgtgaccacccccctggacgtggccaagaccagaatcaccctggccaaggccggcagcagcaccgccgacggcaacgtgctgagcgtgctgcacggcgtgtggagaagccagggcctggccggcctgttcgccggcgtgttccccagaatggccgccatcagcctgggcggcttcatcttcctgggcgcctacgacagaacccacagcctgctgctggaggtgggcagaaagagcccctag

SEQ ID NO: 99695 - DNA, 66 bp, synthetic construct
  misc_feature 1..66: note = Description of Artificial Sequence: Synthetic coding sequence
  source 1..66: mol_type = other DNA
atggacagacccggcttcgtggccgccctggtgctgctgcacttcctgagccccatgaacatgtag

SEQ ID NO: 99696 - DNA, 477 bp, synthetic construct
  misc_feature 1..477: note = Description of Artificial Sequence: Synthetic coding sequence
  source 1..477: mol_type = other DNA
atggagggcaagagaaagctggagggcaagcccctgagattcagaggcgtgcaccacgccttcgccaagatcctggccgagggcggcatcagaggcctgtgggccggctgggtgcccaacatccagagagccgccctggtgaacatgggcgacctgaccacctacgacaccgtgaagcactacctggtgctgaacacccccctggaggacaacatcatgacccacggcctgagcagcctgtgcagcggcctggtggccagcatcctgggcacccccgccgacgtgatcaagagcagaatcatgaaccagcccagagacaagcagggcagaggcctgctgtacaagagcagcaccgactgcctgatccaggccgtgcagggcgagggcttcatgagcctgtacaagggcttcctgcccagctggctgagaatggccgccgtgatcgtgaacagcagcagaagccagctgaaggtgtag

SEQ ID NO: 99697 - DNA, 972 bp, synthetic construct
  misc_feature 1..972: note = Description of Artificial Sequence: Synthetic coding sequence
  source 1..972: mol_type = other DNA
atgagcgtgcccgaggaggaggagagactgctgcccctgacccagagatggcccagagccagcaagttcctgctgagcggctgcgccgccaccgtggccgagctggccaccttccccctggacctgaccaagaccagactgcagatgcagggcgaggccgccctggccagactgggcgacggcgccagagagagcgccccctacagaggcatggtgagaaccgccctgggcatcatcgaggaggagggcttcctgaagctgtggcagggcgtgacccccgccatctacagacacgtggtgtacagcggcggcagaatggtgacctacgagcacctgagagaggtggtgttcggcaagagcgaggacgagcactaccccctgtggaagagcgtgatcggcggcatgatggccggcgtgatcggccagttcctggccaaccccaccgacctggtgaaggtgcagatgcagatggagggcaagagaaagctggagggcaagcccctgagattcagaggcgtgcaccacgccttcgccaagatcctggccgagggcggcatcagaggcctgtgggccggctgggtgcccaacatccagagagccgccctggtgaacatgggcgacctgaccacctacgacaccgtgaagcactacctggtgctgaacacccccctggaggacaacatcatgacccacggcctgagcagcctgtgcagcggcctggtggccagcatcctgggcacccccgccgacgtgatcaagagcagaatcatgaaccagcccagagacaagcagggcagaggcctgctgtacaagagcagcaccgactgcctgatccaggccgtgcagggcgagggcttcatgagcctgtacaagggcttcctgcccagctggctgagaatgaccccctggagcatggtgttctggctgacctacgagaagatcagagagatgagcggcgtgagccccttctag

SEQ ID NO: 99698 - DNA, 738 bp, synthetic construct
  misc_feature 1..738: note = Description of Artificial Sequence: Synthetic coding sequence
  source 1..738: mol_type = other DNA
atgagcgtgcccgaggaggaggagagactgctgcccctgacccagagatggcccagagccagcaagttcctgctgagcggctgcgccgccaccgtggccgagctggccaccttccccctggacctgaccaagaccagactgcagatgcagggcgaggccgccctggccagactgggcgacggcgccagagagagcgccccctacagaggcatggtgagaaccgccctgggcatcatcgaggaggagggcttcctgaagctgtggcagggcgtgacccccgccatctacagacacgtggtgtacagcggcggcagaatggtgacctacgagcacctgagagaggtggtgttcggcaagagcgaggacgagcactaccccctgtggaagagcgtgatcggcggcatgatggccggcgtgatcggccagttcctggccaaccccaccgacctggtgaaggtgcagatgcagatggagggcaagagaaagctggagggcaagcccctgagattcagaggcgtgcaccacgccttcgccaagatcctggccgagggcggcatcagaggcctgtgggccggctgggtgcccaacatccagagagccgccctggtgaacatgggcgacctgaccacctacgacaccgtgaagcactacctggtgctgaacacccccctggaggacaacatcatgacccacggcctgagcagcgacctggtgggcagccacaaggccatccagtag

SEQ ID NO: 99699 - DNA, 297 bp, synthetic construct
  misc_feature 1..297: note = Description of Artificial Sequence: Synthetic coding sequence
  source 1..297: mol_type = other DNA
tgaaacatgggcgacctgaccacctacgacaccgtgaagcactacctggtgctgaacacccccctggaggacaacatcatgacccacggcctgagcagcctgtgcagcggcctggtggccagcatcctgggcacccccgccgacgtgatcaagagcagaatcatgaaccagcccagagacaagcagggcagaggcctgctgtacaagagcagcaccgactgcctgatccaggccgtgcagggcgagggcttcatgagcctgtacaagggcttcctgcccagctggctgagaatgtag

SEQ ID NO: 99700 - DNA, 450 bp, synthetic construct
  misc_feature 1..450: note = Description of Artificial Sequence: Synthetic coding sequence
  source 1..450: mol_type = other DNA
atgagcgagtgccccctgatcctgtacatccacaagcacatcgacacctacagccagagctacctgttcaacgacctgttctaccccgtgtacagcggcggcagaatggtgacctacgagcacctgagagaggtggtgttcggcaagagcgaggacgagcactaccccctgtggaagagcgtgatcggcggcatgatggccggcgtgatcggccagttcctggccaaccccaccgacctggtgaaggtgcagatgcagatggagggcaagagaaagctggagggcaagcccctgagattcagaggcgtgcaccacgccttcgccaagatcctggccgagggcggcatcagaggcctgtgggccggctgggtgcccaacatccagagagccgccctggtgaacatgggcgacctgaccacctacgacaccgtgaagcactacctggtgtag

SEQ ID NO: 99701 - DNA, 480 bp, synthetic construct
  misc_feature 1..480: note = Description of Artificial Sequence: Synthetic coding sequence
  source 1..480: mol_type = other DNA
tgaatggagggcaagagaaagctggagggcaagcccctgagattcagaggcgtgcaccacgccttcgccaagatcctggccgagggcggcatcagaggcctgtgggccggctgggtgcccaacatccagagagccgccctggtgaacatgggcgacctgaccacctacgacaccgtgaagcactacctggtgctgaacacccccctggaggacaacatcatgacccacggcctgagcagcctgtgcagcggcctggtggccagcatcctgggcacccccgccgacgtgatcaagagcagaatcatgaaccagcccagagacaagcagggcagaggcctgctgtacaagagcagcaccgactgcctgatccaggccgtgcagggcgagggcttcatgagcctgtacaagggcttcctgcccagctggctgagaatggccgccgtgatcgtgaacagcagcagaagccagctgaaggtgtag

SEQ ID NO: 99702 - DNA, 714 bp, synthetic construct
  misc_feature 1..714: note = Description of Artificial Sequence: Synthetic coding sequence
  source 1..714: mol_type = other DNA
atgtacctgtacctgatgaagatgcccgccgcctaccaggtgtacagcggcggcagaatggtgacctacgagcacctgagagaggtggtgttcggcaagagcgaggacgagcactaccccctgtggaagagcgtgatcggcggcatgatggccggcgtgatcggccagttcctggccaaccccaccgacctggtgaaggtgcagatgcagatggagggcaagagaaagctggagggcaagcccctgagattcagaggcgtgcaccacgccttcgccaagatcctggccgagggcggcatcagaggcctgtgggccggctgggtgcccaacatccagagagccgccctggtgaacatgggcgacctgaccacctacgacaccgtgaagcactacctggtgctgaacacccccctggaggacaacatcatgacccacggcctgagcagcctgtgcagcggcctggtggccagcatcctgggcacccccgccgacgtgatcaagagcagaatcatgaaccagcccagagacaagcagggcagaggcctgctgtacaagagcagcaccgactgcctgatccaggccgtgcagggcgagggcttcatgagcctgtacaagggcttcctgcccagctggctgagaatgaccccctggagcatggtgttctggctgacctacgagaagatcagagagatgagcggcgtgagccccttctag

SEQ ID NO: 99703 - DNA, 1095 bp, synthetic construct
  misc_feature 1..1095: note = Description of Artificial Sequence: Synthetic coding sequence
  source 1..1095: mol_type = other DNA
atggagctggagggcagaggcgccggcggcgtggccggcggccccgccgccggccccggcagaagccccggcgagagcgccctgctggacggctggctgcagagaggcgtgggcagaggcgccggcggcggcgaggccggcgcctgcagaccccccgtgagacaggaccccgacagcggccccgactacgaggccctgcccgccggcgccaccgtgaccacccacatggtggccggcgccgtggccggcatcctggagcactgcgtgatgtaccccatcgactgcgtgaagaccagaatgcagagcctgcagcccgaccccgccgccagatacagaaacgtgctggaggccctgtggagaatcatcagaaccgagggcctgtggagacccatgagaggcctgaacgtgaccgccaccggcgccggccccgcccacgccctgtacttcgcctgctacgagaagctgaagaagaccctgagcgacgtgatccaccccggcggcaacagccacatcgccaacggcgccgccggctgcgtggccaccctgctgcacgacgccgccatgaaccccgccgaggtggtgaagcagagaatgcagatgtacaacagcccctaccacagagtgaccgactgcgtgagagccgtgtggcagaacgagggcgccggcgccttctacagaagctacaccacccagctgaccatgaacgtgcccttccaggccatccacttcatgacctacgagttcctgcaggagcacttcaacccccagagaagatacaaccccagcagccacgtgctgagcggcgcctgcgccggcgccgtggccgccgccgccaccacccccctggacgtgtgcaagaccctgctgaacacccaggagagcctggccctgaacagccacatcaccggccacatcaccggcatggccagcgccttcagaaccgtgtaccaggtgggcggcgtgaccgcctacttcagaggcgtgcaggccagagtgatctaccagatccccagcaccgccatcgcctggagcgtgtacgagttcttcaagtacctgatcaccaagagacaggaggagtggagagccggcaagtag

SEQ ID NO: 99704 - DNA, 678 bp, synthetic construct
  misc_feature 1..678: note = Description of Artificial Sequence: Synthetic coding sequence
  source 1..678: mol_type = other DNA
agaggcgccgccggctggagccactgccaccacgcccacggcggcagaagaagaggcagagaccccggcgccctgagagacgtgccccacagactgagacagggcgccgccggctgcgtggccaccctgctgcacgacgccgccatgaaccccgccgaggtggtgaagcagagaatgcagatgtacaacagcccctaccacagagtgaccgactgcgtgagagccgtgtggcagaacgagggcgccggcgccttctacagaagctacaccacccagctgaccatgaacgtgcccttccaggccatccacttcatgacctacgagttcctgcaggagcacttcaacccccagagaagatacaaccccagcagccacgtgctgagcggcgcctgcgccggcgccgtggccgccgccgccaccacccccctggacgtgtgcaagaccctgctgaacacccaggagagcctggccctgaacagccacatcaccggccacatcaccggcatggccagcgccttcagaaccgtgtaccaggtgggcggcgtgaccgcctacttcagaggcgtgcaggccagagtgatctaccagatccccagcaccgccatcgcctggagcgtgtacgagttcttcaagtacctgatcaccaagagacaggaggagtggagagccggcaagtag

SEQ ID NO: 99705 - DNA, 876 bp, synthetic construct
  misc_feature 1..876: note = Description of Artificial Sequence: Synthetic coding sequence
  source 1..876: mol_type = other DNA
atgagcgccctgaactggaagcccttcgtgtacggcggcctggccagcatcaccgccgagtgcggcaccttccccatcgacctgaccaagaccagactgcagatccagggccagaccaacgacgccaagttcaaggagatcagatacagaggcatgctgcacgccctggtgagaatcggcagagaggagggcctgaaggccctgtacagcggcatcgcccccgccatgctgagacaggccagctacggcaccatcaagatcggcacctaccagagcctgaagagactgttcatcgagagacccgaggacgagaccctgcccatcaacgtgatctgcggcatcctgagcggcgtgatcagcagcaccatcgccaaccccaccgacgtgctgaagatcagaatgcaggcccagagcaacaccatccagggcggcatgatcggcaacttcatgaacatctaccagcaggagggcaccagaggcctgtggaagggcgtgagcctgaccgcccagagagccgccatcgtggtgggcgtggagctgcccgtgtacgacatcaccaagaagcacctgatcctgagcggcctgatgggcgacaccgtgtacacccacttcctgagcagcttcacctgcggcctggccggcgccctggccagcaaccccgtggacgtggtgagaaccagaatgatgaaccagagagtgctgagagacggcagatgcagcggctacaccggcaccctggactgcctgctgcagacctggaagaacgagggcttcttcgccctgtacaagggcttctggcccaactggctgagactgggcccctggaacatcatcttcttcgtgacctacgagcagctgaagaagctggacctgtag

SEQ ID NO: 99706 - DNA, 651 bp, synthetic construct
  misc_feature 1..651: note = Description of Artificial Sequence: Synthetic coding sequence
  source 1..651: mol_type = other DNA
atgctgagacaggccagctacggcaccatcaagatcggcacctaccagagcctgaagagactgttcatcgagagacccgaggacgagaccctgcccatcaacgtgatctgcggcatcctgagcggcgtgatcagcagcaccatcgccaaccccaccgacgtgctgaagatcagaatgcaggcccagagcaacaccatccagggcggcatgatcggcaacttcatgaacatctaccagcaggagggcaccagaggcctgtggaagggcgtgagcctgaccgcccagagagccgccatcgtggtgggcgtggagctgcccgtgtacgacatcaccaagaagcacctgatcctgagcggcctgatgggcgacaccgtgtacacccacttcctgagcagcttcacctgcggcctggccggcgccctggccagcaaccccgtggacgtggtgagaaccagaatgatgaaccagagagtgctgagagacggcagatgcagcggctacaccggcaccctggactgcctgctgcagacctggaagaacgagggcttcttcgccctgtacaagggcttctggcccaactggctgagactgggcccctggaacatcatcttcttcgtgacctacgagcagctgaagaagctggacctgtag

SEQ ID NO: 99707 - DNA, 723 bp, synthetic construct
  misc_feature 1..723: note = Description of Artificial Sequence: Synthetic coding sequence
  source 1..723: mol_type = other DNA
atgctgcacgccctggtgagaatcggcagagaggagggcctgaaggccctgtacagcggcatcgcccccgccatgctgagacaggccagctacggcaccatcaagatcggcacctaccagagcctgaagagactgttcatcgagagacccgaggacgagaccctgcccatcaacgtgatctgcggcatcctgagcggcgtgatcagcagcaccatcgccaaccccaccgacgtgctgaagatcagaatgcaggcccagagcaacaccatccagggcggcatgatcggcaacttcatgaacatctaccagcaggagggcaccagaggcctgtggaagggcgtgagcctgaccgcccagagagccgccatcgtggtgggcgtggagctgcccgtgtacgacatcaccaagaagcacctgatcctgagcggcctgatgggcgacaccgtgtacacccacttcctgagcagcttcacctgcggcctggccggcgccctggccagcaaccccgtggacgtggtgagaaccagaatgatgaaccagagagtgctgagagacggcagatgcagcggctacaccggcaccctggactgcctgctgcagacctggaagaacgagggcttcttcgccctgtacaagggcttctggcccaactggctgagactgggcccctggaacatcatcttcttcgtgacctacgagcagctgaagaagctggacctgtag

SEQ ID NO: 99708 - DNA, 948 bp, synthetic construct
  misc_feature 1..948: note = Description of Artificial Sequence: Synthetic coding sequence
  source 1..948: mol_type = other DNA
atgaccggccagggccagagcgccagcggcagcagcgcctggagcaccgtgttcagacacgtgagatacgagaacctgatcgccggcgtgagcggcggcgtgctgagcaacctggccctgcaccccctggacctggtgaagatcagattcgccgtgagcgacggcctggagctgagacccaagtacaacggcatcctgcactgcctgaccaccatctggaagctggacggcctgagaggcctgtaccagggcgtgacccccaacatctggggcgccggcctgagctggggcctgtacttcttcttctacaacgccatcaagagctacaagaccgagggcagagccgagagactggaggccaccgagtacctggtgagcgccgccgaggccggcgccatgaccctgtgcatcaccaaccccctgtgggtgaccaagaccagactgatgctgcagtacgacgccgtggtgaacagcccccacagacagtacaagggcatgttcgacaccctggtgaagatctacaagtacgagggcgtgagaggcctgtacaagggcttcgtgcccggcctgttcggcaccagccacggcgccctgcagttcatggcctacgagctgctgaagctgaagtacaaccagcacatcaacagactgcccgaggcccagctgagcaccgtggagtacatcagcgtggccgccctgagcaagatcttcgccgtggccgccacctacccctaccaggtggtgagagccagactgcaggaccagcacatgttctacagcggcgtgatcgacgtgatcaccaagacctggagaaaggagggcgtgggcggcttctacaagggcatcgcccccaacctgatcagagtgacccccgcctgctgcatcaccttcgtggtgtacgagaacgtgagccacttcctgctggacctgagagagaagagaaagtag

SEQ ID NO: 99709 - DNA, 900 bp, synthetic construct
  misc_feature 1..900: note = Description of Artificial Sequence: Synthetic coding sequence
  source 1..900: mol_type = other DNA
atgaccggccagggccagagcgccagcggcagcagcgcctggagcggcggcgtgctgagcaacctggccctgcaccccctggacctggtgaagatcagattcgccgtgagcgacggcctggagctgagacccaagtacaacggcatcctgcactgcctgaccaccatctggaagctggacggcctgagaggcctgtaccagggcgtgacccccaacatctggggcgccggcctgagctggggcctgtacttcttcttctacaacgccatcaagagctacaagaccgagggcagagccgagagactggaggccaccgagtacctggtgagcgccgccgaggccggcgccatgaccctgtgcatcaccaaccccctgtgggtgaccaagaccagactgatgctgcagtacgacgccgtggtgaacagcccccacagacagtacaagggcatgttcgacaccctggtgaagatctacaagtacgagggcgtgagaggcctgtacaagggcttcgtgcccggcctgttcggcaccagccacggcgccctgcagttcatggcctacgagctgctgaagctgaagtacaaccagcacatcaacagactgcccgaggcccagctgagcaccgtggagtacatcagcgtggccgccctgagcaagatcttcgccgtggccgccacctacccctaccaggtggtgagagccagactgcaggaccagcacatgttctacagcggcgtgatcgacgtgatcaccaagacctggagaaaggagggcgtgggcggcttctacaagggcatcgcccccaacctgatcagagtgacccccgcctgctgcatcaccttcgtggtgtacgagaacgtgagccacttcctgctggacctgagagagaagagaaagtag

SEQ ID NO: 99710 - DNA, 552 bp, synthetic construct
  misc_feature 1..552: note = Description of Artificial Sequence: Synthetic coding sequence
  source 1..552: mol_type = other DNA
atgaccctgtgcatcaccaaccccctgtgggtgaccaagaccagactgatgctgcagtacgacgccgtggtgaacagcccccacagacagtacaagggcatgttcgacaccctggtgaagatctacaagtacgagggcgtgagaggcctgtacaagggcttcgtgcccggcctgttcggcaccagccacggcgccctgcagttcatggcctacgagctgctgaagctgaagtacaaccagcacatcaacagactgcccgaggcccagctgagcaccgtggagtacatcagcgtggccgccctgagcaagatcttcgccgtggccgccacctacccctaccaggtggtgagagccagactgcaggaccagcacatgttctacagcggcgtgatcgacgtgatcaccaagacctggagaaaggagggcgtgggcggcttctacaagggcatcgcccccaacctgatcagagtgacccccgcctgctgcatcaccttcgtggtgtacgagaacgtgagccacttcctgctggacctgagagagaagagaaagtag

SEQ ID NO: 99711 - DNA, 966 bp, synthetic construct
  misc_feature 1..966: note = Description of Artificial Sequence: Synthetic coding sequence
  source 1..966: mol_type = other DNA
atggccaccggcggccagcagaaggagaacaccctgctgcacctgttcgccggcggctgcggcggcaccgtgggcgccatcttcacctgccccctggaggtgatcaagaccagactgcagagcagcagactggccctgagaaccgtgtactacccccaggtgcacctgggcaccatcagcggcgccggcatggtgagacccaccagcgtgacccccggcctgttccaggtgctgaagagcatcctggagaaggagggccccaagagcctgttcagaggcctgggccccaacctggtgggcgtggcccccagcagagccgtgtacttcgcctgctacagcaaggccaaggagcagttcaacggcatcttcgtgcccaacagcaacatcgtgcacatcttcagcgccggcagcgccgccttcatcaccaacagcctgatgaaccccatctggatggtgaagaccagaatgcagctggagcagaaggtgagaggcagcaagcagatgaacaccctgcagtgcgccagatacgtgtaccagaccgagggcatcagaggcttctacagaggcctgaccgccagctacgccggcatcagcgagaccatcatctgcttcgccatctacgagagcctgaagaagtacctgaaggaggcccccctggccagcagcgccaacggcaccgagaagaacagcaccagcttcttcggcctgatggccgccgccgccctgagcaagggctgcgccagctgcatcgcctacccccacgaggtgatcagaaccagactgagagaggagggcaccaagtacaagagcttcgtgcagaccgccagactggtgttcagagaggagggctacctggccttctacagaggcctgttcgcccagctgatcagacagatccccaacaccgccatcgtgctgagcacctacgagctgatcgtgtacctgctggaggacagaacccagtag

SEQ ID NO: 99712 - DNA, 915 bp, synthetic construct
  misc_feature 1..915: note = Description of Artificial Sequence: Synthetic coding sequence
  source 1..915: mol_type = other DNA
atggagaccgtgccccccgccgtggacctggtgctgggcgccagcgcctgctgcctggcctgcgtgttcaccaaccccctggaggtggtgaagaccagactgcagctgcagggcgagctgcaggccagaggcacctaccccagaccctaccacggcttcatcgccagcgtggccgccgtggccagagccgacggcctgtggggcctgcagaagggcctggccgccggcctgctgtaccagggcctgatgaacggcgtgagattctactgctacagcctggcctgccaggccggcctgacccagcagcccggcggcaccgtggtggccggcgccgtggccggcgccctgggcgccttcgtgggcagccccgcctacctgatcaagacccagctgcaggcccagaccgtggccgccgtggccgtgggccaccagcacaaccaccagaccgtgctgggcgccctggagaccatctggagacagcagggcctgctgggcctgtggcagggcgtgggcggcgccgtgcccagagtgatggtgggcagcgccgcccagctggccaccttcgccagcgccaaggcctgggtgcagaagcagcagtggctgcccgaggacagctggctggtggccctggccggcggcatgatcagcagcatcgccgtggtggtggtgatgacccccttcgacgtggtgagcaccagactgtacaaccagcccgtggacaccgccggcagaggccagctgtacggcggcctgaccgactgcatggtgaagatctggagacaggagggccccctggccctgtacaagggcctgggccccgcctacctgagactgggcccccacaccatcctgagcatgctgttctgggacgagctgagaaagctggccggcagagcccagcacaagggcacctag

SEQ ID NO: 99713 - DNA, 888 bp, synthetic construct
  misc_feature 1..888: note = Description of Artificial Sequence: Synthetic coding sequence
  source 1..888: mol_type = other DNA
atggacttcctgatgagcggcctggccgcctgcggcgcctgcgtgttcaccaaccccctggaggtggtgaagaccagaatgcagctgcagggcgagctgcaggcccccggcacctaccagagacactacagaaacgtgttccacgccttcatcaccatcggcaaggtggacggcctggccgccctgcagaagggcctggcccccgccctgctgtaccagttcctgatgaacggcatcagactgggcacctacggcctggccgaggccggcggctacctgcacaccgccgagggcacccacagccccgccagaagcgccgccgccggcgccatggccggcgtgatgggcgcctacctgggcagccccatctacatggtgaagacccacctgcaggcccaggccgccagcgagatcgccgtgggccaccagtacaagcaccagggcatgttccaggccctgaccgagatcggccagaagcacggcctggtgggcctgtggagaggcgccctgggcggcctgcccagagtgatcgtgggcagcagcacccagctgtgcaccttcagcagcaccaaggacctgctgagccagtgggagatcttccccccccagagctggaagctggccctggtggccgccatgatgagcggcatcgccgtggtgctggccatggcccccttcgacgtggcctgcaccagactgtacaaccagcccaccgacgcccagggcaagaacagagtgcccaagttcagcgccaccagctgcagcgccagcgcccccctgctgggcaccaaggacgtgagaatcgtgaagggccagaccggccaccagctgttcaaggtgacccaggcccccggctgcagccccatcctgctgggcacccagagctag

SEQ ID NO: 99714 - DNA, 876 bp, synthetic construct
  misc_feature 1..876: note = Description of Artificial Sequence: Synthetic coding sequence
  source 1..876: mol_type = other DNA
atggacttcctgatgagcggcctggccgcctgcggcgcctgcgtgttcaccaaccccctggaggtggtgaagaccagaatgcagctgcagggcgagctgcaggcccccggcacctaccagagacactacagaaacgtgttccacgccttcatcaccatcggcaaggtggacggcctggccgccctgcagaagggcctggcccccgccctgctgtaccagttcctgatgaacggcatcagactgggcacctacggcctggccgaggccggcggctacctgcacaccgccgagggcacccacagccccgccagaagcgccgccgccggcgccatggccggcgtgatgggcgcctacctgggcagccccatctacatggtgaagacccacctgcaggcccaggccgccagcgagatcgccgtgggccaccagtacaagcaccagggcatgttccaggccctgaccgagatcggccagaagcacggcctggtgggcctgtggagaggcgccctgggcggcctgcccagagtgatcgtgggcagcagcacccagctgtgcaccttcagcagcaccaaggacctgctgagccagtgggagatcttccccccccagagctggaagctggccctggtggccgccatgatgagcggcatcgccgtggtgctggccatggcccccttcgacgtggcctgcaccagactgtacaaccagcccaccgacgcccagggcaagggcctgatgtacagaggcatcctggacgccctgctgcagaccgccagaaccgagggcatcttcggcatgtacaaggagcccagcccccaggtgctgagcaacatcatgcagtgcttcagcgccttcaccggcgaccagagatgctag

SEQ ID NO: 99715 - DNA, 915 bp, synthetic construct
  misc_feature 1..915: note = Description of Artificial Sequence: Synthetic coding sequence
  source 1..915: mol_type = other DNA
atgatccagaacagcagacccagcctgctgcagccccaggacgtgggcgacaccgtggagaccctgatgctgcaccccgtgatcaaggccttcctgtgcggcagcatcagcggcacctgcagcaccctgctgttccagcccctggacctgctgaagaccagactgcagaccctgcagcccagcgaccacggcagcagaagagtgggcatgctggccgtgctgctgaaggtggtgagaaccgagagcctgctgggcctgtggaagggcatgagccccagcatcgtgagatgcgtgcccggcgtgggcatctacttcggcaccctgtacagcctgaagcagtacttcctgagaggccacccccccaccgccctggagagcgtgatgctgggcgtgggcagcagaagcgtggccggcgtgtgcatgagccccatcaccgtgatcaagaccagatacgagagcggcaagtacggctacgagagcatctacgccgccctgagaagcatctaccacagcgagggccacagaggcctgttcagcggcctgaccgccaccctgctgagagacgcccccttcagcggcatctacctgatgttctacaaccagaccaagaacatcgtgccccacgaccaggtggacgccaccctgatccccatcaccaacttcagctgcggcatcttcgccggcatcctggccagcctggtgacccagcccgccgacgtgatcaagacccacatgcagctgtaccccctgaagttccagtggatcggccaggccgtgaccctgatcttcaaggactacggcctgagaggcttcttccagggcggcatccccagagccctgagaagaaccctgatggccgccatggcctggaccgtgtacgaggagatgatggccaagatgggcctgaagagctag

SEQ ID NO: 99716 - DNA, 1671 bp, synthetic construct
  misc_feature 1..1671: note = Description of Artificial Sequence: Synthetic coding sequence
  source 1..1671: mol_type = other DNA
atgccccccgagagaagaagaagaatgaagctggacagaagaaccggcgccaagcccaagagaaagcccggcatgagacccgactggaaggccggcgccggccccggcggccccccccagaagcccgcccccagcagccagagaaagccccccgccagacccagcgccgccgccgccgccatcgccgtggccgccgccgaggaggagagaagactgagacagagaaacagactgagactggaggaggacaagcccgccgtggagagatgcctggaggagctggtgttcggcgacgtggagaacgacgaggacgccctgctgagaagactgagaggccccagagtgcaggagcacgaggacagcggcgacagcgaggtggagaacgaggccaagggcaacttccccccccagaagaagcccgtgtgggtggacgaggaggacgaggacgaggagatggtggacatgatgaacaacagattcagaaaggacatgatgaagaacgccagcgagagcaagctgagcaaggacaacctgaagaagagactgaaggaggagttccagcacgccatgggcggcgtgcccgcctgggccgagaccaccaagagaaagaccagcagcgacgacgagagcgaggaggacgaggacgacctgctgcagagaaccggcaacttcatcagcaccagcaccagcctgcccagaggcatcctgaagatgaagaactgccagcacgccaacgccgagagacccaccgtggccagaatcagcagcgtgcagttccaccccggcgcccagatcgtgatggtggccggcctggacaacgccgtgagcctgttccaggtggacggcaagaccaaccccaagatccagagcatctacctggagagattccccatcttcaaggcctgcttcagcgccaacggcgaggaggtgctggccaccagcacccacagcaaggtgctgtacgtgtacgacatgctggccggcaagctgatccccgtgcaccaggtgagaggcctgaaggagaagatcgtgagaagcttcgaggtgagccccgacggcagcttcctgctgatcaacggcatcgccggctacctgcacctgctggccatgaagaccaaggagctgatcggcagcatgaagatcaacggcagagtggccgccagcaccttcagcagcgacagcaagaaggtgtacgccagcagcggcgacggcgaggtgtacgtgtgggacgtgaacagcagaaagtgcctgaacagattcgtggacgagggcagcctgtacggcctgagcatcgccaccagcagaaacggccagtacgtggcctgcggcagcaactgcggcgtggtgaacatctacaaccaggacagctgcctgcaggagaccaaccccaagcccatcaaggccatcatgaacctggtgaccggcgtgaccagcctgaccttcaaccccaccaccgagatcctggccatcgccagcgagaagatgaaggaggccgtgagactggtgcacctgcccagctgcaccgtgttcagcaacttccccgtgatcaagaacaagaacatcagccacgtgcacaccatggacttcagccccagaagcggctacttcgccctgggcaacgagaagggcaaggccctgatgtacagactgcaccactacagcgacttctag

SEQ ID NO: 99717 - DNA, 1080 bp, synthetic construct
  misc_feature 1..1080: note = Description of Artificial Sequence: Synthetic coding sequence
  source 1..1080: mol_type = other DNA
atggccgaccaggaccccgccggcatcagccccctgcagcagatggtggccagcggcaccggcgccgtggtgaccagcctgttcatgacccccctggacgtggtgaaggtgagactgcagagccagagacccagcatggccagcgagctgatgcccagcagcagactgtggagcctgagctacaccaagctgcccagcagcctgcagagcaccggcaagtgcctgctgtactgcaacggcgtgctggagcccctgtacctgtgccccaacggcgccagatgcgccacctggttccaggaccccaccagattcaccggcaccatggacgccttcgtgaagatcgtgagacacgagggcaccagaaccctgtggagcggcctgcccgccaccctggtgatgaccgtgcccgccaccgccatctacttcaccgcctacgaccagctgaaggccttcctgtgcggcagagccctgaccagcgacctgtacgcccccatggtggccggcgccctggccagactgggcaccgtgaccgtgatcagccccctggagctgatgagaaccaagctgcaggcccagcacgtgagctacagagagctgggcgcctgcgtgagaaccgccgtggcccagggcggctggagaagcctgtggctgggctggggccccaccgccctgagagacgtgcccttcagcgccctgtactggttcaactacgagctggtgaagagctggctgaacggcttcagacccaaggaccagaccagcgtgggcatgagcttcgtggccggcggcatcagcggcaccgtggccgccgtgctgaccctgcccttcgacgtggtgaagacccagagacaggtggccctgggcgccatggaggccgtgagagtgaaccccctgcacgtggacagcacctggctgctgctgagaagaatcagagccgagagcggcaccaagggcctgttcgccggcttcctgcccagaatcatcaaggccgcccccagctgcgccatcatgatcagcacctacgagttcggcaagagcttcttccagagactgaaccaggacagactgctgggcggctag

SEQ ID NO: 99718 - DNA, 1011 bp, synthetic construct
  misc_feature 1..1011: note = Description of Artificial Sequence: Synthetic coding sequence
  source 1..1011: mol_type = other DNA
atggccgaccaggaccccgccggcatcagccccctgcagcagatggtggccagcggcaccggcgccgtggtgaccagcctgttcatgacccccctggacgtggtgaaggtgagactgcagagccagagacccagcatggccagcggcaagtgcctgctgtactgcaacggcgtgctggagcccctgtacctgtgccccaacggcgccagatgcgccacctggttccaggaccccaccagattcaccggcaccatggacgccttcgtgaagatcgtgagacacgagggcaccagaaccctgtggagcggcctgcccgccaccctggtgatgaccgtgcccgccaccgccatctacttcaccgcctacgaccagctgaaggccttcctgtgcggcagagccctgaccagcgacctgtacgcccccatggtggccggcgccctggccagactgggcaccgtgaccgtgatcagccccctggagctgatgagaaccaagctgcaggcccagcacgtgagctacagagagctgggcgcctgcgtgagaaccgccgtggcccagggcggctggagaagcctgtggctgggctggggccccaccgccctgagagacgtgcccttcagcgccctgtactggttcaactacgagctggtgaagagctggctgaacggcttcagacccaaggaccagaccagcgtgggcatgagcttcgtggccggcggcatcagcggcaccgtggccgccgtgctgaccctgcccttcgacgtggtgaagacccagagacaggtggccctgggcgccatggaggccgtgagagtgaaccccctgcacgtggacagcacctggctgctgctgagaagaatcagagccgagagcggcaccaagggcctgttcgccggcttcctgcccagaatcatcaaggccgcccccagctgcgccatcatgatcagcacctacgagttcggcaagagcttcttccagagactgaaccaggacagactgctgggcggctag

SEQ ID NO: 99719 - DNA, 1017 bp, synthetic construct
  misc_feature 1..1017: note = Description of Artificial Sequence: Synthetic coding sequence
  source 1..1017: mol_type = other DNA
atggaccccgagaccagaggccaggagatcatcaaggtgacccccctgcagcagatgctggccagctgcaccggcgccatcctgaccagcgtgatcgtgacccccctggacgtggtgaagatcagactgcaggcccagaacaaccccctgcccaagggcaagtgcttcgtgtacagcaacggcctgatggaccacctgtgcgtgtgcgaggagggcggcaacaagctgtggtacaagaagcccggcaacttccagggcaccctggacgccttcttcaagatcatcagaaacgagggcatcaagagcctgtggagcggcctgccccccaccctggtgatggccgtgcccgccaccgtgatctacttcacctgctacgaccagctgagcgccctgctgagaagcaagctgggcgagaacgagacctgcatccccatcgtggccggcatcgtggccagattcggcgccgtgaccgtgatcagccccctggagctgatcagaaccaagatgcagagcaagaagttcagctacgtggagctgcacagattcgtgagcaagaaggtgagcgaggacggctggatcagcctgtggagaggctgggcccccaccgtgctgagagacgtgcccttcagcgccatgtactggtacaactacgagatcctgaagaagtggctgtgcgagaagagcggcctgtacgagcccaccttcatgatcaacttcaccagcggcgccctgagcggcagcttcgccgccgtggccaccctgcccttcgacgtggtgaagacccagaagcagacccagctgtggacctacgagagccacaagatcagcatgcccctgcacatgagcacctggatcatcatgaagaacatcgtggccaagaacggcttcagcggcctgttcagcggcctgatccccagactgatcaagatcgcccccgcctgcgccatcatgatcagcacctacgagttcggcaaggccttcttccagaagcagaacgtgagaagacagcagtactag

SEQ ID NO: 99720 - DNA, 1113 bp, synthetic construct
  misc_feature 1..1113: note = Description of Artificial Sequence: Synthetic coding sequence
  source 1..1113: mol_type = other DNA
atgggcgcccagcccggcgagccccagaacacctgcagcagaatccagaccctgttcagaagagtgaagaccctgctgatcaaggcccccccccccccccagccccccccccccccccccagctggaaccccggctgcacccacgtgtacggctacgccttcggccacatgcacgacaacaacctggagcacctgcccagccagcaggtgctggacaccggcgagcagctgatggtgcccgtggaggtgctggaggtggacaacaaggaggccctgtggaagttcctgctgagcggcgccatggccggcgccgtgagcagaaccggcaccgcccccctggacagagccaaggtgtacatgcaggtgtacagcagcaagaccaacttcaccaacctgctgggcggcctgcagagcatggtgcaggagggcggcttcagaagcctgtggagaggcaacggcatcaacgtgctgaagatcgcccccgagtacgccatcaagttcagcgtgttcgagcagtgcaagaactacttctgcggcatccagggcagcccccccttccaggagagactgctggccggcagcctggccgtggccatcagccagaccctgatcaaccccatggaggtgctgaagaccagactgaccctgagaagaaccggccagtacaagggcctgctggactgcgccagacagatcctgcagagagagggcaccagagccctgtacagaggctacctgcccaacatgctgggcatcatcccctacgcctgcaccgacctggccgtgtacgagatgctgcagtgcttctgggtgaagagcggcagagacatgggcgaccccagcggcctggtgagcctgagcagcgtgaccctgagcaccacctgcggccagatggccagctaccccctgaccctggtgagaaccagaatgcaggcccaggacaccgtggagggcagcaaccccaccatgagaggcgtgctgcagagaatcctggcccagcagggctggctgggcctgtacagaggcatgacccccaccctgctgaaggtgctgcccgccggcggcatcagctacgtggtgtacgaggccatgaagaagaccctgggcatctag

SEQ ID NO: 99721 - DNA, 729 bp, synthetic construct
  misc_feature 1..729: note = Description of Artificial Sequence: Synthetic coding sequence
  source 1..729: mol_type = other DNA
atgggcgcccagcccggcgagccccagaacacctgcagcagaatccagaccctgttcagaagagtgaagaccctgctgatcaaggcccccccccccccccagccccccccccccccccccagctggaaccccggctgcacccacgtgtacggctacgccttcggccacatgcacgacaacaacctggagcacctgcccagccagcaggtgctggacaccggcgagcagctgatggtgcccgtggaggtgctggaggtggacaacaaggaggccctgtggaagttcctgctgagcggcgccatggccggcgccgtgagcagaaccggcaccgcccccctggacagagccaaggtgtacatgcagctgctgggcagactgagacaggagaacagactgaacctgggcggcggcggctgcagcgagcccagaagccccgacagaacccccgcctgggccaccgagagcaccccccccagaagaaccagccccacctgctggggcggctacagagcctggagcagaagagccgccagcgccccctgcggcggcgccaccgccagcacctgcagcagactgctgctgagcatgcccagcagcagcccctacagcagcagcgccagaatcaccagcgtggagtacaagggccccagacccagcagaagcgtgagcctgctggccccctggctgtggcccagccccagacccagcagcaccccctggagatgctag

SEQ ID NO: 99722 - DNA, 957 bp, synthetic construct
  misc_feature 1..957: note = Description of Artificial Sequence: Synthetic coding sequence
  source 1..957: mol_type = other DNA
atgggcaacggcgtgaaggagggccccgtgagactgcacgaggacgccgaggccgtgctgagcagcagcgtgagcagcaagagagaccacagacaggtgctgagcagcctgctgagcggcgccctggccggcgccctggccaagaccgccgtggcccccctggacagaaccaagatcatcttccaggtgagcagcaagagattcagcgccaaggaggccttcagagtgctgtactacacctacctgaacgagggcttcctgagcctgtggagaggcaacagcgccaccatggtgagagtggtgccctacgccgccatccagttcagcgcccacgaggagtacaagagaatcctgggcagctactacggcttcagaggcgaggccctgcccccctggcccagactgttcgccggcgccctggccggcaccaccgccgccagcctgacctaccccctggacctggtgagagccagaatggccgtgacccccaaggagatgtacagcaacatcttccacgtgttcatcagaatcagcagagaggagggcctgaagaccctgtaccacggcttcatgcccaccgtgctgggcgtgatcccctacgccggcctgagcttcttcacctacgagaccctgaagagcctgcacagagagtacagcggcagaagacagccctaccccttcgagagaatgatcttcggcgcctgcgccggcctgatcggccagagcgccagctaccccctggacgtggtgagaagaagaatgcagaccgccggcgtgaccggctaccccagagccagcatcgccagaaccctgagaaccatcgtgagagaggagggcgccgtgagaggcctgtacaagggcctgagcatgaactgggtgaagggccccatcgccgtgggcatcagcttcaccaccttcgacctgatgcagatcctgctgagacacctgcagagctag

SEQ ID NO: 99723 - DNA, 1011 bp, synthetic construct
  misc_feature 1..1011: note = Description of Artificial Sequence: Synthetic coding sequence
  source 1..1011: mol_type = other DNA
atgagcgtgctgttcttctacatcatgagatacaagcagagcgaccccgagaaccccgacaacgacagattcgtgctggccaagatcgccaccagaaaggcctgcggcctggccctggccaagctgggctacgccaacaacagagtggtggtgctggacggcgacaccagatacagcaccttcagcgagatcttcaacaaggagtaccccgagagattcatcgagtgcttcatggccgagcagaacatggtgagcgtggccctgggctgcgccagcagaggcagaaccatcgccttcgccagcaccttcgccgccttcctgaccagagccttcgaccacatcagaatcggcggcctggccgagagcaacatcaacatcatcggcagccactgcggcgtgagcgtgggcgacgacggcgccagccagatggccctggaggacatcgccatgttcagaaccatccccaagtgcaccatcttctaccccaccgacgccgtgagcaccgagcacgccgtggccctggccgccaacgccaagggcatgtgcttcatcagaaccaccagacccgagaccatggtgatctacaccccccaggagagattcgagatcggccaggccaaggtgctgagacactgcgtgagcgacaaggtgaccgtgatcggcgccggcatcaccgtgtacgaggccctggccgccgccgacgagctgagcaagcaggacatcttcatcagagtgatcgacctgttcaccatcaagcccctggacgtggccaccatcgtgagcagcgccaaggccaccgagggcagaatcatcaccgtggaggaccactacccccagggcggcatcggcgaggccgtgtgcgccgccgtgagcatggaccccgacatccaggtgcacagcctggccgtgagcggcgtgccccagagcggcaagagcgaggagctgctggacatgtacggcatcagcgccagacacatcatcgtggccgtgaagtgcatgctgctgaactag

SEQ ID NO: 99724 - DNA, 870 bp, synthetic construct
  misc_feature 1..870: note = Description of Artificial Sequence: Synthetic coding sequence
  source 1..870: mol_type = other DNA
atggccacctggagaagagacggcagactgaccggcggccagagactgctgtgcgccggcctggccggcaccctgagcctgagcctgaccgcccccctggagctggccgcctacagaaagttcgtggtgctgttcaccgacgacctgggccacatcagccagtggagcagcatcatggccggcagcctggccggcatggtgagcaccatcgtgacctaccccaccgacctgatcaagaccagactgatcatgcagaacatcctggagcccagctacagaggcctgctgcacgccttcagcaccatctaccagcaggagggcttcctggccctgtacagaggcgtgagcctgaccgtggtgggcgccctgcccttcagcgccggcagcctgctggtgtacatgaacctggagaagatctggaacggccccagagaccagttcagcctgccccagaacttcgccaacgtgtgcctggccgccgccgtgacccagaccctgagcttccccttcgagaccgtgaagagaaagatgcaggcccagagcccctacctgccccacagcggcggcgtggacgtgcacttcagcggcgccgtggactgcttcagacagatcgtgaaggcccagggcgtgctgggcctgtggaacggcctgaccgccaacctgctgaagatcgtgccctacttcggcatcatgttcagcaccttcgagttctgcaagagaatctgcctgtaccagaacggctacatcctgagccccctgagctacaagctgacccccggcgtggaccagagcctgcagccccaggagctgagagagctgaagaagttcttcaagaccagaaagcccaagcccaagaagcccaccctgtag

SEQ ID NO: 99725 - DNA, 681 bp, synthetic construct
  misc_feature 1..681: note = Description of Artificial Sequence: Synthetic coding sequence
  source 1..681: mol_type = other DNA
atggccacctggagaagagacggcagactgaccggcggccagagactgctgtgcgccggcctggccggcaccctgagcctgagcctgaccgcccccctggagctggccaccgtgctggcccaggtgggcgtggtgagaggccacgccagaggcccctgggccaccggccacagagtgtggagagccgagggcctgagagccctgtggaagggcaacgccgtggcctgcctgagactgttcccctgcagcgccgtgcagctggccgcctacagaaagttcgtggtgctgttcaccgacgacctgggccacatcagccagtggagcagcatcatggccggcagcctggccggcatggtgagcaccatcgtgacctaccccaccgacctgatcaagaccagactgatcatgcagaacatcctggagcccagctacagaggcctgctgcacgccttcagcaccatctaccagcaggagggcttcctggccctgtacagaggcgtgagcctgaccgtggtgggcagcgagcccctgccccccacccagtggagaagcagatgccccttcctgagaagcagcggcctgctgcccgccgacagcgagggccccggcggccccggcgccctggagtggatcgacagccagttcaccgaggacagcagcatcttctggaactacgtgtag

SEQ ID NO: 99726 - DNA, 945 bp, synthetic construct
  misc_feature 1..945: note = Description of Artificial Sequence: Synthetic coding sequence
  source 1..945: mol_type = other DNA
atggaggacaagagaaacatccagatcatcgagtgggagcacctggacaagaagaagttctacgtgttcggcgtggccatgaccatgatgatcagagtgagcgtgtaccccttcaccctgatcagaaccagactgcaggtgcagaagggcaagagcctgtaccacggcaccttcgacgccttcatcaagatcctgagagccgacggcatcaccggcctgtacagaggcttcctggtgaacaccttcaccctgatcagcggccagtgctacgtgaccacctacgagctgaccagaaagttcgtggccgactacagccagagcaacaccgtgaagagcctggtggccggcggcagcgccagcctggtggcccagagcatcaccgtgcccatcgacgtggtgagccagcacctgatgatgcagagaaagggcgagaagatgggcagattccaggtgagaggcaaccccgagggccagggcgtggtggccttcggccagaccaaggacatcatcagacagatcctgcaggccgacggcctgagaggcttctacagaggctacgtggccagcctgctgacctacatccccaacagcgccgtgtggtggcccttctaccacttctacgccgagcagctgagctacctgtgccccaaggagtgcccccacatcgtgttccaggccgtgagcggccccctggccgccgccaccgccagcatcctgaccaaccccatggacgtgatcagaaccagagtgcaggtggagggcaagaacagcatcatcctgaccttcagacagctgatggccgaggagggcccctggggcctgatgaagggcctgagcgccagaatcatcagcgccacccccagcaccatcgtgatcgtggtgggctacgagagcctgaagaagctgagcctgagacccgagctggtggacagcagacactggtag

SEQ ID NO: 99727 - DNA, 489 bp, synthetic construct
  misc_feature 1..489: note = Description of Artificial Sequence: Synthetic coding sequence
  source 1..489: mol_type = other DNA
atggaggacaagagaaacatccagatcatcgagtgggagcacctggacaagaagaagttctacgtgttcggcgtggccatgaccatgatgatcagagtgagcgtgtaccccttcaccctgatcagaaccagactgcaggtgcagaagggcaagagcctgtaccacggcaccttcgacgccttcatcaagatcctgagagccgacggcatcaccggcctgtacagaggcttcctggtgaacaccttcaccctgatcagcggccagtgctacgtgaccacctacgagctgaccagaaagttcgtggccgactacagccagagcaacaccgtgaagagcctgatggccgaggagggcccctggggcctgatgaagggcctgagcgccagaatcatcagcgccacccccagcaccatcgtgatcgtggtgggctacgagagcctgaagaagctgagcctgagacccgagctggtggacagcagacactggtag

SEQ ID NO: 99728 - DNA, 876 bp, synthetic construct
  misc_feature 1..876: note = Description of Artificial Sequence: Synthetic coding sequence
  source 1..876: mol_type = other DNA
atggaggacaagagaaacatccagatcatcgagtgggagcacctggacaagaagaagttctacgtgttcggcgtggccatgaccatgatgatcagagtgagcgtgtaccccttcaccctgatcagaaccagactgcaggtgcagaagggcaagagcctgtaccacggcaccttcgacgccttcatcaagatcctgagagccgacggcatcaccggcctgtacagaggcttcctggtgaacaccttcaccctgatcagcggccagtgctacgtgaccacctacgagctgaccagaaagttcgtggccgactacagccagagcaacaccgtgaagagcctggtggccggcggcagcgccagcctggtggcccagagcatcaccgtgagaggcaaccccgagggccagggcgtggtggccttcggccagaccaaggacatcatcagacagatcctgcaggccgacggcctgagaggcttctacagaggctacgtggccagcctgctgacctacatccccaacagcgccgtgtggtggcccttctaccacttctacgccgagcagctgagctacctgtgccccaaggagtgcccccacatcgtgttccaggccgtgagcggccccctggccgccgccaccgccagcatcctgaccaaccccatggacgtgatcagaaccagagtgcaggtggagggcaagaacagcatcatcctgaccttcagacagctgatggccgaggagggcccctggggcctgatgaagggcctgagcgccagaatcatcagcgccacccccagcaccatcgtgatcgtggtgggctacgagagcctgaagaagctgagcctgagacccgagctggtggacagcagacactggtag

SEQ ID NO: 99729 - DNA, 741 bp, synthetic construct
  misc_feature 1..741: note = Description of Artificial Sequence: Synthetic coding sequence
  source 1..741: mol_type = other DNA
atggtgaagatctacagacacgagagcctgctgggcttcttcaagggcatgagcttccccatcgccagcatcgccgtggtgaacagcgtgctgttcggcgtgtacagcaacaccctgctggtgctgaccgccaccagccaccaggagagaagagcccagccccccagctacatgcacatcttcctggccggctgcaccggcggcttcctgcaggcctactgcctggcccccttcgacctgatcaaggtgagactgcagaaccagaccgagcccagagcccagcccggcagccccccccccagataccagggccccgtgcactgcgccgccagcatcttcagagaggagggccccagaggcctgttcagaggcgcctgggccctgaccctgagagacacccccaccgtgggcatctacttcatcacctacgagggcctgtgcagacagtacacccccgagggccagaaccccagcagcgccaccgtgctggtggccggcggcttcgccggcatcgccagctgggtggccgccacccccctggacatgatcaagagcagaatgcagatggacggcctgagaagaagagtgtaccagggcatgctggactgcatggtgagcagcatcagacaggagggcctgggcgtgttcttcagaggcgtgaccatcaacagcgccagagccttccccgtgaacgccgtgaccttcctgagctacgagtacctgctgagatggtggggctag

SEQ ID NO: 99730 - DNA, 795 bp, synthetic construct
  misc_feature 1..795: note = Description of Artificial Sequence: Synthetic coding sequence
  source 1..795: mol_type = other DNA
atgcccgtggaggagttcgtggccggctggatcagcggcgccctgggcctggtgctgggccaccccttcgacaccgtgaagctgctgggcttcttcaagggcatgagcttccccatcgccagcatcgccgtggtgaacagcgtgctgttcggcgtgtacagcaacaccctgctggtgctgaccgccaccagccaccaggagagaagagcccagccccccagctacatgcacatcttcctggccggctgcaccggcggcttcctgcaggcctactgcctggcccccttcgacctgatcaaggtgagactgcagaaccagaccgagcccagagcccagcccggcagccccccccccagataccagggccccgtgcactgcgccgccagcatcttcagagaggagggccccagaggcctgttcagaggcgcctgggccctgaccctgagagacacccccaccgtgggcatctacttcatcacctacgagggcctgtgcagacagtacacccccgagggccagaaccccagcagcgccaccgtgctggtggccggcggcttcgccggcatcgccagctgggtggccgccacccccctggacatgatcaagagcagaatgcagatggacggcctgagaagaagagtgtaccagggcatgctggactgcatggtgagcagcatcagacaggagggcctgggcgtgttcttcagaggcgtgaccatcaacagcgccagagccttccccgtgaacgccgtgaccttcctgagctacgagtacctgctgagatggtggggctag

SEQ ID NO: 99731 - DNA, 555 bp, synthetic construct
  misc_feature 1..555: note = Description of Artificial Sequence: Synthetic coding sequence
  source 1..555: mol_type = other DNA
atggtgaagatctacagacacgagagcgcctactgcctggcccccttcgacctgatcaaggtgagactgcagaaccagaccgagcccagagcccagcccggcagccccccccccagataccagggccccgtgcactgcgccgccagcatcttcagagaggagggccccagaggcctgttcagaggcgcctgggccctgaccctgagagacacccccaccgtgggcatctacttcatcacctacgagggcctgtgcagacagtacacccccgagggccagaaccccagcagcgccaccgtgctggtggccggcggcttcgccggcatcgccagctgggtggccgccacccccctggacatgatcaagagcagaatgcagatggacggcctgagaagaagagtgtaccagggcatgctggactgcatggtgagcagcatcagacaggagggcctgggcgtgttcttcagaggcgtgaccatcaacagcgccagagccttccccgtgaacgccgtgaccttcctgagctacgagtacctgctgagatggtggggctag

SEQ ID NO: 99732 - DNA, 867 bp, synthetic construct
  misc_feature 1..867: note = Description of Artificial Sequence: Synthetic coding sequence
  source 1..867: mol_type = other DNA
atgcccgtggaggagttcgtggccggctggatcagcggcgccctgggcctggtgctgggccaccccttcgacaccgtgaaggtgagactgcagacccagaccacctacagaggcatcgtggactgcatggtgaagatctacagacacgagagcctgctgggcttcttcaagggcatgagcttccccatcgccagcatcgccgtggtgaacagcgtgctgttcggcgtgtacagcaacaccctgctggtgctgaccgccaccagccaccaggagagaagagcccagccccccagctacatgcacatcttcctggccggctgcaccggcggcttcctgcaggcctactgcctggcccccttcgacctgatcaaggtgagactgcagaaccagaccgagcccagagcccagcccggcagccccccccccagataccagggccccgtgcactgcgccgccagcatcttcagagaggagggccccagaggcctgttcagaggcgcctgggccctgaccctgagagacacccccaccgtgggcatctacttcatcacctacgagggcctgtgcagacagtacacccccgagggccagaaccccagcagcgccaccgtgctggtggccggcggcttcgccggcatcgccagctgggtggccgccacccccctggacatgatcaagagcagaatgcagatggacggcctgagaagaagagtgtaccagggcatgctggactgcatggtgagcagcatcagacaggagggcctgggcgtgttcttcagaggcgtgaccatcaacagcgccagagccttccccgtgaacgccgtgaccttcctgagctacgagtacctgctgagatggtggggctag

SEQ ID NO: 99733 - DNA, 741 bp, synthetic construct; identical to SEQ ID NO: 99729
  misc_feature 1..741: note = Description of Artificial Sequence: Synthetic coding sequence
  source 1..741: mol_type = other DNA

SEQ ID NO: 99734 - DNA, 867 bp, synthetic construct; identical to SEQ ID NO: 99732
  misc_feature 1..867: note = Description of Artificial Sequence: Synthetic coding sequence
  source 1..867: mol_type = other DNA

SEQ ID NO: 99735 - DNA, 357 bp, synthetic construct
  misc_feature 1..357: note = Description of Artificial Sequence: Synthetic coding sequence
  source 1..357: mol_type = other DNA
atgcccgtggaggagttcgtggccggctggatcagcggcgccctgggcctggtgctgggccaccccttcgacaccgtgaaggtgagactgcagacccagaccacctacagaggcatcgtggactgcatggtgaagatctacagacacgagagcctgctgggcttcttcaagggcatgagcttccccatcgccagcatcgccgtggtgaacagcgtgctgttcggcgtgtacagcaacaccctgctggtgctgaccgccaccagccaccaggagagaagagcccagccccccagctacatgcacatcttcctggccggctgcaccggcggcttcctgcaggcctactgcctggcctag

SEQ ID NO: 99736 - DNA, 1257 bp, synthetic construct
  misc_feature 1..1257: note = Description of Artificial Sequence: Synthetic coding sequence
  source 1..1257: mol_type = other DNA
atgcaccccagaagacccgacggcttcgacggcctgggctacagaggcggcgccagagacgagcagggcttcggcggcgccttccccgccagaagcttcagcaccggcagcgacctgggccactgggtgaccaccccccccgacatccccggcagcagaaacctgcactggggcgagaagagccccccctacggcgtgcccaccaccagcaccccctacgagggccccaccgaggagcccttcagcagcggcggcggcggcagcgtgcagggccagagcagcgagcagctgaacagattcgccggcttcggcatcggcctggccagcctgttcaccgagaacgtgctggcccacccctgcatcgtgctgagaagacagtgccaggtgaactaccacgcccagcactaccacctgacccccttcaccgtgatcaacatcatgtacagcttcaacaagacccagggccccagagccctgtggaagggcatgggcagcaccttcatcgtgcagggcgtgaccctgggcgccgagggcatcatcagcgagttcacccccctgcccagagaggtgctgcacaagtggagccccaagcagatcggcgagcacctgctgctgaagagcctgacctacgtggtggccatgcccttctacagcgccagcctgatcgagaccgtgcagagcgagatcatcagagacaacaccggcatcctggagtgcgtgaaggagggcatcggcagagtgatcggcatgggcgtgccccacagcaagagactgctgcccctgctgagcctgatcttccccaccgtgctgcacggcgtgctgcactacatcatcagcagcgtgatccagaagttcgtgctgctgatcctgaagagaaagacctacaacagccacctggccgagagcaccagccccgtgcagagcatgctggacgcctacttccccgagctgatcgccaacttcgccgccagcctgtgcagcgacgtgatcctgtaccccctggagaccgtgctgcacagactgcacatccagggcaccagaaccatcatcgacaacaccgacctgggctacgaggtgctgcccatcaacacccagtacgagggcatgagagactgcatcaacaccatcagacaggaggagggcgtgttcggcttctacaagggcttcggcgccgtgatcatccagtacaccctgcacgccgccgtgctgcagatcaccaagatcatctacagcaccctgctgcagaacaacatctag

SEQ ID NO: 99737 - DNA, 1014 bp, synthetic construct
  misc_feature 1..1014: note = Description of Artificial Sequence: Synthetic coding sequence
  source 1..1014: mol_type = other DNA
atgcaccccagaagacccgacggcttcgacggcctgggctacagaggcggcgccagagacgagcagggcttcggcggcgccttccccgccagaagcttcagcaccggcagcgacctgggccactgggtgaccaccccccccgacatccccggcagcagaaacctgcactggggcgagaagagccccccctacggcgtgcccaccaccagcaccccctacgagggccccaccgaggagcccttcagcagcggcggcggcggcagcgtgcagggccagagcagcgagcagctgaacagattcgccggcttcggcatcggcctggccagcctgttcaccgagaacgtgctggcccacccctgcatcgtgctgagaagacagtgccaggtgaactaccacgcccagcactaccacctgacccccttcaccgtgatcaacatcatgtacagcttcaacaagacccagggccccagagccctgtggaagggcatgggcagcaccttcatcgtgcagggcgtgaccctgggcgccgagggcatcatcagcgagttcacccccctgcccagagaggtgctgcacaagtggagccccaagcagatcggcgagcacctgctgctgaagagcctgacctacgtggtggccatgcccttctacagcgccagcctgatcgagaccgtgcagagcatgctggacgcctacttccccgagctgatcgccaacttcgccgccagcctgtgcagcgacgtgatcctgtaccccctggagaccgtgctgcacagactgcacatccagggcaccagaaccatcatcgacaacaccgacctgggctacgaggtgctgcccatcaacacccagtacgagggcatgagagactgcatcaacaccatcagacaggaggagggcgtgttcggcttctacaagggcttcggcgccgtgatcatccagtacaccctgcacgccgccgtgctgcagatcaccaagatcatctacagcaccctgctgcagaacaacatctag

SEQ ID NO: 99738 - DNA, 819 bp, synthetic construct
  misc_feature 1..819: note = Description of Artificial Sequence: Synthetic coding sequence
  source 1..819: mol_type = other DNA
atgtacagcttcaacaagacccagggccccagagccctgtggaagggcatgggcagcaccttcatcgtgcagggcgtgaccctgggcgccgagggcatcatcagcgagttcacccccctgcccagagaggtgctgcacaagtggagccccaagcagatcggcgagcacctgctgctgaagagcctgacctacgtggtggccatgcccttctacagcgccagcctgatcgagaccgtgcagagcgagatcatcagagacaacaccggcatcctggagtgcgtgaaggagggcatcggcagagtgatcggcatgggcgtgccccacagcaagagactgctgcccctgctgagcctgatcttccccaccgtgctgcacggcgtgctgcactacatcatcagcagcgtgatccagaagttcgtgctgctgatcctgaagagaaagacctacaacagccacctggccgagagcaccagccccgtgcagagcatgctggacgcctacttccccgagctgatcgccaacttcgccgccagcctgtgcagcgacgtgatcctgtaccccctggagaccgtgctgcacagactgcacatccagggcaccagaaccatcatcgacaacaccgacctgggctacgaggtgctgcccatcaacacccagtacgagggcatgagagactgcatcaacaccatcagacaggaggagggcgtgttcggcttctacaagggcttcggcgccgtgatcatccagtacaccctgcacgccgccgtgctgcagatcaccaagatcatctacagcaccctgctgcagaacaacatctag

SEQ ID NO: 99739 - DNA, 618 bp, synthetic construct
  misc_feature 1..618: note = Description of Artificial Sequence: Synthetic coding sequence
  source 1..618: mol_type = other DNA
atgcccttctacagcgccagcctgatcgagaccgtgcagagcgagatcatcagagacaacaccggcatcctggagtgcgtgaaggagggcatcggcagagtgatcggcatgggcgtgccccacagcaagagactgctgcccctgctgagcctgatcttccccaccgtgctgcacggcgtgctgcactacatcatcagcagcgtgatccagaagttcgtgctgctgatcctgaagagaaagacctacaacagccacctggccgagagcaccagccccgtgcagagcatgctggacgcctacttccccgagctgatcgccaacttcgccgccagcctgtgcagcgacgtgatcctgtaccccctggagaccgtgctgcacagactgcacatccagggcaccagaaccatcatcgacaacaccgacctgggctacgaggtgctgcccatcaacacccagtacgagggcatgagagactgcatcaacaccatcagacaggaggagggcgtgttcggcttctacaagggcttcggcgccgtgatcatccagtacaccctgcacgccgccgtgctgcagatcaccaagatcatctacagcaccctgctgcagaacaacatctag

SEQ ID NO: 99740 - DNA, 984 bp, synthetic construct
  misc_feature 1..984: note = Description of Artificial Sequence: Synthetic coding sequence
  source 1..984: mol_type = other DNA
atgaagaccgagcagctgaacagattcgccggcttcggcatcggcctggccagcctgttcaccgagaacgtgctggcccacccctgcatcgtgctgagaagacagtgccaggtgaactaccacgcccagcactaccacctgacccccttcaccgtgatcaacatcatgtacagcttcaacaagacccagggccccagagccctgtggaagggcatgggcagcaccttcatcgtgcagggcgtgaccctgggcgccgagggcatcatcagcgagttcacccccctgcccagagaggtgctgcacaagtggagccccaagcagatcggcgagcacctgctgctgaagagcctgacctacgtggtggccatgcccttctacagcgccagcctgatcgagaccgtgcagagcgagatcatcagagacaacaccggcatcctggagtgcgtgaaggagggcatcggcagagtgatcggcatgggcgtgccccacagcaagagactgctgcccctgctgagcctgatcttccccaccgtgctgcacggcgtgctgcactacatcatcagcagcgtgatccagaagttcgtgctgctgatcctgaagagaaagacctacaacagccacctggccgagagcaccagccccgtgcagagcatgctggacgcctacttccccgagctgatcgccaacttcgccgccagcctgtgcagcgacgtgatcctgtaccccctggagaccgtgctgcacagactgcacatccagggcaccagaaccatcatcgacaacaccgacctgggctacgaggtgctgcccatcaacacccagtacgagggcatgagagactgcatcaacaccatcagacaggaggagggcgtgttcggcttctacaagggcttcggcgccgtgatcatccagtacaccctgcacgccgccgtgctgcagatcaccaagatcatctacagcaccctgctgcagaacaacatctag

SEQ ID NO: 99741 - DNA, 771 bp, synthetic construct
  misc_feature 1..771: note = Description of Artificial Sequence: Synthetic coding sequence
  source 1..771: mol_type = other DNA
atgggcagcaccttcatcgtgcagggcgtgaccctgggcgccgagggcatcatcagcgagttcacccccctgcccagagaggtgctgcacaagtggagccccaagcagatcggcgagcacctgctgctgaagagcctgacctacgtggtggccatgcccttctacagcgccagcctgatcgagaccgtgcagagcgagatcatcagagacaacaccggcatcctggagtgcgtgaaggagggcatcggcagagtgatcggcatgggcgtgccccacagcaagagactgctgcccctgctgagcctgatcttccccaccgtgctgcacggcgtgctgcactacatcatcagcagcgtgatccagaagttcgtgctgctgatcctgaagagaaagacctacaacagccacctggccgagagcaccagccccgtgcagagcatgctggacgcctacttccccgagctgatcgccaacttcgccgccagcctgtgcagcgacgtgatcctgtaccccctggagaccgtgctgcacagactgcacatccagggcaccagaaccatcatcgacaacaccgacctgggctacgaggtgctgcccatcaacacccagtacgagggcatgagagactgcatcaacaccatcagacaggaggagggcgtgttcggcttctacaagggcttcggcgccgtgatcatccagtacaccctgcacgccgccgtgctgcagatcaccaagatcatctacagcaccctgctgcagaacaacatctag

SEQ ID NO: 99742 - DNA, 819 bp, synthetic construct; identical to SEQ ID NO: 99738
  misc_feature 1..819: note = Description of Artificial Sequence: Synthetic coding sequence
  source 1..819: mol_type = other DNA

SEQ ID NO: 99743 - DNA, 2220 bp, synthetic construct
  misc_feature 1..2220: note = Description of Artificial Sequence: Synthetic coding sequence
  source 1..2220: mol_type = other DNA
atgagcagcgagagcaaggagcagcacaacgtgagccccagagacagcgccgagggcaacgacagctaccccagcggcatccacctggagctgcagagagagagcagcaccgacttcaagcagttcgagaccaacgaccagtgcagaccctaccacagaatcctgatcgagagacaggagaagagcgacaccaacttcaaggagttcgtgatcaagaagctgcagaagaactgccagtgcagccccgccaaggccaagaacatgatcctgggcttcctgcccgtgctgcagtggctgcccaagtacgacctgaagaagaacatcctgggcgacgtgatgagcggcctgatcgtgggcatcctgctggtgccccagagcatcgcctacagcctgctggccggccaggagcccgtgtacggcctgtacaccagcttcttcgccagcatcatctacttcctgctgggcaccagcagacacatcagcgtgggcatcttcggcgtgctgtgcctgatgatcggcgagaccgtggacagagagctgcagaaggccggctacgacaacgcccacagcgcccccagcctgggcatggtgagcaacggcagcaccctgctgaaccacaccagcgacagaatctgcgacaagagctgctacgccatcatggtgggcagcaccgtgaccttcatcgccggcgtgtaccaggtggccatgggcttcttccaggtgggcttcgtgagcgtgtacctgagcgacgccctgctgagcggcttcgtgaccggcgccagcttcaccatcctgaccagccaggccaagtacctgctgggcctgaacctgcccagaaccaacggcgtgggcagcctgatcaccacctggatccacgtgttcagaaacatccacaagaccaacctgtgcgacctgatcaccagcctgctgtgcctgctggtgctgctgcccaccaaggagctgaacgagcacttcaagagcaagctgaaggcccccatccccatcgagctggtggtggtggtggccgccaccctggccagccacttcggcaagctgcacgagaactacaacagcagcatcgccggccacatccccaccggcttcatgccccccaaggtgcccgagtggaacctgatccccagcgtggccgtggacgccatcgccatcagcatcatcggcttcgccatcaccgtgagcctgagcgagatgttcgccaagaagcacggctacaccgtgaaggccaaccaggagatgtacgccatcggcttctgcaacatcatccccagcttcttccactgcttcaccaccagcgccgccctggccaagaccctggtgaaggagagcaccggctgccacacccagctgagcggcgtggtgaccgccctggtgctgctgctggtgctgctggtgatcgcccccctgttctacagcctgcagaagagcgtgctgggcgtgatcaccatcgtgaacctgagaggcgccctgagaaagttcagagacctgcccaagatgtggagcatcagcagaatggacaccgtgatctggttcgtgaccatgctgagcagcgccctgctgagcaccgagatcggcctgctggtgggcgtgtgcttcagcatcttctgcgtgatcctgagaacccagaagcccaagagcagcctgctgggcctggtggaggagagcgaggtgttcgagagcgtgagcgcctacaagaacctgcagatcaagcccggcatcaagatcttcagattcgtggcccccctgtactacatcaacaaggagtgcttcaagagcgccctgtacaagcagaccgtgaaccccatcctgatcaaggtggcctggaagaaggccgccaagagaaagatcaaggagaaggtggtgaccctgggcggcatccaggacgagatgagcgtgcagctgagccacgaccccctggagctgcacaccatcgtgatcgactgcagcgccatccagttcctggacaccgccggcatccacaccctgaaggaggtgagaagagactacgaggccatcggcatccaggtgctgctggcccagtgcaaccccaccgtgagagacagcctgaccaacggcgagtactgcaagaaggaggaggagaacctgctgttctacagcgtgtacgaggccatggccttcgccgaggtgagcaagaaccagaagggcgtgtgcgtgcccaacggcctgagcctgagcagcgactag

SEQ ID NO: 99744 - DNA, 72 bp, synthetic construct
  misc_feature 1..72: note = Description of Artificial Sequence: Synthetic coding sequence
  source 1..72: mol_type = other DNA
atgagcagcgagagcaaggagcagcacaacgtgagccccagagacagcgccgagggcaacgacagctactag

SEQ ID NO: 99745 - DNA, 2295 bp, synthetic construct
  misc_feature 1..2295: note = Description of Artificial Sequence: Synthetic coding sequence
  source 1..2295: mol_type = other DNA
atgatcgagcccttcggcaaccagtacatcgtggccagacccgtgtacagcaccaacgccttcgaggagaaccacaagaagaccggcagacaccacaagaccttcctggaccacctgaaggtgtgctgcagctgcagcccccagaaggccaagagaatcgtgctgagcctgttccccatcgccagctggctgcccgcctacagactgaaggagtggctgctgagcgacatcgtgagcggcatcagcaccggcatcgtggccgtgctgcagggcctggccttcgccctgctggtggacatcccccccgtgtacggcctgtacgccagcttcttccccgccatcatctacctgttcttcggcaccagcagacacatcagcgtgggccccttccccatcctgagcatgatggtgggcctggccgtgagcggcgccgtgagcaaggccgtgcccgacagaaacgccaccaccctgggcctgcccaacaacagcaacaacagcagcctgctggacgacgagagagtgagagtggccgccgccgccagcgtgaccgtgctgagcggcatcatccagctggccttcggcatcctgagaatcggcttcgtggtgatctacctgagcgagagcctgatcagcggcttcaccaccgccgccgccgtgcacgtgctggtgagccagctgaagttcatcttccagctgaccgtgcccagccacaccgaccccgtgagcatcttcaaggtgctgtacagcgtgttcagccagatcgagaagaccaacatcgccgacctggtgaccgccctgatcgtgctgctggtggtgagcatcgtgaaggagatcaaccagagattcaaggacaagctgcccgtgcccatccccatcgagttcatcatgaccgtgatcgccgccggcgtgagctacggctgcgacttcaagaacagattcaaggtggccgtggtgggcgacatgaaccccggcttccagccccccatcacccccgacgtggagaccttccagaacaccgtgggcgactgcttcggcatcgccatggtggccttcgccgtggccttcagcgtggccagcgtgtacagcctgaagtacgactaccccctggacggcaaccaggagctgatcgccctgggcctgggcaacatcgtgtgcggcgtgttcagaggcttcgccggcagcaccgccctgagcagaagcgccgtgcaggagagcaccggcggcaagacccagatcgccggcctgatcggcgccatcatcgtgctgatcgtggtgctggccatcggcttcctgctggcccccctgcagaagagcgtgctggccgccctggccctgggcaacctgaagggcatgctgatgcagttcgccgagatcggcagactgtggagaaaggacaagtacgactgcctgatctggatcatgaccttcatcttcaccatcgtgctgggcctgggcctgggcctggccgccagcgtggccttccagctgctgaccatcgtgttcagaacccagttccccaagtgcagcaccctggccaacatcggcagaaccaacatctacaagaacaagaaggactactacgacatgtacgagcccgagggcgtgaagatcttcagatgccccagccccatctacttcgccaacatcggcttcttcagaagaaagctgatcgacgccgtgggcttcagccccctgagaatcctgagaaagagaaacaaggccctgagaaagatcagaaagctgcagaagcagggcctgctgcaggtgacccccaagggcttcatctgcaccgtggacaccatcaaggacagcgacgaggagctggacaacaaccagatcgaggtgctggaccagcccatcaacaccaccgacctgcccttccacatcgactggaacgacgacctgcccctgaacatcgaggtgcccaagatcagcctgcacagcctgatcctggacttcagcgccgtgagcttcctggacgtgagcagcgtgagaggcctgaagagcatcctgcaggagttcatcagaatcaaggtggacgtgtacatcgtgggcaccgacgacgacttcatcgagaagctgaacagatacgagttcttcgacggcgaggtgaagagcagcatcttcttcctgaccatccacgacgccgtgctgcacatcctgatgaagaaggactacagcaccagcaagttcaaccccagccaggagaaggacggcaagatcgacttcaccatcaacaccaacggcggcctgagaaacagagtgtacgaggtgcccgtggagaccaagttctag

SEQ ID NO: 99746 - DNA, 1956 bp, synthetic construct
  misc_feature 1..1956: note = Description of Artificial Sequence: Synthetic coding sequence
  source 1..1956: mol_type = other DNA
atgctgctgagaaagatcatcaagagacaggaggacatcatcagacacttctggatcatcagcaagtgcgtggtggccagctggctgcccgcctacagactgaaggagtggctgctgagcgacatcgtgagcggcatcagcaccggcatcgtggccgtgctgcagggcctggccttcgccctgctggtggacatcccccccgtgtacggcctgtacgccagcttcttccccgccatcatctacctgttcttcggcaccagcagacacatcagcgtgggccccttccccatcctgagcatgatggtgggcctggccgtgagcggcgccgtgagcaaggccgtgcccgacagaaacgccaccaccctgggcctgcccaacaacagcaacaacagcagcctgctggacgacgagagagtgagagtggccgccgccgccagcgtgaccgtgctgagcggcatcatccagctggccttcggcatcctgagaatcggcttcgtggtgatctacctgagcgagagcctgatcagcggcttcaccaccgccgccgccgtgcacgtgctggtgagccagctgaagttcatcttccagctgaccgtgcccagccacaccgaccccgtgagcatcttcaaggtgctgtacagcgtgttcagccagatcgagaagaccaacatcgccgacctggtgaccgccctgatcgtgctgctggtggtgagcatcgtgaaggagatcaaccagagattcaaggacaagctgcccgtgcccatccccatcgagttcatcatgaccgtgatcgccgccggcgtgagctacggctgcgacttcaagaacagattcaaggtggccgtggtgggcgacatgaaccccggcttccagccccccatcacccccgacgtggagaccttccagaacaccgtgggcgactgcttcggcatcgccatggtggccttcgccgtggccttcagcgtggccagcgtgtacagcctgaagtacgactaccccctggacggcaaccaggagctgatcgccctgggcctgggcaacatcgtgtgcggcgtgttcagaggcttcgccggcagcaccgccctgagcagaagcgccgtgcaggagagcaccggcggcaagacccagatcgccggcctgatcggcgccatcatcgtgctgatcgtggtgctggccatcggcttcctgctggcccccctgcagaagagcgtgctggccgccctggccctgggcaacctgaagggcatgctgatgcagttcgccgagatcggcagactgtggagaaaggacaagtacgactgcctgatctggatcatgaccttcatcttcaccatcgtgctgggcctgggcctgggcctggccgccagcgtggccttccagctgctgaccatcgtgttcagaacccagttccccaagtgcagcaccctggccaacatcggcagaaccaacatctacaagaacaagaaggactactacgacatgtacgagcccgagggcgtgaagatcttcagatgccccagccccatctacttcgccaacatcggcttcttcagaagaaagctgatcgacgccgtgggcttcagccccctgagaatcctgagaaagagaaacaaggccctgagaaagatcagaaagctgcagaagcagggcctgctgcaggtgacccccatcctgcaggagttcatcagaatcaaggtggacgtgtacatcgtgggcaccgacgacgacttcatcgagaagctgaacagatacgagttcttcgacggcgaggtgaagagcagcatcttcttcctgaccatccacgacgccgtgctgcacatcctgatgaagaaggactacagcaccagcaagttcaaccccagccaggagaaggacggcaagatcgacttcaccatcaacaccaacggcggcctgagaaacagagtgtacgaggtgcccgtggagaccaagttctag

SEQ ID NO: 99747 - DNA, 363 bp, synthetic construct
  misc_feature 1..363: note = Description of Artificial Sequence: Synthetic coding sequence
  source 1..363: mol_type = other DNA
atgatcgagcccttcggcaaccagtacatcgtggccagacccgtgtacagcaccaacgccttcgaggagaaccacaagaagaccggcagacaccacaagaccttcctggaccacctgaaggtgtgctgcagctgcagcccccagaaggccaagagaatcgtgctgagcctgttccccatcgccagctggctgcccgcctacagactgaaggagtggctgctgagcgacatcgtgagcggcatcagcaccggcatcgtggccgtgctgcagggcctggccttcgccctgctggtggacatcccccccgtgtacggcctgtacgccagcttcttccccgccatcatctacctgttcttcggctag

SEQ ID NO: 99748 - DNA, 2343 bp, synthetic construct
  misc_feature 1..2343: note = Description of Artificial Sequence: Synthetic coding sequence
  source 1..2343: mol_type = other DNA
atggccgcccccggcggcagaagcgagcccccccagctgcccgagtacagctgcagctacatggtgagcagacccgtgtacagcgagctggccttccagcagcagcacgagagaagactgcaggagagaaagaccctgagagagagcctggccaagtgctgcagctgcagcagaaagagagccttcggcgtgctgaagaccctggtgcccatcctggagtggctgcccaagtacagagtgaaggagtggctgctgagcgacgtgatcagcggcgtgagcaccggcctggtggccaccctgcagggcatggcctacgccctgctggccgccgtgcccgtgggctacggcctgtacagcgccttcttccccatcctgacctacttcatcttcggcaccagcagacacatcagcgtgggccccttccccgtggtgagcctgatggtgggcagcgtggtgctgagcatggcccccgacgagcacttcctggtgagcagcagcaacggcaccgtgctgaacaccaccatgatcgacaccgccgccagagacaccgccagagtgctgatcgccagcgccctgaccctgctggtgggcatcatccagctgatcttcggcggcctgcagatcggcttcatcgtgagatacctggccgaccccctggtgggcggcttcaccaccgccgccgccttccaggtgctggtgagccagctgaagatcgtgctgaacgtgagcaccaagaactacaacggcgtgctgagcatcatctacaccctggtggagatcttccagaacatcggcgacaccaacctggccgacttcaccgccggcctgctgaccatcgtggtgtgcatggccgtgaaggagctgaacgacagattcagacacaagatccccgtgcccatccccatcgaggtgatcgtgaccatcatcgccaccgccatcagctacggcgccaacctggagaagaactacaacgccggcatcgtgaagagcatccccagaggcttcctgccccccgagctgccccccgtgagcctgttcagcgagatgctggccgccagcttcagcatcgccgtggtggcctacgccatcgccgtgagcgtgggcaaggtgtacgccaccaagtacgactacaccatcgacggcaaccaggagttcatcgccttcggcatcagcaacatcttcagcggcttcttcagctgcttcgtggccaccaccgccctgagcagaaccgccgtgcaggagagcaccggcggcaagacccaggtggccggcatcatcagcgccgccatcgtgatgatcgccatcctggccctgggcaagctgctggagcccctgcagaagagcgtgctggccgccgtggtgatcgccaacctgaagggcatgttcatgcagctgtgcgacatccccagactgtggagacagaacaagatcgacgccgtgatctgggtgttcacctgcatcgtgagcatcatcctgggcctggacctgggcctgctggccggcctgatcttcggcctgctgaccgtggtgctgagagtgcagttccccagctggaacggcctgggcagcatccccagcaccgacatctacaagagcaccaagaactacaagaacatcgaggagccccagggcgtgaagatcctgagattcagcagccccatcttctacggcaacgtggacggcttcaagaagtgcatcaagagcaccgtgggcttcgacgccatcagagtgtacaacaagagactgaaggccctgagaaagatccagaagctgatcaagagcggccagctgagagccaccaagaacggcatcatcagcgacgccgtgagcaccaacaacgccttcgagcccgacgaggacatcgaggacctggaggagctggacatccccaccaaggagatcgagatccaggtggactggaacagcgagctgcccgtgaaggtgaacgtgcccaaggtgcccatccacagcctggtgctggactgcggcgccatcagcttcctggacgtggtgggcgtgagaagcctgagagtgatcgtgaaggagttccagagaatcgacgtgaacgtgtacttcgccagcctgcaggactacgtgatcgagaagctggagcagtgcggcttcttcgacgacaacatcagaaaggacaccttcttcctgaccgtgcacgacgccatcctgtacctgcagaaccaggtgaagagccaggagggccagggcagcatcctggagaccatcaccctgatccaggactgcaaggacaccctggagctgatcgagaccgagctgaccgaggaggagctggacgtgcaggacgaggccatgagaaccctggccagctag

SEQ ID NO: 99749 - DNA, 396 bp, synthetic construct
  misc_feature 1..396: note = Description of Artificial Sequence: Synthetic coding sequence
  source 1..396: mol_type = other DNA
atggccgcccccggcggcagaagcgagcccccccagctgcccgagtacagctgcagctacatggtgagcagacccgtgtacagcgagctggccttccagcagcagcacgagagaagactgcaggagagaaagaccctgagagagagcctggccaagtgctgcagctgcagcagaaagagagccttcggcgtgctgaagaccctggtgcccatcctggagtggctgcccaagtacagagtgaaggagtggctgctgagcgacgtgatcagcggcgtgagcaccggcctggtggccaccctgcagggcatggcctacgccctgctggccgccgtgcccgtgggctacggcctgtacagcgccttcttccccatcctgacctacttcatcttcggctag

SEQ ID NO: 99750 - DNA, 1026 bp, synthetic construct
  misc_feature 1..1026: note = Description of Artificial Sequence: Synthetic coding sequence
  source 1..1026: mol_type = other DNA
atgagacacggcctggccgtgcccagcgtgctggccgccgtggtgatcgccaacctgaagggcatgttcatgcagctgtgcgacatccccagactgtggagacagaacaagatcgacgccgtgatctgggtgttcacctgcatcgtgagcatcatcctgggcctggacctgggcctgctggccggcctgatcttcggcctgctgaccgtggtgctgagagtgcagttccccagctggaacggcctgggcagcatccccagcaccgacatctacaagagcaccaagaactacaagaacatcgaggagccccagggcgtgaagatcctgagattcagcagccccatcttctacggcaacgtggacggcttcaagaagtgcatcaagagcaccgtgggcttcgacgccatcagagtgtacaacaagagactgaaggccctgagaaagatccagaagctgatcaagagcggccagctgagagccaccaagaacggcatcatcagcgacgccgtgagcaccaacaacgccttcgagcccgacgaggacatcgaggacctggaggagctggacatccccaccaaggagatcgagatccaggtggactggaacagcgagctgcccgtgaaggtgaacgtgcccaaggtgcccatccacagcctggtgctggactgcggcgccatcagcttcctggacgtggtgggcgtgagaagcctgagagtgatcgtgaaggagttccagagaatcgacgtgaacgtgtacttcgccagcctgcaggactacgtgatcgagaagctggagcagtgcggcttcttcgacgacaacatcagaaaggacaccttcttcctgaccgtgcacgacgccatcctgtacctgcagaaccaggtgaagagccaggagggccagggcagcatcctggagaccatcaccctgatccaggactgcaaggacaccctggagctgatcgagaccgagctgaccgaggaggagctggacgtgcaggacgaggccatgagaaccctggccagctag

SEQ ID NO: 99751 - DNA, 1050 bp, synthetic construct
  misc_feature 1..1050: note = Description of Artificial Sequence: Synthetic coding sequence
  source 1..1050: mol_type = other DNA
atgatcgccatcctggccctgggcaagctgctggagcccctgcagaagagcgtgctggccgccgtggtgatcgccaacctgaagggcatgttcatgcagctgtgcgacatccccagactgtggagacagaacaagatcgacgccgtgatctgggtgttcacctgcatcgtgagcatcatcctgggcctggacctgggcctgctggccggcctgatcttcggcctgctgaccgtggtgctgagagtgcagttccccagctggaacggcctgggcagcatccccagcaccgacatctacaagagcaccaagaactacaagaacatcgaggagccccagggcgtgaagatcctgagattcagcagccccatcttctacggcaacgtggacggcttcaagaagtgcatcaagagcaccgtgggcttcgacgccatcagagtgtacaacaagagactgaaggccctgagaaagatccagaagctgatcaagagcggccagctgagagccaccaagaacggcatcatcagcgacgccgtgagcaccaacaacgccttcgagcccgacgaggacatcgaggacctggaggagctggacatccccaccaaggagatcgagatccaggtggactggaacagcgagctgcccgtgaaggtgaacgtgcccaaggtgcccatccacagcctggtgctggactgcggcgccatcagcttcctggacgtggtgggcgtgagaagcctgagagtgatcgtgaaggagttccagagaatcgacgtgaacgtgtacttcgccagcctgcaggactacgtgatcgagaagctggagcagtgcggcttcttcgacgacaacatcagaaaggacaccttcttcctgaccgtgcacgacgccatcctgtacctgcagaaccaggtgaagagccaggagggccagggcagcatcctggagaccatcaccctgatccaggactgcaaggacaccctggagctgatcgagaccgagctgaccgaggaggagctggacgtgcaggacgaggccatgagaaccctggccagctag

SEQ ID NO: 99752 - DNA, 1104 bp, synthetic construct
  misc_feature 1..1104: note = Description of Artificial Sequence: Synthetic coding sequence
  source 1..1104: mol_type = other DNA
atgagacacggcctggccgtgcccgtggccggcatcatcagcgccgccatcgtgatgatcgccatcctggccctgggcaagctgctggagcccctgcagaagagcgtgctggccgccgtggtgatcgccaacctgaagggcatgttcatgcagctgtgcgacatccccagactgtggagacagaacaagatcgacgccgtgatctgggtgttcacctgcatcgtgagcatcatcctgggcctggacctgggcctgctggccggcctgatcttcggcctgctgaccgtggtgctgagagtgcagttccccagctggaacggcctgggcagcatccccagcaccgacatctacaagagcaccaagaactacaagaacatcgaggagccccagggcgtgaagatcctgagattcagcagccccatcttctacggcaacgtggacggcttcaagaagtgcatcaagagcaccgtgggcttcgacgccatcagagtgtacaacaagagactgaaggccctgagaaagatccagaagctgatcaagagcggccagctgagagccaccaagaacggcatcatcagcgacgccgtgagcaccaacaacgccttcgagcccgacgaggacatcgaggacctggaggagctggacatccccaccaaggagatcgagatccaggtggactggaacagcgagctgcccgtgaaggtgaacgtgcccaaggtgcccatccacagcctggtgctggactgcggcgccatcagcttcctggacgtggtgggcgtgagaagcctgagagtgatcgtgaaggagttccagagaatcgacgtgaacgtgtacttcgccagcctgcaggactacgtgatcgagaagctggagcagtgcggcttcttcgacgacaacatcagaaaggacaccttcttcctgaccgtgcacgacgccatcctgtacctgcagaaccaggtgaagagccaggagggccagggcagcatcctggagaccatcaccctgatccaggactgcaaggacaccctggagctgatcgagaccgagctgaccgaggaggagctggacgtgcaggacgaggccatgagaaccctggccagctag

SEQ ID NO: 99753 - DNA, 2235 bp, synthetic construct
  misc_feature 1..2235: note = Description of Artificial Sequence: Synthetic coding sequence
  source 1..2235: mol_type = other DNA
atggaccacgccgaggagaacgagatcctggccgccacccagagatactacgtggagagacccatcttcagccaccccgtgctgcaggagagactgcacaccaaggacaaggtgcccgacagcatcgccgacaagctgaagcaggccttcacctgcacccccaagaagatcagaaacatcatctacatgttcctgcccatcaccaagtggctgcccgcctacaagttcaaggagtacgtgctgggcgacctggtgagcggcatcagcaccggcgtgctgcagctgccccagggcctggccttcgccatgctggccgccgtgccccccatcttcggcctgtacagcagcttctaccccgtgatcatgtactgcttcctgggcaccagcagacacatcagcatcggccccttcgccgtgatcagcctgatgatcggcggcgtggccgtgagactggtgcccgacgacatcgtgatccccggcggcgtgaacgccaccaacggcaccgaggccagagacgccctgagagtgaaggtggccatgagcgtgaccctgctgagcggcatcatccagttctgcctgggcgtgtgcagattcggcttcgtggccatctacctgaccgagcccctggtgagaggcttcaccaccgccgccgccgtgcacgtgttcaccagcatgctgaagtacctgttcggcgtgaagaccaagagatacagcggcatcttcagcgtggtgtacagcaccgtggccgtgctgcagaacgtgaagaacctgaacgtgtgcagcctgggcgtgggcctgatggtgttcggcctgctgctgggcggcaaggagttcaacgagagattcaaggagaagctgcccgcccccatccccctggagttcttcgccgtggtgatgggcaccggcatcagcgccggcttcaacctgaaggagagctacaacgtggacgtggtgggcaccctgcccctgggcctgctgccccccgccaaccccgacaccagcctgttccacctggtgtacgtggacgccatcgccatcgccatcgtgggcttcagcgtgaccatcagcatggccaagaccctggccaacaagcacggctaccaggtggacggcaaccaggagctgatcgccctgggcctgtgcaacagcatcggcagcctgttccagaccttcagcatcagctgcagcctgagcagaagcctggtgcaggagggcaccggcggcaagacccagctggccggctgcctggccagcctgatgatcctgctggtgatcctggccaccggcttcctgttcgagagcctgccccaggccgtgctgagcgccatcgtgatcgtgaacctgaagggcatgttcatgcagttcagcgacctgcccttcttctggagaaccagcaagatcgagctgaccatctggctgaccaccttcgtgagcagcctgttcctgggcctggactacggcctgatcaccgccgtgatcatcgccctgctgaccgtgatctacagaacccagagccccagctacaaggtgctgggcaagctgcccgagaccgacgtgtacatcgacatcgacgcctacgaggaggtgaaggagatccccggcatcaagatcttccagatcaacgcccccatctactacgccaacagcgacctgtacagcaacgccctgaagagaaagaccggcgtgaaccccgccgtgatcatgggcgccagaagaaaggccatgagaaagtacgccaaggaggtgggcaacgccaacatggccaacgccaccgtggtgaaggccgacgccgaggtggacggcgaggacgccaccaagcccgaggaggaggacggcgaggtgaagtacccccccatcgtgatcaagagcaccttccccgaggagatgcagagattcatgccccccggcgacaacgtgcacaccgtgatcctggacttcacccaggtgaacttcatcgacagcgtgggcgtgaagaccctggccggcatcgtgaaggagtacggcgacgtgggcatctacgtgtacctggccggctgcagcgcccaggtggtgaacgacctgaccagaaacagattcttcgagaaccccgccctgtgggagctgctgttccacagcatccacgacgccgtgctgggcagccagctgagagaggccctggccgagcaggaggccagcgccccccccagccaggaggacctggagcccaacgccacccccgccacccccgaggcctag

SEQ ID NO: 99754 - DNA, 2058 bp, synthetic construct
  misc_feature 1..2058: note = Description of Artificial Sequence: Synthetic coding sequence
  source 1..2058: mol_type = other DNA
atggaccacgccgaggagaacgagatcctggccgccacccagagatactacgtggagagacccatcttcagccaccccgtgctgcaggagagactgcacaccaaggacaaggtgcccgacagcatcgccgacaagctgaagcaggccttcacctgcacccccaagaagatcagaaacatcatctacatgttcctgcccatcaccaagtggctgcccgcctacaagttcaaggagtacgtgctgggcgacctggtgagcggcatcagcaccggcgtgctgcagctgccccagggcctggccttcgccatgctggccgccgtgccccccatcttcggcctgtacagcagcttctaccccgtgatcatgtactgcttcctgggcaccagcagacacatcagcatcggccccttcgccgtgatcagcctgatgatcggcggcgtggccgtgagactggtgcccgacgacatcgtgatccccggcggcgtgaacgccaccaacggcaccgaggccagagacgccctgagagtgaaggtggccatgagcgtgaccctgctgagcggcatcatccagttctgcctgggcgtgtgcagattcggcttcgtggccatctacctgaccgagcccctggtgagaggcttcaccaccgccgccgccgtgcacgtgttcaccagcatgctgaagtacctgttcggcgtgaagaccaagagatacagcggcatcttcagcgtggtgtacagcaccgtggccgtgctgcagaacgtgaagaacctgaacgtgtgcagcctgggcgtgggcctgatggtgttcggcctgctgctgggcggcaaggagttcaacgagagattcaaggagaagctgcccgcccccatccccctggagttcttcgccgtggtgatgggcaccggcatcagcgccggcttcaacctgaaggagagctacaacgtggacgtggtgggcaccctgcccctgggcctgctgccccccgccaaccccgacaccagcctgttccacctggtgtacgtggacgccatcgccatcgccatcgtgggcttcagcgtgaccatcagcatggccaagaccctggccaacaagcacggctaccaggtggacggcaaccaggagctgatcgccctgggcctgtgcaacagcatcggcagcctgttccagaccttcagcatcagctgcagcctgagcagaagcctggtgcaggagggcaccggcggcaagacccagctggccggctgcctggccagcctgatgatcctgctggtgatcctggccaccggcttcctgttcgagagcctgccccaggccgtgctgagcgccatcgtgatcgtgaacctgaagggcatgttcatgcagttcagcgacctgcccttcttctggagaaccagcaagatcgagctgaccatctggctgaccaccttcgtgagcagcctgttcctgggcctggactacggcctgatcaccgccgtgatcatcgccctgctgaccgtgatctacagaacccagagccccagctacaaggtgctgggcaagctgcccgagaccgacgtgtacatcgacatcgacgcctacgaggaggtgaaggagatccccggcatcaagatcttccagatcaacgcccccatctactacgccaacagcgacctgtacagcaacgccctgaagagaaagaccggcgtgaaccccgccgtgatcatgggcgccagaagaaaggccatgagaaagtacgccaaggaggtgggcaacgccaacatggccaacgccaccgtggtgaaggccgacgccgaggtggacggcgaggacgccaccaagcccgaggaggaggacggcgaggtgaagtacccccccatcgtgatcaagagcaccttccccgaggagatgcagagattcatgccccccggcgacaacgtgcacaccgtgatcctggacttcacccaggtgaacttcatcgacagcgtgggcgtgaagaccctggccggcatcgtgaaggagtacggcgacgtgggcatctacgtgtacctggccggctgcagcgccttcatccagagatag

SEQ ID NO: 99755 - DNA, 534 bp, synthetic construct
  misc_feature 1..534: note = Description of Artificial Sequence: Synthetic coding sequence
  source 1..534: mol_type = other DNA
atgggcgccagaagaaaggccatgagaaagtacgccaaggaggtgggcaacgccaacatggccaacgccaccgtggtgaaggccgacgccgaggtggacggcgaggacgccaccaagcccgaggaggaggacggcgaggtgaagtacccccccatcgtgatcaagagcaccttccccgaggagatgcagagattcatgccccccggcgacaacgtgcacaccgtgatcctggacttcacccaggtgaacttcatcgacagcgtgggcgtgaagaccctggccggcatcgtgaaggagtacggcgacgtgggcatctacgtgtacctggccggctgcagcgcccaggtggtgaacgacctgaccagaaacagattcttcgagaaccccgccctgtgggagctgctgttccacagcatccacgacgccgtgctgggcagccagctgagagaggccctggccgagcaggaggccagcgccccccccagccaggaggacctggagcccaacgccacccccgccacccccgaggcctag

SEQ ID NO: 99756 - DNA, 1008 bp, synthetic construct
  misc_feature 1..1008: note = Description of Artificial Sequence: Synthetic coding sequence
  source 1..1008: mol_type = other DNA
atggaccacgccgaggagaacgagatcctggccgccacccagagatactacgtggagagacccatcttcagccaccccgtgctgcaggagagactgcacaccaaggacaaggtgcccgacagcatcgccgacaagctgaagcaggccttcacctgcacccccaagaagatcagaaacatcatctacatgttcctgcccatcaccaagtggctgcccgcctacaagttcaaggagtacgtgctgggcgacctggtgagcggcatcagcaccggcgtgctgcagctgccccagggcctggccttcgccatgctggccgccgtgccccccatcttcggcctgtacagcagcttctaccccgtgatcatgtactgcttcctgggcaccagcagacacatcagcatcggccccttcgccgtgatcagcctgatgatcggcggcgtggccgtgagactggtgcccgacgacatcgtgatccccggcggcgtgaacgccaccaacggcaccgaggccagagacgccctgagagtgaaggtggccatgagcgtgaccctgctgagcggcatcatccagttctgcctgggcgtgtgcagattcggcttcgtggccatctacctgaccgagcccctggtgagaggcttcaccaccgccgccgccgtgcacgtgttcaccagcatgctgaagtacctgttcggcgtgaagaccaagagatacagcggcatcttcagcgtggtgtacagcaccgtggccgtgctgcagaacgtgaagaacctgaacgtgtgcagcctgggcgtgggcctgatggtgttcggcctgctgctgggcggcaaggagttcaacgagagattcaaggagaagctgcccgcccccatccccctggagttcttcgccgtggtgatgggcaccggcatcagcgccggcttcaacctgaaggagagctacaacgtggacgtggtgggcaccctgcccctgggcttccacaccgagatgaccagaagatggagaccctag

SEQ ID NO: 99757 - DNA, 2145 bp, synthetic construct
  misc_feature 1..2145: note = Description of Artificial Sequence: Synthetic coding sequence
  source 1..2145: mol_type = other DNA
atggaccacgccgaggagaacgagatcctggccgccacccagagatactacgtggagagacccatcttcagccaccccgtgctgcaggagagactgcacaccaaggacaaggtgcccgacagcatcgccgacaagctgaagcaggccttcacctgcacccccaagaagatcagaaacatcatctacatgttcctgcccatcaccaagtggctgcccgcctacaagttcaaggagtacgtgctgggcgacctggtgagcggcatcagcaccggcgtgctgcagctgccccagggcctggccttcgccatgctggccgccgtgccccccatcttcggcctgtacagcagcttctaccccgtgatcatgtactgcttcctgggcaccagcagacacatcagcatcggccccttcgccgtgatcagcctgatgatcggcggcgtggccgtgagactggtgcccgacgacatcgtgatccccggcggcgtgaacgccaccaacggcaccgaggccagagacgccctgagagtgaaggtggccatgagcgtgaccctgctgagcggcatcatccagttctgcctgggcgtgtgcagattcggcttcgtggccatctacctgaccgagcccctggtgagaggcttcaccaccgccgccgccgtgcacgtgttcaccagcatgctgaagtacctgttcggcgtgaagaccaagagatacagcggcatcttcagcgtggtgtacagcaccgtggccgtgctgcagaacgtgaagaacctgaacgtgtgcagcctgggcgtgggcctgatggtgttcggcctgctgctgggcggcaaggagttcaacgagagattcaaggagaagctgcccgcccccatccccctggagttcttcgccgtggtgatgggcaccggcatcagcgccggcttcaacctgaaggagagctacaacgtggacgtggtgggcaccctgcccctgggcctgctgccccccgccaaccccgacaccagcctgttccacctggtgtacgtggacgccatcgccatcgccatcgtgggcttcagcgtgaccatcagcatggccaagaccctggccaacaagcacggctaccaggtggacggcaaccaggagctgatcgccctgggcctgtgcaacagcatcggcagcctgttccagaccttcagcatcagctgcagcctgagcagaagcctggtgcaggagggcaccggcggcaagacccagctggccggctgcctggccagcctgatgatcctgctggtgatcctggccaccggcttcctgttcgagagcctgccccagaccatctggctgaccaccttcgtgagcagcctgttcctgggcctggactacggcctgatcaccgccgtgatcatcgccctgctgaccgtgatctacagaacccagagccccagctacaaggtgctgggcaagctgcccgagaccgacgtgtacatcgacatcgacgcctacgaggaggtgaaggagatccccggcatcaagatcttccagatcaacgcccccatctactacgccaacagcgacctgtacagcaacgccctgaagagaaagaccggcgtgaaccccgccgtgatcatgggcgccagaagaaaggccatgagaaagtacgccaaggaggtgggcaacgccaacatggccaacgccaccgtggtgaaggccacccaggacgccgaggtggacggcgaggacgccaccaagcccgaggaggaggacggcgaggtgaagtacccccccatcgtgatcaagagcaccttccccgaggagatgcagagattcatgccccccggcgacaacgtgcacaccgtgatcctggacttcacccaggtgaacttcatcgacagcgtgggcgtgaagaccctggccggcatcgtgaaggagtacggcgacgtgggcatctacgtgtacctggccggctgcagcgcccaggtggtgaacgacctgaccagaaacagattcttcgagaaccccgccctgtgggagctgctgttccacagcatccacgacgccgtgctgggcagccagctgagagaggccctggccgagcaggaggccagcgccccccccagccaggaggacctggagcccaacgccacccccgccacccccgaggcctag

SEQ ID NO: 99758 - DNA, 2241 bp, synthetic construct
  misc_feature 1..2241: note = Description of Artificial Sequence: Synthetic coding sequence
  source 1..2241: mol_type = other DNA
atggaccacgccgaggagaacgagatcctggccgccacccagagatactacgtggagagacccatcttcagccaccccgtgctgcaggagagactgcacaccaaggacaaggtgcccgacagcatcgccgacaagctgaagcaggccttcacctgcacccccaagaagatcagaaacatcatctacatgttcctgcccatcaccaagtggctgcccgcctacaagttcaaggagtacgtgctgggcgacctggtgagcggcatcagcaccggcgtgctgcagctgccccagggcctggccttcgccatgctggccgccgtgccccccatcttcggcctgtacagcagcttctaccccgtgatcatgtactgcttcctgggcaccagcagacacatcagcatcggccccttcgccgtgatcagcctgatgatcggcggcgtggccgtgagactggtgcccgacgacatcgtgatccccggcggcgtgaacgccaccaacggcaccgaggccagagacgccctgagagtgaaggtggccatgagcgtgaccctgctgagcggcatcatccagttctgcctgggcgtgtgcagattcggcttcgtggccatctacctgaccgagcccctggtgagaggcttcaccaccgccgccgccgtgcacgtgttcaccagcatgctgaagtacctgttcggcgtgaagaccaagagatacagcggcatcttcagcgtggtgtacagcaccgtggccgtgctgcagaacgtgaagaacctgaacgtgtgcagcctgggcgtgggcctgatggtgttcggcctgctgctgggcggcaaggagttcaacgagagattcaaggagaagctgcccgcccccatccccctggagttcttcgccgtggtgatgggcaccggcatcagcgccggcttcaacctgaaggagagctacaacgtggacgtggtgggcaccctgcccctgggcctgctgccccccgccaaccccgacaccagcctgttccacctggtgtacgtggacgccatcgccatcgccatcgtgggcttcagcgtgaccatcagcatggccaagaccctggccaacaagcacggctaccaggtggacggcaaccaggagctgatcgccctgggcctgtgcaacagcatcggcagcctgttccagaccttcagcatcagctgcagcctgagcagaagcctggtgcaggagggcaccggcggcaagacccagctggccggctgcctggccagcctgatgatcctgctggtgatcctggccaccggcttcctgttcgagagcctgccccaggccgtgctgagcgccatcgtgatcgtgaacctgaagggcatgttcatgcagttcagcgacctgcccttcttctggagaaccagcaagatcgagctgaccatctggctgaccaccttcgtgagcagcctgttcctgggcctggactacggcctgatcaccgccgtgatcatcgccctgctgaccgtgatctacagaacccagagccccagctacaaggtgctgggcaagctgcccgagaccgacgtgtacatcgacatcgacgcctacgaggaggtgaaggagatccccggcatcaagatcttccagatcaacgcccccatctactacgccaacagcgacctgtacagcaacgccctgaagagaaagaccggcgtgaaccccgccgtgatcatgggcgccagaagaaaggccatgagaaagtacgccaaggaggtgggcaacgccaacatggccaacgccaccgtggtgaaggccacccaggacgccgaggtggacggcgaggacgccaccaagcccgaggaggaggacggcgaggtgaagtacccccccatcgtgatcaagagcaccttccccgaggagatgcagagattcatgccccccggcgacaacgtgcacaccgtgatcctggacttcacccaggtgaacttcatcgacagcgtgggcgtgaagaccctggccggcatcgtgaaggagtacggcgacgtgggcatctacgtgtacctggccggctgcagcgcccaggtggtgaacgacctgaccagaaacagattcttcgagaaccccgccctgtgggagctgctgttccacagcatccacgacgccgtgctgggcagccagctgagagaggccctggccgagcaggaggccagcgccccccccagccaggaggacctggagcccaacgccacccccgccacccccgaggcctag

SEQ ID NO: 99759 - DNA, 2124 bp, synthetic construct
  misc_feature 1..2124: note = Description of Artificial Sequence: Synthetic coding sequence
  source 1..2124: mol_type = other DNA
atggaccacgccgaggagaacgagatcctggccgccacccagagatactacgtggagagacccatcttcagccaccccgtgctgcaggagagactgcacaccaaggacaaggtgcccgacagcatcgccgacaagctgaagcaggccttcacctgcacccccaagaagatcagaaacatcatctacatgttcctgcccatcaccaagtggctgcccgcctacaagttcaaggagtacgtgctgggcgacctggtgagcggcatcagcaccggcgtgctgcagctgccccagggccccttcgccgtgatcagcctgatgatcggcggcgtggccgtgagactggtgcccgacgacatcgtgatccccggcggcgtgaacgccaccaacggcaccgaggccagagacgccctgagagtgaaggtggccatgagcgtgaccctgctgagcggcatcatccagttctgcctgggcgtgtgcagattcggcttcgtggccatctacctgaccgagcccctggtgagaggcttcaccaccgccgccgccgtgcacgtgttcaccagcatgctgaagtacctgttcggcgtgaagaccaagagatacagcggcatcttcagcgtggtgtacagcaccgtggccgtgctgcagaacgtgaagaacctgaacgtgtgcagcctgggcgtgggcctgatggtgttcggcctgctgctgggcggcaaggagttcaacgagagattcaaggagaagctgcccgcccccatccccctggagttcttcgccgtggtgatgggcaccggcatcagcgccggcttcaacctgaaggagagctacaacgtggacgtggtgggcaccctgcccctgggcctgctgccccccgccaaccccgacaccagcctgttccacctggtgtacgtggacgccatcgccatcgccatcgtgggcttcagcgtgaccatcagcatggccaagaccctggccaacaagcacggctaccaggtggacggcaaccaggagctgatcgccctgggcctgtgcaacagcatcggcagcctgttccagaccttcagcatcagctgcagcctgagcagaagcctggtgcaggagggcaccggcggcaagacccagctggccggctgcctggccagcctgatgatcctgctggtgatcctggccaccggcttcctgttcgagagcctgccccaggccgtgctgagcgccatcgtgatcgtgaacctgaagggcatgttcatgcagttcagcgacctgcccttcttctggagaaccagcaagatcgagctgaccatctggctgaccaccttcgtgagcagcctgttcctgggcctggactacggcctgatcaccgccgtgatcatcgccctgctgaccgtgatctacagaacccagagccccagctacaaggtgctgggcaagctgcccgagaccgacgtgtacatcgacatcgacgcctacgaggaggtgaaggagatccccggcatcaagatcttccagatcaacgcccccatctactacgccaacagcgacctgtacagcaacgccctgaagagaaagaccggcgtgaaccccgccgtgatcatgggcgccagaagaaaggccatgagaaagtacgccaaggaggtgggcaacgccaacatggccaacgccaccgtggtgaaggccgacgccgaggtggacggcgaggacgccaccaagcccgaggaggaggacggcgaggtgaagtacccccccatcgtgatcaagagcaccttccccgaggagatgcagagattcatgccccccggcgacaacgtgcacaccgtgatcctggacttcacccaggtgaacttcatcgacagcgtgggcgtgaagaccctggccggcatcgtgaaggagtacggcgacgtgggcatctacgtgtacctggccggctgcagcgcccaggtggtgaacgacctgaccagaaacagattcttcgagaaccccgccctgtgggagctgctgttccacagcatccacgacgccgtgctgggcagccagctgagagaggccctggccgagcaggaggccagcgccccccccagccaggaggacctggagcccaacgccacccccgccacccccgaggcctag

SEQ ID NO: 99760 - DNA, 2139 bp, synthetic construct
  misc_feature 1..2139: note = Description of Artificial Sequence: Synthetic coding sequence
  source 1..2139: mol_type = other DNA
atggaccacgccgaggagaacgagatcctggccgccacccagagatactacgtggagagacccatcttcagccaccccgtgctgcaggagagactgcacaccaaggacaaggtgcccgacagcatcgccgacaagctgaagcaggccttcacctgcacccccaagaagatcagaaacatcatctacatgttcctgcccatcaccaagtggctgcccgcctacaagttcaaggagtacgtgctgggcgacctggtgagcggcatcagcaccggcgtgctgcagctgccccagggcctggccttcgccatgctggccgccgtgccccccatcttcggcctgtacagcagcttctaccccgtgatcatgtactgcttcctgggcaccagcagacacatcagcatcggccccttcgccgtgatcagcctgatgatcggcggcgtggccgtgagactggtgcccgacgacatcgtgatccccggcggcgtgaacgccaccaacggcaccgaggccagagacgccctgagagtgaaggtggccatgagcgtgaccctgctgagcggcatcatccagttctgcctgggcgtgtgcagattcggcttcgtggccatctacctgaccgagcccctggtgagaggcttcaccaccgccgccgccgtgcacgtgttcaccagcatgctgaagtacctgttcggcgtgaagaccaagagatacagcggcatcttcagcgtggtgtacagcaccgtggccgtgctgcagaacgtgaagaacctgaacgtgtgcagcctgggcgtgggcctgatggtgttcggcctgctgctgggcggcaaggagttcaacgagagattcaaggagaagctgcccgcccccatccccctggagttcttcgccgtggtgatgggcaccggcatcagcgccggcttcaacctgaaggagagctacaacgtggacgtggtgggcaccctgcccctgggcctgctgccccccgccaaccccgacaccagcctgttccacctggtgtacgtggacgccatcgccatcgccatcgtgggcttcagcgtgaccatcagcatggccaagaccctggccaacaagcacggctaccaggtggacggcaaccaggagctgatcgccctgggcctgtgcaacagcatcggcagcctgttccagaccttcagcatcagctgcagcctgagcagaagcctggtgcaggagggcaccggcggcaagacccagctggccggctgcctggccagcctgatgatcctgctggtgatcctggccaccggcttcctgttcgagagcctgccccagaccatctggctgaccaccttcgtgagcagcctgttcctgggcctggactacggcctgatcaccgccgtgatcatcgccctgctgaccgtgatctacagaacccagagccccagctacaaggtgctgggcaagctgcccgagaccgacgtgtacatcgacatcgacgcctacgaggaggtgaaggagatccccggcatcaagatcttccagatcaacgcccccatctactacgccaacagcgacctgtacagcaacgccctgaagagaaagaccggcgtgaaccccgccgtgatcatgggcgccagaagaaaggccatgagaaagtacgccaaggaggtgggcaacgccaacatggccaacgccaccgtggtgaaggccgacgccgaggtggacggcgaggacgccaccaagcccgaggaggaggacggcgaggtgaagtacccccccatcgtgatcaagagcaccttccccgaggagatgcagagattcatgccccccggcgacaacgtgcacaccgtgatcctggacttcacccaggtgaacttcatcgacagcgtgggcgtgaagaccctggccggcatcgtgaaggagtacggcgacgtgggcatctacgtgtacctggccggctgcagcgcccaggtggtgaacgacctgaccagaaacagattcttcgagaaccccgccctgtgggagctgctgttccacagcatccacgacgccgtgctgggcagccagctgagagaggccctggccgagcaggaggccagcgccccccccagccaggaggacctggagcccaacgccacccccgccacccccgaggcctag

SEQ ID NO: 99761 - DNA, 1551 bp, synthetic construct
  misc_feature 1..1551: note = Description of Artificial Sequence: Synthetic coding sequence
  source 1..1551: mol_type = other DNA
atggaccacgccgaggagaacgagatcctggccgccacccagagatactacgtggagagacccatcttcagccaccccgtgctgcaggagagactgcacaccaaggacaaggtgcccgacagcatcgccgacaagctgaagcaggccttcacctgcacccccaagaagatcagaaacatcatctacatgttcctgcccatcaccaagtggctgcccgcctacaagttcaaggagtacgtgctgggcgacctggtgagcggcatcagcaccggcgtgctgcagctgccccagggcctggccttcgccatgctggccgccgtgccccccatcttcggcctgtacagcagcttctaccccgtgatcatgtactgcttcctgggcaccagcagacacatcagcatcggccccttcgccgtgatcagcctgatgatcggcggcgtggccgtgagactggtgcccgacgacatcgtgatccccggcggcgtgaacgccaccaacggcaccgaggccagagacgccctgagagtgaaggtggccatgagcgtgaccctgctgagcggcatcatccagttctgcctgggcgtgtgcagattcggcttcgtggccatctacctgaccgagcccctggtgagaggcttcaccaccgccgccgccgtgcacgtgttcaccagcatgctgaagtacctgttcggcgtgaagaccaagagatacagcggcatcttcagcgtggtgtacagcaccgtggccgtgctgcagaacgtgaagaacctgaacgtgtgcagcctgggcgtgggcctgatggtgttcggcctgctgctgggcggcaaggagttcaacgagagattcaaggagaagctgcccgcccccatccccctggagttcttcgccgtggtgatgggcaccggcatcagcgccggcttcaacctgaaggagagctacaacgtggacgtggtgggcaccctgcccctgggcctgctgccccccgccaaccccgacaccagcctgttccacctggtgtacgtggacgccatcgccatcgccatcgtgggcttcagcgtgaccatcagcatggccaagaccctggccaacaagcacggctaccaggtggacggcaaccaggagctgatcgccctgggcctgtgcaacagcatcggcagcctgttccagaccttcagcatcagctgcagcctgagcagaagcctggtgcaggagggcaccggcggcaagacccagctggccggctgcctggccagcctgatgatcctgctggtgatcctggccaccggcttcctgttcgagagcctgccccaggccgtgctgagcgccatcgtgatcgtgaacctgaagggcatgttcatgcagttcagcgacctgcccttcttctggagaaccagcaagatcgagctgaccatctggctgaccaccttcgtgagcagcctgttcctgggcctggactacggcctgatcaccgccgtgatcatcgccctgctgaccgtgatctacagaacccagagcttccacaccgagatgaccagaagatggagaccctag

SEQ ID NO: 99762 - DNA, 1422 bp, synthetic construct
  misc_feature 1..1422: note = Description of Artificial Sequence: Synthetic coding sequence
  source 1..1422: mol_type = other DNA
atggaccacgccgaggagaacgagatcctggccgccacccagagatactacgtggagagacccatcttcagccaccccgtgctgcaggagagactgcacaccaaggacaaggtgcccgacagcatcgccgacaagctgaagcaggccttcacctgcacccccaagaagatcagaaacatcatctacatgttcctgcccatcaccaagtggctgcccgcctacaagttcaaggagtacgtgctgggcgacctggtgagcggcatcagcaccggcgtgctgcagctgccccagggcctggccttcgccatgctggccgccgtgccccccatcttcggcctgtacagcagcttctaccccgtgatcatgtactgcttcctgggcaccagcagacacatcagcatcggccccttcgccgtgatcagcctgatgatcggcggcgtggccgtgagactggtgcccgacgacatcgtgatccccggcggcgtgaacgccaccaacggcaccgaggccagagacgccctgagagtgaaggtggccatgagcgtgaccctgctgagcggcatcatccagttctgcctgggcgtgtgcagattcggcttcgtggccatctacctgaccgagcccctggtgagaggcttcaccaccgccgccgccgtgcacgtgttcaccagcatgctgaagtacctgttcggcgtgaagaccaagagatacagcggcatcttcagcgtggtgtacagcaccgtggccgtgctgcagaacgtgaagaacctgaacgtgtgcagcctgggcgtgggcctgatggtgttcggcctgctgctgggcggcaaggagttcaacgagagattcaaggagaagctgcccgcccccatccccctggagttcttcgccgtggtgatgggcaccggcatcagcgccggcttcaacctgaaggagagctacaacgtggacgtggtgggcaccctgcccctgggcctgctgccccccgccaaccccgacaccagcctgttccacctggtgtacgtggacgccatcgccatcgccatcgtgggcttcagcgtgaccatcagcatggccaagaccctggccaacaagcacggctaccaggtggacggcaaccaggagctgatcgccctgggcctgtgcaacagcatcggcagcctgttccagaccttcagcatcagctgcagcctgagcagaagcctggtgcaggagggcaccggcggcaagacccagctggccggctgcctggccagcctgatgatcctgctggtgatcctggccaccggcttcctgttcgagagcctgccccagaccatctggctgaccaccttcgtgagcagcctgttcctgggcctggactacggcctgatcaccgccgtgatcatcgccctgctgaccgtgatctacagaacccagagatag

SEQ ID NO: 99763 - DNA, 2139 bp, synthetic construct; identical to SEQ ID NO: 99760
  misc_feature 1..2139: note = Description of Artificial Sequence: Synthetic coding sequence
  source 1..2139: mol_type = other DNA

SEQ ID NO: 99764 - DNA, 1344 bp, synthetic construct
  misc_feature 1..1344: note = Description of Artificial Sequence: Synthetic coding sequence
  source 1..1344: mol_type = other DNA
atggaccacgccgaggagaacgagatcctggccgccacccagagatactacgtggagagacccatcttcagccaccccgtgctgcaggagagactgcacaccaaggacaaggtgcccgacagcatcgccgacaagctgaagcaggccttcacctgcacccccaagaagatcagaaacatcatctacatgttcctgcccatcaccaagtggctgcccgcctacaagttcaaggagtacgtgctgggcgacctggtgagcggcatcagcaccggcgtgctgcagctgccccagggcctggccttcgccatgctggccgccgtgccccccatcttcggcctgtacagcagcttctaccccgtgatcatgtactgcttcctgggcaccagcagacacatcagcatcggccccttcgccgtgatcagcctgatgatcggcggcgtggccgtgagactggtgcccgacgacatcgtgatccccggcggcgtgaacgccaccaacggcaccgaggccagagacgccctgagagtgaaggtggccatgagcgtgaccctgctgagcggcatcatccagttctgcctgggcgtgtgcagattcggcttcgtggccatctacctgaccgagcccctggtgagaggcttcaccaccgccgccgccgtgcacgtgttcaccagcatgctgaagtacctgttcggcgtgaagaccaagagatacagcggcatcttcagcgtggtgtacagcaccgtggccgtgctgcagaacgtgaagaacctgaacgtgtgcagcctgggcgtgggcctgatggtgttcggcctgctgctgggcggcaaggagttcaacgagagattcaaggagaagctgcccgcccccatccccctggagttcttcgccgtggtgatgggcaccggcatcagcgccggcttcaacctgaaggagagctacaacgtggacgtggtgggcaccctgcccctgggcctgctgccccccgccaaccccgacaccagcctgttccacctggtgtacgtggacgccatcgccatcgccatcgtgggcttcagcgtgaccatcagcatggccaagaccctggccaacaagcacggctaccaggtggacggcaaccaggagctgatcgccctgggcctgtgcaacagcatcggcagcctgttccagaccttcagcatcagctgcagcctgagcagaagcctggtgcaggagggcaccggcggcaagacccagaccatctggctgaccaccttcgtgagcagcctgttcctgggcctggactacggcctgatcaccgccgtgatcatcgccctgctgaccgtgatctacagaacccagagatag

SEQ ID NO: 99765 - DNA, 1956 bp, synthetic construct
  misc_feature 1..1956: note = Description of Artificial Sequence: Synthetic coding sequence
  source 1..1956: mol_type = other DNA
atgggcctggccgacgccagcggccccagagacacccaggccctgctgagcgccacccaggccatggacctgagaagaagagactaccacatggagagacccctgctgaaccaggagcacctggaggagctgggcagatggggcagcgcccccagaacccaccagtggagaacctggctgcagtgcagcagagccagagcctacgccctgctgctgcagcacctgcccgtgctggtgtggctgcccagataccccgtgagagactggctgctgggcgacctgctgagcggcctgagcgtggccatcatgcagctgccccagggcctggcctacgccctgctggccggcctgccccccgtgttcggcctgtacagcagcttctaccccgtgttcatctacttcctgttcggcaccagcagacacatcagcgtggtgctggaggtgtgctggaagctgccccagagcaaggtgggcaccgtggtgaccgccgccgtggccggcgtggtgctggtggtggtgaagctgctgaacgacaagctgcagcagcagctgcccatgcccatccccggcgagctgctgaccctgatcggcgccaccggcatcagctacggcatgggcctgaagcacagattcgaggtggacgtggtgggcaacatccccgccggcctggtgccccccgtggcccccaacacccagctgttcagcaagctggtgggcagcgccttcaccatcgccgtggtgggcttcgccatcgccatcagcctgggcaagatcttcgccctgagacacggctacagagtggacagcaaccaggagctggtggccctgggcctgagcaacctgatcggcggcatcttccagtgcttccccgtgagctgcagcatgagcagaagcctggtgcaggagagcaccggcggcaacagccaggtggccggcgccatcagcagcctgttcatcctgctgatcatcgtgaagctgggcgagctgttccacgacctgcccaaggccgtgctggccgccatcatcatcgtgaacctgaagggcatgctgagacagctgagcgacatgagaagcctgtggaaggccaacagagccgacctgctgatctggctggtgaccttcaccgccaccatcctgctgaacctggacctgggcctggtggtggccgtgatcttcagcctgctgctggtggtggtgagaacccagatgccccactacagcgtgctgggccaggtgcccgacaccgacatctacagagacgtggccgagtacagcgaggccaaggaggtgagaggcgtgaaggtgttcagaagcagcgccaccgtgtacttcgccaacgccgagttctacagcgacgccctgaagcagagatgcggcgtggacgtggacttcctgatcagccagaagaagaagctgctgaagaagcaggagcagctgaagctgaagcagctgcagaaggaggagaagctgagaaagcaggccgccagccccaagggcgccagcgtgagcatcaacgtgaacaccagcctggaggacatgagaagcaacaacgtggaggactgcaagatgatggtgagcagcggcgacaagatggaggacgccaccgccaacggccaggaggacagcaaggcccccgacggcagcaccctgaaggccctgggcctgccccagcccgacttccacagcctgatcctggacctgggcgccctgagcttcgtggacaccgtgtgcctgaagagcctgaagaacatcttccacgacttcagagagatcgaggtggaggtgtacatggccgcctgccacagccccgtggtgagccagctggaggccggccacttcttcgacgccagcatcaccaagaagcacctgttcgccagcgtgcacgacgccgtgaccttcgccctgcagcaccccagacccgtgcccgacagccccgtgagcgtgaccagactgtag

SEQ ID NO: 99766 - DNA, 2217 bp, synthetic construct
  misc_feature 1..2217: note = Description of Artificial Sequence: Synthetic coding sequence
  source 1..2217: mol_type = other DNA
atggacctgagaagaagagactaccacatggagagacccctgctgaaccaggagcacctggaggagctgggcagatggggcagcgcccccagaacccaccagtggagaacctggctgcagtgcagcagagccagagcctacgccctgctgctgcagcacctgcccgtgctggtgtggctgcccagataccccgtgagagactggctgctgggcgacctgctgagcggcctgagcgtggccatcatgcagctgccccagggcctggcctacgccctgctggccggcctgccccccgtgttcggcctgtacagcagcttctaccccgtgttcatctacttcctgttcggcaccagcagacacatcagcgtgggcaccttcgccgtgatgagcgtgatggtgggcagcgtgaccgagagcctggccccccaggccctgaacgacagcatgatcaacgagaccgccagagacgccgccagagtgcaggtggccagcaccctgagcgtgctggtgggcctgttccaggtgggcctgggcctgatccacttcggcttcgtggtgacctacctgagcgagcccctggtgagaggctacaccaccgccgccgccgtgcaggtgttcgtgagccagctgaagtacgtgttcggcctgcacctgagcagccacagcggccccctgagcctgatctacaccgtgctggaggtgtgctggaagctgccccagagcaaggtgggcaccgtggtgaccgccgccgtggccggcgtggtgctggtggtggtgaagctgctgaacgacaagctgcagcagcagctgcccatgcccatccccggcgagctgctgaccctgatcggcgccaccggcatcagctacggcatgggcctgaagcacagattcgaggtggacgtggtgggcaacatccccgccggcctggtgccccccgtggcccccaacacccagctgttcagcaagctggtgggcagcgccttcaccatcgccgtggtgggcttcgccatcgccatcagcctgggcaagatcttcgccctgagacacggctacagagtggacagcaaccaggagctggtggccctgggcctgagcaacctgatcggcggcatcttccagtgcttccccgtgagctgcagcatgagcagaagcctggtgcaggagagcaccggcggcaacagccaggtggccggcgccatcagcagcctgttcatcctgctgatcatcgtgaagctgggcgagctgttccacgacctgcccaaggccgtgctggccgccatcatcatcgtgaacctgaagggcatgctgagacagctgagcgacatgagaagcctgtggaaggccaacagagccgacctgctgatctggctggtgaccttcaccgccaccatcctgctgaacctggacctgggcctggtggtggccgtgatcttcagcctgctgctggtggtggtgagaacccagatgccccactacagcgtgctgggccaggtgcccgacaccgacatctacagagacgtggccgagtacagcgaggccaaggaggtgagaggcgtgaaggtgttcagaagcagcgccaccgtgtacttcgccaacgccgagttctacagcgacgccctgaagcagagatgcggcgtggacgtggacttcctgatcagccagaagaagaagctgctgaagaagcaggagcagctgaagctgaagcagctgcagaaggaggagaagctgagaaagcaggccgccagccccaagggcgccagcgtgagcatcaacgtgaacaccagcctggaggacatgagaagcaacaacgtggaggactgcaagatgatgcaggtgagcagcggcgacaagatggaggacgccaccgccaacggccaggaggacagcaaggcccccgacggcagcaccctgaaggccctgggcctgccccagcccgacttccacagcctgatcctggacctgggcgccctgagcttcgtggacaccgtgtgcctgaagagcctgaagaacatcttccacgacttcagagagatcgaggtggaggtgtacatggccgcctgccacagccccgtggtgagccagctggaggccggccacttcttcgacgccagcatcaccaagaagcacctgttcgccagcgtgcacgacgccgtgaccttcgccctgcagcaccccagacccgtgcccgacagccccgtgagcgtgaccagactgtag

SEQ ID NO: 99767 - DNA, 2223 bp, synthetic construct
  misc_feature 1..2223: note = Description of Artificial Sequence: Synthetic coding sequence
  source 1..2223: mol_type = other DNA
atgggcctggccgacgccagcggccccagagacacccaggccctgctgagcgccacccaggccatggacctgagaagaagagactaccacatggagagacccctgctgaaccaggagcacctggaggagctgggcagatggggcagcgcccccagaacccaccagtggagaacctggctgcagtgcagcagagccagagcctacgccctgctgctgcagcacctgcccgtgctggtgtggctgcccagataccccgtgagagactggctgctgggcgacctgctgagcggcctgagcgtggccatcatgcagctgccccagggcctggcctacgccctgctggccggcctgccccccgtgttcggcctgtacagcagcttctaccccgtgttcatctacttcctgttcggcaccagcagacacatcagcgtgggcaccttcgccgtgatgagcgtgatggtgggcagcgtgaccgagagcctggccccccaggccctgaacgacagcatgatcaacgagaccgccagagacgccgccagagtgcaggtggccagcaccctgagcgtgctggtgggcctgttccaggtgggcctgggcctgatccacttcggcttcgtggtgacctacctgagcgagcccctggtgagaggctacaccaccgccgccgccgtgcaggtgttcgtgagccagctgaagtacgtgttcggcctgcacctgagcagccacagcggccccctgagcctgatctacaccgtgctggaggtgtgctggaagctgccccagagcaaggtgggcaccgtggtgaccgccgccgtggccggcgtggtgctggtggtggtgaagctgctgaacgacaagctgcagcagcagctgcccatgcccatccccggcgagctgctgaccctgatcggcgccaccggcatcagctacggcatgggcctgaagcacagattcgaggtggacgtggtgggcaacatccccgccggcctggtgccccccgtggcccccaacacccagctgttcagcaagctggtgggcagcgccttcaccatcgccgtggtgggcttcgccatcgccatcagcctgggcaagatcttcgccctgagacacggctacagagtggacagcaaccaggagctggtggccctgggcctgagcaacctgatcggcggcatcttccagtgcttccccgtgagctgcagcatgagcagaagcctggtgcaggagagcaccggcggcaacagccaggtggccggcgccatcagcagcctgttcatcctgctgatcatcgtgaagctgggcgagctgttccacgacctgcccaaggccgtgctggccgccatcatcatcgtgaacctgaagggcatgctgagacagctgagcgacatgagaagcctgtggaaggccaacagagccgacctgctgatctggctggtgaccttcaccgccaccatcctgctgaacctggacctgggcctggtggtggccgtgatcttcagcctgctgctggtggtggtgagaacccagatgccccactacagcgtgctgggccaggtgcccgacaccgacatctacagagacgtggccgagtacagcgaggccaaggaggtgagaggcgtgaaggtgttcagaagcagcgccaccgtgtacttcgccaacgccgagttctacagcgacgccctgaagcagagatgcggcgtggacgtggacttcctgatcagccagaagaagaagctgctgaagaagcaggagcagctgaagctgaagcagctgcagaaggaggagaagctgagaaagcaggccggccccctgctgagcgcctgcctggccccccagcaggtgagcagcggcgacaagatggaggacgccaccgccaacggccaggaggacagcaaggcccccgacggcagcaccctgaaggccctgggcctgccccagcccgacttccacagcctgatcctggacctgggcgccctgagcttcgtggacaccgtgtgcctgaagagcctgaagaacatcttccacgacttcagagagatcgaggtggaggtgtacatggccgcctgccacagccccgtggtgagccagctggaggccggccacttcttcgacgccagcatcaccaagaagcacctgttcgccagcgtgcacgacgccgtgaccttcgccctgcagcaccccagacccgtgcccgacagccccgtgagcgtgaccagactgtag

SEQ ID NO: 99768 - DNA, 2280 bp, synthetic construct
  misc_feature 1..2280: note = Description of Artificial Sequence: Synthetic coding sequence
  source 1..2280: mol_type = other DNA
atgggcctggccgacgccagcggccccagagacacccaggccctgctgagcgccacccaggccatggacctgagaagaagagactaccacatggagagacccctgctgaaccaggagcacctggaggagctgggcagatggggcagcgcccccagaacccaccagtggagaacctggctgcagtgcagcagagccagagcctacgccctgctgctgcagcacctgcccgtgctggtgtggctgcccagataccccgtgagagactggctgctgggcgacctgctgagcggcctgagcgtggccatcatgcagctgccccagggcctggcctacgccctgctggccggcctgccccccgtgttcggcctgtacagcagcttctaccccgtgttcatctacttcctgttcggcaccagcagacacatcagcgtgggcaccttcgccgtgatgagcgtgatggtgggcagcgtgaccgagagcctggccccccaggccctgaacgacagcatgatcaacgagaccgccagagacgccgccagagtgcaggtggccagcaccctgagcgtgctggtgggcctgttccaggtgggcctgggcctgatccacttcggcttcgtggtgacctacctgagcgagcccctggtgagaggctacaccaccgccgccgccgtgcaggtgttcgtgagccagctgaagtacgtgttcggcctgcacctgagcagccacagcggccccctgagcctgatctacaccgtgctggaggtgtgctggaagctgccccagagcaaggtgggcaccgtggtgaccgccgccgtggccggcgtggtgctggtggtggtgaagctgctgaacgacaagctgcagcagcagctgcccatgcccatccccggcgagctgctgaccctgatcggcgccaccggcatcagctacggcatgggcctgaagcacagattcgaggtggacgtggtgggcaacatccccgccggcctggtgccccccgtggcccccaacacccagctgttcagcaagctggtgggcagcgccttcaccatcgccgtggtgggcttcgccatcgccatcagcctgggcaagatcttcgccctgagacacggctacagagtggacagcaaccaggagctggtggccctgggcctgagcaacctgatcggcggcatcttccagtgcttccccgtgagctgcagcatgagcagaagcctggtgcaggagagcaccggcggcaacagccaggtggccggcgccatcagcagcctgttcatcctgctgatcatcgtgaagctgggcgagctgttccacgacctgcccaaggccgtgctggccgccatcatcatcgtgaacctgaagggcatgctgagacagctgagcgacatgagaagcctgtggaaggccaacagagccgacctgctgatctggctggtgaccttcaccgccaccatcctgctgaacctggacctgggcctggtggtggccgtgatcttcagcctgctgctggtggtggtgagaacccagatgccccactacagcgtgctgggccaggtgcccgacaccgacatctacagagacgtggccgagtacagcgaggccaaggaggtgagaggcgtgaaggtgttcagaagcagcgccaccgtgtacttcgccaacgccgagttctacagcgacgccctgaagcagagatgcggcgtggacgtggacttcctgatcagccagaagaagaagctgctgaagaagcaggagcagctgaagctgaagcagctgcagaaggaggagaagctgagaaagcaggccgccagccccaagggcgccagcgtgagcatcaacgtgaacaccagcctggaggacatgagaagcaacaacgtggaggactgcaagatgatgcaggtgagcagcggcgacaagatggaggacgccaccgccaacggccaggaggacagcaaggcccccgacggcagcaccctgaaggccctgggcctgccccagcccgacttccacagcctgatcctggacctgggcgccctgagcttcgtggacaccgtgtgcctgaagagcctgaagaacatcttccacgacttcagagagatcgaggtggaggtgtacatggccgcctgccacagccccgtggtgagccagctggaggccggccacttcttcgacgccagcatcaccaagaagcacctgttcgccagcgtgcacgacgccgtgaccttcgccctgcagcaccccagacccgtgcccgacagccccgtgagcgtgaccagactgtag

SEQ ID NO: 99769 - DNA, 2277 bp, synthetic construct
  misc_feature 1..2277: note = Description of Artificial Sequence: Synthetic coding sequence
  source 1..2277: mol_type = other DNA
atgggcctggccgacgccagcggccccagagacacccaggccctgctgagcgccacccaggccatggacctgagaagaagagactaccacatggagagacccctgctgaaccaggagcacctggaggagctgggcagatggggcagcgcccccagaacccaccagtggagaacctggctgcagtgcagcagagccagagcctacgccctgctgctgcagcacctgcccgtgctggtgtggctgcccagataccccgtgagagactggctgctgggcgacctgctgagcggcctgagcgtggccatcatgcagctgccccagggcctggcctacgccctgctggccggcctgccccccgtgttcggcctgtacagcagcttctaccccgtgttcatctacttcctgttcggcaccagcagacacatcagcgtgggcaccttcgccgtgatgagcgtgatggtgggcagcgtgaccgagagcctggccccccaggccctgaacgacagcatgatcaacgagaccgccagagacgccgccagagtgcaggtggccagcaccctgagcgtgctggtgggcctgttccaggtgggcctgggcctgatccacttcggcttcgtggtgacctacctgagcgagcccctggtgagaggctacaccaccgccgccgccgtgcaggtgttcgtgagccagctgaagtacgtgttcggcctgcacctgagcagccacagcggccccctgagcctgatctacaccgtgctggaggtgtgctggaagctgccccagagcaaggtgggcaccgtggtgaccgccgccgtggccggcgtggtgctggtggtggtgaagctgctgaacgacaagctgcagcagcagctgcccatgcccatccccggcgagctgctgaccctgatcggcgccaccggcatcagctacggcatgggcctgaagcacagattcgaggtggacgtggtgggcaacatccccgccggcctggtgccccccgtggcccccaacacccagctgttcagcaagctggtgggcagcgccttcaccatcgccgtggtgggcttcgccatcgccatcagcctgggcaagatcttcgccctgagacacggctacagagtggacagcaaccaggagctggtggccctgggcctgagcaacctgatcggcggcatcttccagtgcttccccgtgagctgcagcatgagcagaagcctggtgcaggagagcaccggcggcaacagccaggtggccggcgccatcagcagcctgttcatcctgctgatcatcgtgaagctgggcgagctgttccacgacctgcccaaggccgtgctggccgccatcatcatcgtgaacctgaagggcatgctgagacagctgagcgacatgagaagcctgtggaaggccaacagagccgacctgctgatctggctggtgaccttcaccgccaccatcctgctgaacctggacctgggcctggtggtggccgtgatcttcagcctgctgctggtggtggtgagaacccagatgccccactacagcgtgctgggccaggtgcccgacaccgacatctacagagacgtggccgagtacagcgaggccaaggaggtgagaggcgtgaaggtgttcagaagcagcgccaccgtgtacttcgccaacgccgagttctacagcgacgccctgaagcagagatgcggcgtggacgtggacttcctgatcagccagaagaagaagctgctgaagaagcaggagcagctgaagctgaagcagctgcagaaggaggagaagctgagaaagcaggccgccagccccaagggcgccagcgtgagcatcaacgtgaacaccagcctggaggacatgagaagcaacaacgtggaggactgcaagatgatggtgagcagcggcgacaagatggaggacgccaccgccaacggccaggaggacagcaaggcccccgacggcagcaccctgaaggccctgggcctgccccagcccgacttccacagcctgatcctggacctgggcgccctgagcttcgtggacaccgtgtgcctgaagagcctgaagaacatcttccacgacttcagagagatcgaggtggaggtgtacatggccgcctgccacagccccgtggtgagccagctggaggccggccacttcttcgacgccagcatcaccaagaagcacctgttcgccagcgtgcacgacgccgtgaccttcgccctgcagcaccccagacccgtgcccgacagccccgtgagcgtgaccagactgtag

SEQ ID NO: 99770 - DNA, 2262 bp, synthetic construct
  misc_feature 1..2262: note = Description of Artificial Sequence: Synthetic coding sequence
  source 1..2262: mol_type = other DNA
atgggcctggccgacgccagcggccccagagacacccaggccctgctgagcgccacccaggccatggacctgagaagaagagactaccacatggagagacccctgctgaaccaggagcacctggaggagctgggcagatggggcagcgcccccagaacccaccagtggagaacctggctgcagtgcagcagagccagagcctacgccctgctgctgcagcacctgcccgtgctggtgtggctgcccagataccccgtgagagactggctgctgggcgacctgctgagcggcctgagcgtggccatcatgcagctgccccaggacctgctgagcagactgcactgctaccacagcaccctgggcctggcctacgccctgctggccggcctgccccccgtgttcggcctgtacagcagcttctaccccgtgttcatctacttcctgttcggcaccagcagacacatcagcgtgggcaccttcgccgtgatgagcgtgatggtgggcagcgtgaccgagagcctggccccccaggccctgaacgacagcatgatcaacgagaccgccagagacgccgccagagtgcaggtggccagcaccctgagcgtgctggtgggcctgttccaggtgggcctgggcctgatccacttcggcttcgtggtgacctacctgagcgagcccctggtgagaggctacaccaccgccgccgccgtgcaggtgttcgtgagccagctgaagtacgtgttcggcctgcacctgagcagccacagcggccccctgagcctgatctacaccgtgctggaggtgtgctggaagctgccccagagcaaggtgggcaccgtggtgaccgccgccgtggccggcgtggtgctggtggtggtgaagctgctgaacgacaagctgcagcagcagctgcccatgcccatccccggcgagctgctgaccctgatcggcgccaccggcatcagctacggcatgggcctgaagcacagattcgaggtggacgtggtgggcaacatccccgccggcctggtgccccccgtggcccccaacacccagctgttcagcaagctggtgggcagcgccttcaccatcgccgtggtgggcttcgccatcgccatcagcctgggcaagatcttcgccctgagacacggctacagagtggacagcaaccaggagctggtggccctgggcctgagcaacctgatcggcggcatcttccagtgcttccccgtgagctgcagcatgagcagaagcctggtgcaggagagcaccggcggcaacagccaggtggccggcgccatcagcagcctgttcatcctgctgatcatcgtgaagctgggcgagctgttccacgacctgcccaaggccgtgctggccgccatcatcatcgtgaacctgaagggcatgctgagacagctgagcgacatgagaagcctgtggaaggccaacagagccgacctgctgatctggctggtgaccttcaccgccaccatcctgctgaacctggacctgggcctggtggtggccgtgatcttcagcctgctgctggtggtggtgagaacccagatgccccactacagcgtgctgggccaggtgcccgacaccgacatctacagagacgtggccgagtacagcgaggccaaggaggtgagaggcgtgaaggtgttcagaagcagcgccaccgtgtacttcgccaacgccgagttctacagcgacgccctgaagcagagatgcggcgtggacgtggacttcctgatcagccagaagaagaagctgctgaagaagcaggagcagctgaagctgaagcagctgcagaaggaggagaagctgagaaagcaggccggccccctgctgagcgcctgcctggccccccagcaggtgagcagcggcgacaagatggaggacgccaccgccaacggccaggaggacagcaaggcccccgacggcagcaccctgaaggccctgggcctgccccagcccgacttccacagcctgatcctggacctgggcgccctgagcttcgtggacaccgtgtgcctgaagagcctgaagaacatcttccacgacttcagagagatcgaggtggaggtgtacatggccgcctgccacagccccgtggtgagccagctggaggccggccacttcttcgacgccagcatcaccaagaagcacctgttcgccagcgtgcacgacgccgtgaccttcgccctgcagcaccccagacccgtgcccgacagccccgtgagcgtgaccagactgtag

SEQ ID NO: 99771 - DNA, 2172 bp, synthetic construct
  misc_feature 1..2172: note = Description of Artificial Sequence: Synthetic coding sequence
  source 1..2172: mol_type = other DNA
atgggcctggccgacgccagcggccccagagacacccaggccctgctgagcgccacccaggccatggacctgagaagaagagactaccacatggagagacccctgctgaaccaggagcacctggaggagctgggcagatggggcagcgcccccagaacccaccagtggagaacctggctgcagtgcagcagagccagagcctacgccctgctgctgcagcacctgcccgtgctggtgtggctgcccagataccccgtgagagactggctgctgggcgacctgctgagcggcctgagcgtggccatcatgcagctgccccagggcctggcctacgccctgctggccggcctgccccccgtgttcggcctgtacagcagcttctaccccgtgttcatctacttcctgttcggcaccagcagacacatcagcgtggccacccccggccccctgcccctgctgaccgcccccggcagacccaccggcggcgccggccccgaccccctgagactgagaggccacctgcccgtgagaaccagctgccccagactgtaccacagctgcagctgcgccggcctgagactgaccgcccaggtgtgcgtgtggccccccagcgagcagcccctgtgggccaccgtgccccacctgctgctggaggtgtgctggaagctgccccagagcaaggtgggcaccgtggtgaccgccgccgtggccggcgtggtgctggtggtggtgaagctgctgaacgacaagctgcagcagcagctgcccatgcccatccccggcgagctgctgaccctgatcggcgccaccggcatcagctacggcatgggcctgaagcacagattcgaggtggacgtggtgggcaacatccccgccggcctggtgccccccgtggcccccaacacccagctgttcagcaagctggtgggcagcgccttcaccatcgccgtggtgggcttcgccatcgccatcagcctgggcaagatcttcgccctgagacacggctacagagtggacagcaaccaggagctggtggccctgggcctgagcaacctgatcggcggcatcttccagtgcttccccgtgagctgcagcatgagcagaagcctggtgcaggagagcaccggcggcaacagccaggtggccggcgccatcagcagcctgttcatcctgctgatcatcgtgaagctgggcgagctgttccacgacctgcccaaggccgtgctggccgccatcatcatcgtgaacctgaagggcatgctgagacagctgagcgacatgagaagcctgtggaaggccaacagagccgacctgctgatctggctggtgaccttcaccgccaccatcctgctgaacctggacctgggcctggtggtggccgtgatcttcagcctgctgctggtggtggtgagaacccagatgccccactacagcgtgctgggccaggtgcccgacaccgacatctacagagacgtggccgagtacagcgaggccaaggaggtgagaggcgtgaaggtgttcagaagcagcgccaccgtgtacttcgccaacgccgagttctacagcgacgccctgaagcagagatgcggcgtggacgtggacttcctgatcagccagaagaagaagctgctgaagaagcaggagcagctgaagctgaagcagctgcagaaggaggagaagctgagaaagcaggccgccagccccaagggcgccagcgtgagcatcaacgtgaacaccagcctggaggacatgagaagcaacaacgtggaggactgcaagatgatgcaggtgagcagcggcgacaagatggaggacgccaccgccaacggccaggaggacagcaaggcccccgacggcagcaccctgaaggccctgggcctgccccagcccgacttccacagcctgatcctggacctgggcgccctgagcttcgtggacaccgtgtgcctgaagagcctgaagaacatcttccacgacttcagagagatcgaggtggaggtgtacatggccgcctgccacagccccgtggtgagccagctggaggccggccacttcttcgacgccagcatcaccaagaagcacctgttcgccagcgtgcacgacgccgtgaccttcgccctgcagcaccccagacccgtgcccgacagccccgtgagcgtgaccagactgtag

SEQ ID NO: 99772 - DNA, 1941 bp, synthetic construct
  misc_feature 1..1941: note = Description of Artificial Sequence: Synthetic coding sequence
  source 1..1941: mol_type = other DNA
atgagagcccccggcgccggcgccgccagcgtggtgagcctggccctgctgtggctgctgggcctgccctggacctggagcgccgccgccgccctgggcgtgtacgtgggcagcggcggctggagattcctgagaatcgtgtgcaagaccgccagaagagacctgttcggcctgagcgtgctgatcagagtgagactggagctgagaagacaccagagagccggccacaccatccccagaatcttccaggccgtggtgcagagacagcccgagagactggccctggtggacgccggcaccggcgagtgctggaccttcgcccagctggacgcctacagcaacgccgtggccaacctgttcagacagctgggcttcgcccccggcgacgtggtggccatcttcctggagggcagacccgagttcgtgggcctgtggctgggcctggccaaggccggcatggaggccgccctgctgaacgtgaacctgagaagagagcccctggccttctgcctgggcaccagcggcgccaaggccctgatcttcggcggcgagatggtggccgccgtggccgaggtgagcggccacctgggcaagagcctgatcaagttctgcagcggcgacctgggccccgagggcatcctgcccgacacccacctgctggaccccctgctgaaggaggccagcaccgcccccctggcccagatccccagcaagggcatggacgacagactgttctacatctacaccagcggcaccaccggcctgcccaaggccgccatcgtggtgcacagcagatactacagaatggccgccttcggccaccacgcctacagaatgcaggccgccgacgtgctgtacgactgcctgcccctgtaccacagcgccggcaacatcatcggcgtgggccagtgcctgatctacggcctgaccgtggtgctgagaaagaagttcagcgccagcagattctgggacgactgcatcaagtacaactgcaccgtggtgcagtacatcggcgagatctgcagatacctgctgaagcagcccgtgagagaggccgagagaagacacagagtgagactggccgtgggcaacggcctgagacccgccatctgggaggagttcaccgagagattcggcgtgagacagatcggcgagttctacggcgccaccgagtgcaactgcagcatcgccaacatggacggcaaggtgggcagctgcggcttcaacagcagaatcctgccccacgtgtaccccatcagactggtgaaggtgaacgaggacaccatggagctgctgagagacgcccagggcctgtgcatcccctgccaggccggcgagcccggcctgctggtgggccagatcaaccagcaggaccccctgagaagattcgacggctacgtgagcgagagcgccaccagcaagaagatcgcccacagcgtgttcagcaagggcgacagcgcctacctgagcggcgacgtgctggtgatggacgagctgggctacatgtacttcagagacagaagcggcgacaccttcagatggagaggcgagaacgtgagcaccaccgaggtggagggcgtgctgagcagactgctgggccagaccgacgtggccgtgtacggcgtggccgtgcccggcgtggagggcaaggccggcatggccgccgtggccgacccccacagcctgctggaccccaacgccatctaccaggagctgcagaaggtgctggccccctacgccagacccatcttcctgagactgctgccccaggtggacaccaccggcaccttcaagatccagaagaccagactgcagagagagggcttcgaccccagacagaccagcgacagactgttcttcctggacctgaagcagggccactacctgcccctgaacgaggccgtgtacaccagaatctgcagcggcgccttcgccctgtag

SEQ ID NO: 99773 - DNA, 723 bp, synthetic construct
  misc_feature 1..723: note = Description of Artificial Sequence: Synthetic coding sequence
  source 1..723: mol_type = other DNA
cccgagttcgtgggcctgtggctgggcctggccaaggccggcatggaggccgccctgctgaacgtgaacctgagaagagagcccctggccttctgcctgggcaccagcggcgccaaggccctgatcttcggcggcgagatggtggccgccgtggccgaggtgagcggccacctgggcaagagcctgatcaagttctgcagcggcgacctgggccccgagggcatcctgcccgacacccacctgctggaccccctgctgaaggaggccagcaccgcccccctggcccagatccccagcaagggcatggacgacagactgttctacatctacaccagcggcaccaccggcctgcccaaggccgccatcgtggtgcacagcagatactacagaatggccgccttcggccaccacgcctacagaatgcaggccgccgacgtgctgtacgactgcctgcccctgtaccacagcgccggcaacatcatcggcgtgggccagtgcctgatctacggcctgaccgtggtgctgagaaagaagttcagcgccagcagattctgggacgactgcatcaagtacaactgcacctggcacggccccagctggaccgagaagctggagccccagagaaacccctgcctgagcgccgccctggtgcccctgtgcctgccccccctgcccgccttccagcccctgagccccagcatccccgtgcccgtgtggccctag

SEQ ID NO: 99774 - DNA, 1941 bp, synthetic construct; identical to SEQ ID NO: 99772
  misc_feature 1..1941: note = Description of Artificial Sequence: Synthetic coding sequence
  source 1..1941: mol_type = other DNA

SEQ ID NO: 99775 - DNA, 1863 bp, synthetic construct
  misc_feature 1..1863: note = Description of Artificial Sequence: Synthetic coding sequence
  source 1..1863: mol_type = other DNA
atgctgagcgccatctacaccgtgctggccggcctgctgttcctgcccctgctggtgaacctgtgctgcccctacttcttccaggacatcggctacttcctgaaggtggccgccgtgggcagaagagtgagaagctacggcaagagaagacccgccagaaccatcctgagagccttcctggagaaggccagacagaccccccacaagcccttcctgctgttcagagacgagaccctgacctacgcccaggtggacagaagaagcaaccaggtggccagagccctgcacgaccacctgggcctgagacagggcgactgcgtggccctgctgatgggcaacgagcccgcctacgtgtggctgtggctgggcctggtgaagctgggctgcgccatggcctgcctgaactacaacatcagagccaagagcctgctgcactgcttccagtgctgcggcgccaaggtgctgctggtgagccccgagctgcaggccgccgtggaggagatcctgcccagcctgaagaaggacgacgtgagcatctactacgtgagcagaaccagcaacaccgacggcatcgacagcttcctggacaaggtggacgaggtgagcaccgagcccatccccgagagctggagaagcgaggtgaccttcagcacccccgccctgtacatctacaccagcggcaccaccggcctgcccaaggccgccatgatcacccaccagagaatctggtacggcaccggcctgaccttcgtgagcggcctgaaggccgacgacgtgatctacatcaccctgcccttctaccacagcgccgccctgctgatcggcatccacggctgcatcgtggccggcgccaccctggccctgagaaccaagttcagcgccagccagttctgggacgactgcagaaagtacaacgtgaccgtgatccagtacatcggcgagctgctgagatacctgtgcaacagcccccagaagcccaacgacagagaccacaaggtgagactggccctgggcaacggcctgagaggcgacgtgtggagacagttcgtgaagagattcggcgacatctgcatctacgagttctacgccgccaccgagggcaacatcggcttcatgaactacgccagaaaggtgggcgccgtgggcagagtgaactacctgcagaagaagatcatcacctacgacctgatcaagtacgacgtggagaaggacgagcccgtgagagacgagaacggctactgcgtgagagtgcccaagggcgaggtgggcctgctggtgtgcaagatcacccagctgacccccttcaacggctacgccggcgccaaggcccagaccgagaagaagaagctgagagacgtgttcaagaagggcgacctgtacttcaacagcggcgacctgctgatggtggaccacgagaacttcatctacttccacgacagagtgggcgacaccttcagatggaagggcgagaacgtggccaccaccgaggtggccgacaccgtgggcctggtggacttcgtgcaggaggtgaacgtgtacggcgtgcacgtgcccgaccacgagggcagaatcggcatggccagcatcaagatgaaggagaaccacgagttcgacggcaagaagctgttccagcacatcgccgactacctgcccagctacgccagacccagattcctgagaatccaggacaccatcgagatcaccggcaccttcaagcacagaaagatgaccctggtggaggagggcttcaaccccgccgtgatcaaggacgccctgtacttcctggacgacaccgccaagatgtacgtgcccatgaccgaggacatctacaacgccatcagcgccaagaccctgaagctgtag

SEQ ID NO: 99776 - DNA, 1704 bp, synthetic construct
  misc_feature 1..1704: note = Description of Artificial Sequence: Synthetic coding sequence
  source 1..1704: mol_type = other DNA
atgctgagcgccatctacaccgtgctggccggcctgctgttcctgcccctgctggtgaacctgtgctgcccctacttcttccaggacatcggctacttcctgaaggtggccgccgtgggcagaagagtgagaagctacggcaagagaagacccgccagaaccatcctgagagccttcctggagaaggccagacagaccccccacaagcccttcctgctgttcagagacgagaccctgacctacgcccaggtggacagaagaagcaaccaggtggccagagccctgcacgaccacctgggcctgagacagggcgactgcgtggccctgctgatgggcaacgagcccgcctacgtgtggctgtggctgggcctggtgaagctgggctgcgccatggcctgcctgaactacaacatcagagccaagagcctgctgcactgcttccagtgctgcggcgccaaggtgctgctggtgagccccgagctgcaggccgccgtggaggagatcctgcccagcctgaagaaggacgacgtgagcatctactacgtgagcagaaccagcaacaccgacggcatcgacagcttcctggacaaggtggacgaggtgagcaccgagcccatccccgagagctggagaagcgaggtgaccttcagcacccccgccctgtacatctacaccagcggcaccaccggcgccaccctggccctgagaaccaagttcagcgccagccagttctgggacgactgcagaaagtacaacgtgaccgtgatccagtacatcggcgagctgctgagatacctgtgcaacagcccccagaagcccaacgacagagaccacaaggtgagactggccctgggcaacggcctgagaggcgacgtgtggagacagttcgtgaagagattcggcgacatctgcatctacgagttctacgccgccaccgagggcaacatcggcttcatgaactacgccagaaaggtgggcgccgtgggcagagtgaactacctgcagaagaagatcatcacctacgacctgatcaagtacgacgtggagaaggacgagcccgtgagagacgagaacggctactgcgtgagagtgcccaagggcgaggtgggcctgctggtgtgcaagatcacccagctgacccccttcaacggctacgccggcgccaaggcccagaccgagaagaagaagctgagagacgtgttcaagaagggcgacctgtacttcaacagcggcgacctgctgatggtggaccacgagaacttcatctacttccacgacagagtgggcgacaccttcagatggaagggcgagaacgtggccaccaccgaggtggccgacaccgtgggcctggtggacttcgtgcaggaggtgaacgtgtacggcgtgcacgtgcccgaccacgagggcagaatcggcatggccagcatcaagatgaaggagaaccacgagttcgacggcaagaagctgttccagcacatcgccgactacctgcccagctacgccagacccagattcctgagaatccaggacaccatcgagatcaccggcaccttcaagcacagaaagatgaccctggtggaggagggcttcaaccccgccgtgatcaaggacgccctgtacttcctggacgacaccgccaagatgtacgtgcccatgaccgaggacatctacaacgccatcagcgccaagaccctgaagctgtag

SEQ ID NO: 99777 - DNA, 2436 bp, synthetic construct
  misc_feature 1..2436: note = Description of Artificial Sequence: Synthetic coding sequence
  source 1..2436: mol_type = other DNA
atgcccaagccccccaagcccagaaacaacctggaggacagacacaaccccggcatccagggcagaagagagcacagacccggccccggcagagtgagagccgccagcagccccggcggcagcgcccccagagccgagagaagactgtggggcgagggctgggagagcggcgccgccccccacccccacagcagcagagtgagcgccctgagaccctgcggcgtggtgggcgcctgggtgggcatgggcgtgtgccagagaaccagagccccctggaaggagaagagccagctggagagagccgccctgggcttcagaaagggcggcagcggcatgttcgccagcggctggaaccagaccgtgcccatcgaggaggccggcagcatggccgccctgctgctgctgcccctgctgctgctgctgcccctgctgctgctgaagctgcacctgtggccccagctgagatggctgcccgccgacctggccttcgccgtgagagccctgtgctgcaagagagccctgagagccagagccctggccgccgccgccgccgaccccgagggccccgagggcggctgcagcctggcctggagactggccgagctggcccagcagagagccgcccacaccttcctgatccacggcagcagaagattcagctacagcgaggccgagagagagagcaacagagccgccagagccttcctgagagccctgggctgggactggggccccgacggcggcgacagcggcgagggcagcgccggcgagggcgagagagccgcccccggcgccggcgacgccgccgccggcagcggcgccgagttcgccggcggcgacggcgccgccagaggcggcggcgccgccgcccccctgagccccggcgccaccgtggccctgctgctgcccgccggccccgagttcctgtggctgtggttcggcctggccaaggccggcctgagaaccgccttcgtgcccaccgccctgagaagaggccccctgctgcactgcctgagaagctgcggcgccagagccctggtgctggcccccgagttcctggagagcctggagcccgacctgcccgccctgagagccatgggcctgcacctgtgggccgccggccccggcacccaccccgccggcatcagcgacctgctggccgaggtgagcgccgaggtggacggccccgtgcccggctacctgagcagcccccagagcatcaccgacacctgcctgtacatcttcaccagcggcaccaccggcctgcccaaggccgccagaatcagccacctgaagatcctgcagtgccagggcttctaccagctgtgcggcgtgcaccaggaggacgtgatctacctggccctgcccctgtaccacatgagcggcagcctgctgggcatcgtgggctgcatgggcatcggcgccaccgtggtgctgaagagcaagttcagcgccggccagttctgggaggactgccagcagcacagagtgaccgtgttccagtacatcggcgagctgtgcagatacctggtgaaccagccccccagcaaggccgagagaggccacaaggtgagactggccgtgggcagcggcctgagacccgacacctgggagagattcgtgagaagattcggccccctgcaggtgctggagacctacggcctgaccgagggcaacgtggccaccatcaactacaccggccagagaggcgccgtgggcagagccagctggctgtacaagcacatcttccccttcagcctgatcagatacgacgtgaccaccggcgagcccatcagagacccccagggccactgcatggccaccagccccggcgagcccggcctgctggtggcccccgtgagccagcagagccccttcctgggctacgccggcggccccgagctggcccagggcaagctgctgaaggacgtgttcagacccggcgacgtgttcttcaacaccggcgacctgctggtgtgcgacgaccagggcttcctgagattccacgacagaaccggcgacaccttcagatggaagggcgagaacgtggccaccaccgaggtggccgaggtgttcgaggccctggacttcctgcaggaggtgaacgtgtacggcgtgaccgtgcccggccacgagggcagagccggcatggccgccctggtgctgagacccccccacgccctggacctgatgcagctgtacacccacgtgagcgagaacctgcccccctacgccagacccagattcctgagactgcaggagagcctggccaccaccgagaccttcaagcagcagaaggtgagaatggccaacgagggcttcgaccccagcaccctgagcgaccccctgtacgtgctggaccaggccgtgggcgcctacctgcccctgaccaccgccagatacagcgccctgctggccggcaacctgagaatctag

SEQ ID NO: 99778 - DNA, 2193 bp, synthetic construct
  misc_feature 1..2193: note = Description of Artificial Sequence: Synthetic coding sequence
  source 1..2193: mol_type = other DNA
atgggcgtgtgccagagaaccagagccccctggaaggagaagagccagctggagagagccgccctgggcttcagaaagggcggcagcggcatgttcgccagcggctggaaccagaccgtgcccatcgaggaggccggcagcatggccgccctgctgctgctgcccctgctgctgctgctgcccctgctgctgctgaagctgcacctgtggccccagctgagatggctgcccgccgacctggccttcgccgtgagagccctgtgctgcaagagagccctgagagccagagccctggccgccgccgccgccgaccccgagggccccgagggcggctgcagcctggcctggagactggccgagctggcccagcagagagccgcccacaccttcctgatccacggcagcagaagattcagctacagcgaggccgagagagagagcaacagagccgccagagccttcctgagagccctgggctgggactggggccccgacggcggcgacagcggcgagggcagcgccggcgagggcgagagagccgcccccggcgccggcgacgccgccgccggcagcggcgccgagttcgccggcggcgacggcgccgccagaggcggcggcgccgccgcccccctgagccccggcgccaccgtggccctgctgctgcccgccggccccgagttcctgtggctgtggttcggcctggccaaggccggcctgagaaccgccttcgtgcccaccgccctgagaagaggccccctgctgcactgcctgagaagctgcggcgccagagccctggtgctggcccccgagttcctggagagcctggagcccgacctgcccgccctgagagccatgggcctgcacctgtgggccgccggccccggcacccaccccgccggcatcagcgacctgctggccgaggtgagcgccgaggtggacggccccgtgcccggctacctgagcagcccccagagcatcaccgacacctgcctgtacatcttcaccagcggcaccaccggcctgcccaaggccgccagaatcagccacctgaagatcctgcagtgccagggcttctaccagctgtgcggcgtgcaccaggaggacgtgatctacctggccctgcccctgtaccacatgagcggcagcctgctgggcatcgtgggctgcatgggcatcggcgccaccgtggtgctgaagagcaagttcagcgccggccagttctgggaggactgccagcagcacagagtgaccgtgttccagtacatcggcgagctgtgcagatacctggtgaaccagccccccagcaaggccgagagaggccacaaggtgagactggccgtgggcagcggcctgagacccgacacctgggagagattcgtgagaagattcggccccctgcaggtgctggagacctacggcctgaccgagggcaacgtggccaccatcaactacaccggccagagaggcgccgtgggcagagccagctggctgtacaagcacatcttccccttcagcctgatcagatacgacgtgaccaccggcgagcccatcagagacccccagggccactgcatggccaccagccccggcgagcccggcctgctggtggcccccgtgagccagcagagccccttcctgggctacgccggcggccccgagctggcccagggcaagctgctgaaggacgtgttcagacccggcgacgtgttcttcaacaccggcgacctgctggtgtgcgacgaccagggcttcctgagattccacgacagaaccggcgacaccttcagatggaagggcgagaacgtggccaccaccgaggtggccgaggtgttcgaggccctggacttcctgcaggaggtgaacgtgtacggcgtgaccgtgcccggccacgagggcagagccggcatggccgccctggtgctgagacccccccacgccctggacctgatgcagctgtacacccacgtgagcgagaacctgcccccctacgccagacccagattcctgagactgcaggagagcctggccaccaccgagaccttcaagcagcagaaggtgagaatggccaacgagggcttcgaccccagcaccctgagcgaccccctgtacgtgctggaccaggccgtgggcgcctacctgcccctgaccaccgccagatacagcgccctgctggccggcaacctgagaatctag

SEQ ID NO: 99779 - DNA, 1932 bp, synthetic construct
  misc_feature 1..1932: note = Description of Artificial Sequence: Synthetic coding sequence
  source 1..1932: mol_type = other DNA
atgctgctgggcgccagcctggtgggcgtgctgctgttcagcaagctggtgctgaagctgccctggacccaggtgggcttcagcctgctgttcctgtacctgggcagcggcggctggagattcatcagagtgttcatcaagaccatcagaagagacatcttcggcggcctggtgctgctgaaggtgaaggccaaggtgagacagtgcctgcaggagagaagaaccgtgcccatcctgttcgccagcaccgtgagaagacaccccgacaagaccgccctgatcttcgagggcaccgacacccactggaccttcagacagctggacgagtacagcagcagcgtggccaacttcctgcaggccagaggcctggccagcggcgacgtggccgccatcttcatggagaacagaaacgagttcgtgggcctgtggctgggcatggccaagctgggcgtggaggccgccctgatcaacaccaacctgagaagagacgccctgctgcactgcctgaccaccagcagagccagagccctggtgttcggcagcgagatggccagcgccatctgcgaggtgcacgccagcctggaccccagcctgagcctgttctgcagcggcagctgggagcccggcgccgtgccccccagcaccgagcacctggaccccctgctgaaggacgcccccaagcacctgcccagctgccccgacaagggcttcaccgacaagctgttctacatctacaccagcggcaccaccggcctgcccaaggccgccatcgtggtgcacagcagatactacagaatggccgccctggtgtactacggcttcagaatgagacccaacgacatcgtgtacgactgcctgcccctgtaccacagcgccggcaacatcgtgggcatcggccagtgcctgctgcacggcatgaccgtggtgatcagaaagaagttcagcgccagcagattctgggacgactgcatcaagtacaactgcaccatcgtgcagtacatcggcgagctgtgcagatacctgctgaaccagccccccagagaggccgagaaccagcaccaggtgagaatggccctgggcaacggcctgagacagagcatctggaccaacttcagcagcagattccacatcccccaggtggccgagttctacggcgccaccgagtgcaactgcagcctgggcaacttcgacagccaggtgggcgcctgcggcttcaacagcagaatcctgagcttcgtgtaccccatcagactggtgagagtgaacgaggacaccatggagctgatcagaggccccgacggcgtgtgcatcccctgccagcccggcgagcccggccagctggtgggcagaatcatccagaaggaccccctgagaagattcgacggctacctgaaccagggcgccaacaacaagaagatcgccaaggacgtgttcaagaagggcgaccaggcctacctgaccggcgacgtgctggtgatggacgagctgggctacctgtacttcagagacagaaccggcgacaccttcagatggaagggcgagaacgtgagcaccaccgaggtggagggcaccctgagcagactgctggacatggccgacgtggccgtgtacggcgtggaggtgcccggcaccgagggcagagccggcatggccgccgtggccagccccaccggcaactgcgacctggagagattcgcccaggtgctggagaaggagctgcccctgtacgccagacccatcttcctgagactgctgcccgagctgcacaagaccggcacctacaagttccagaagaccgagctgagaaaggagggcttcgaccccgccatcgtgaaggaccccctgttctacctggacgcccagaagggcagatacgtgcccctggaccaggaggcctacagcagaatccaggccggcgaggagaagctgtag

SEQ ID NO: 99780 - DNA, 714 bp, synthetic construct
  misc_feature 1..714: note = Description of Artificial Sequence: Synthetic coding sequence
  source 1..714: mol_type = other DNA
atgcccctgaccctgagcaccctgctgcagcccggcagaatctggaccggcagaagagccgccgagcccacccccggccacaacgccgcctggagcctgagcggcggcggcgccgccgtgctgcaggccggcgccgagaccgccctggaccccggcggcatcctgcccgtggtgcccctgctgggcatctggagactggccctgcaccccggcctgcaccaggaccaccaggcctacctgaccggcgacgtgctggtgatggacgagctgggctacctgtacttcagagacagaaccggcgacaccttcagatggaagggcgagaacgtgagcaccaccgaggtggagggcaccctgagcagactgctggacatggccgacgtggccgtgtacggcgtggaggtgcccggcaccgagggcagagccggcatggccgccgtggccagccccaccggcaactgcgacctggagagattcgcccaggtgctggagaaggagctgcccctgtacgccagacccatcttcctgagactgctgcccgagctgcacaagaccggcacctacaagttccagaagaccgagctgagaaaggagggcttcgaccccgccatcgtgaaggaccccctgttctacctggacgcccagaagggcagatacgtgcccctggaccaggaggcctacagcagaatccaggccggcgaggagaagctgtag

SEQ ID NO: 99781 - DNA, 2073 bp, synthetic construct
  misc_feature 1..2073: note = Description of Artificial Sequence: Synthetic coding sequence
  source 1..2073: mol_type = other DNA
atgggcgtgagacagcagctggccctgctgctgctgctgctgctgctgctgtggggcctgggccagcccgtgtggcccgtggccgtggccctgaccctgagatggctgctgggcgaccccacctgctgcgtgctgctgggcctggccatgctggccagaccctggctgggcccctgggtgccccacggcctgagcctggccgccgccgccctggccctgaccctgctgcccgccagactgccccccggcctgagatggctgcccgccgacgtgatcttcctggccaagatcctgcacctgggcctgaagatcagaggctgcctgagcagacagccccccgacaccttcgtggacgccttcgagagaagagccagagcccagcccggcagagccctgctggtgtggaccggccccggcgccggcagcgtgaccttcggcgagctggacgccagagcctgccaggccgcctgggccctgaaggccgagctgggcgaccccgccagcctgtgcgccggcgagcccaccgccctgctggtgctggccagccaggccgtgcccgccctgtgcatgtggctgggcctggccaagctgggctgccccaccgcctggatcaacccccacggcagaggcatgcccctggcccacagcgtgctgagcagcggcgccagagtgctggtggtggaccccgacctgagagagagcctggaggagatcctgcccaagctgcaggccgagaacatcagatgcttctacctgagccacaccagccccacccccggcgtgggcgccctgggcgccgccctggacgccgcccccagccaccccgtgcccgccgacctgagagccggcatcacctggagaagccccgccctgttcatctacaccagcggcaccaccggcctgcccaagcccgccatcctgacccacgagagagtgctgcagatgagcaagatgctgagcctgagcggcgccaccgccgacgacgtggtgtacaccgtgctgcccctgtaccacgtgatgggcctggtggtgggcatcctgggctgcctggacctgggcgccacctgcgtgctggcccccaagttcagcaccagctgcttctgggacgactgcagacagcacggcgtgaccgtgatcctgtacgtgggcgagctgctgagatacctgtgcaacatcccccagcagcccgaggacagaacccacaccgtgagactggccatgggcaacggcctgagagccgacgtgtgggagaccttccagcagagattcggccccatcagaatctgggaggtgtacggcagcaccgagggcaacatgggcctggtgaactacgtgggcagatgcggcgccctgggcaagatgagctgcctgctgagaatgctgagccccttcgagctggtgcagttcgacatggaggccgccgagcccgtgagagacaaccagggcttctgcatccccgtgggcctgggcgagcccggcctgctgctgaccaaggtggtgagccagcagcccttcgtgggctacagaggccccagagagctgagcgagagaaagctggtgagaaacgtgagacagagcggcgacgtgtactacaacaccggcgacgtgctggccatggacagagagggcttcctgtacttcagagacagactgggcgacaccttcagatggaagggcgagaacgtgagcacccacgaggtggagggcgtgctgagccaggtggacttcctgcagcaggtgaacgtgtacggcgtgtgcgtgcccggctgcgagggcaaggtgggcatggccgccgtgcagctggcccccggccagaccttcgacggcgagaagctgtaccagcacgtgagagcctggctgcccgcctacgccaccccccacttcatcagaatccaggacgccatggaggtgaccagcaccttcaagctgatgaagaccagactggtgagagagggcttcaacgtgggcatcgtggtggaccccctgttcgtgctggacaacagagcccagagcttcagacccctgaccgccgagatgtaccaggccgtgtgcgagggcacctggagactgtag

SEQ ID NO: 99782 - DNA, 1950 bp, synthetic construct
  misc_feature 1..1950: note = Description of Artificial Sequence: Synthetic coding sequence
  source 1..1950: mol_type = other DNA
atggagaacgaccccagcagaagaagagagagcatcagcctgacccccgtggccaagggcctggagaacatgggcgccgacttcctggagagcctggaggagggccagctgcccagaagcgacctgagccccgccgagatcagaagcagctggagcgaggccgcccccaagcccttcagcagatggagaaacctgcagcccgccctgagagccagaagcttctgcagagagcacatgcagctgttcagatggatcggcaccggcctgctgtgcaccggcctgagcgccttcctgctggtggcctgcctgctggacttccagagagccctggccctgttcgtgctgacctgcgtggtgctgaccttcctgggccacagactgctgaagagactgctgggccccaagctgagaagattcctgaagccccagggccaccccagactgctgctgtggttcaagagaggcctggccctggccgccttcctgggcctggtgctgtggctgagcctggacaccagccagagacccgagcagctggtgagcttcgccggcatctgcgtgttcgtggccctgctgttcgcctgcagcaagcaccactgcgccgtgagctggagagccgtgagctggggcctgggcctgcagttcgtgctgggcctgctggtgatcagaaccgagcccggcttcatcgccttcgagtggctgggcgagcagatcagaatcttcctgagctacaccaaggccggcagcagcttcgtgttcggcgaggccctggtgaaggacgtgttcgccttccaggtgctgcccatcatcgtgttcttcagctgcgtgatcagcgtgctgtaccacgtgggcctgatgcagtgggtgatcctgaagatcgcctggctgatgcaggtgaccatgggcaccaccgccaccgagaccctgagcgtggccggcaacatcttcgtgagccagaccgaggcccccctgctgatcagaccctacctggccgacatgaccctgagcgaggtgcacgtggtgatgaccggcggctacgccaccatcgccggcagcctgctgggcgcctacatcagcttcggcatcgacgccaccagcctgatcgccgccagcgtgatggccgccccctgcgccctggccctgagcaagctggtgtaccccgaggtggaggagagcaagttcagaagagaggagggcgtgaagctgacctacggcgacgcccagaacctgatcgaggccgccagcaccggcgccgccatcagcgtgaaggtggtggccaacatcgccgccaacctgatcgccttcctggccgtgctggacttcatcaacgccgccctgagctggctgggcgacatggtggacatccagggcctgagcttccagctgatctgcagctacatcctgagacccgtggccttcctgatgggcgtggcctgggaggactgccccgtggtggccgagctgctgggcatcaagctgttcctgaacgagttcgtggcctaccaggacctgagcaagtacaagcagagaagactggccggcgccgaggagtgggtgggcgacagaaagcagtggatcagcgtgagagccgaggtgctgaccaccttcgccctgtgcggcttcgccaacttcagcagcatcggcatcatgctgggcggcctgaccagcatggtgccccagagaaagagcgacttcagccagatcgtgctgagagccctgttcaccggcgcctgcgtgagcctggtgaacgcctgcatggccggcatcctgtacatgcccagaggcgccgaggtggactgcatgagcctgctgaacaccaccctgagcagcagcagcttcgagatctaccagtgctgcagagaggccttccagagcgtgaaccccgagttcagccccgaggccctggacaactgctgcagattctacaaccacaccatctgcgcccagtag

SEQ ID NO: 99783 - DNA, 528 bp, synthetic construct
  misc_feature 1..528: note = Description of Artificial Sequence: Synthetic coding sequence
  source 1..528: mol_type = other DNA
atggagaacgaccccagcagaagaagagagagcatcagcctgacccccgtggccaagggcctggagaacatgggcgccgacttcctggagagcctggaggagggccagctgcccagaagcgacctgagccccgccgagatcagaagcagctggagcgaggccgcccccaagcccttcagcagatggagaaacctgcagcccgccctgagagccagaagcttctgcagagagcacatgcagctgttcagatggatcggcaccggcctgctgtgcaccggcctgagcgccttcctgctggtggcctgcctgctggacttccagagagccctggccctgttcgtgctgacctgcgtggtgctgaccttcctgggccacagactgctgaagagactgctgggccccaagctgagaagattcctgaagccccagggccaccccagactgctgctgtggttcaagagagaccccagaccctggagcaaggagggccccaaccagtacctgccccagatcacctggaccgtgtag

SEQ ID NO: 99784 - DNA, 1950 bp, synthetic construct; identical to SEQ ID NO: 99782
  misc_feature 1..1950: note = Description of Artificial Sequence: Synthetic coding sequence
  source 1..1950: mol_type = other DNA

SEQ ID NO: 99785 - DNA, 1632 bp, synthetic construct
  misc_feature 1..1632: note = Description of Artificial Sequence: Synthetic coding sequence
  source 1..1632: mol_type = other DNA
atggagaacgaccccagcagaagaagagagagcatcagcctgacccccgtggccaagggcctggagaacatgggcgccgacttcctggagagcctggaggagggccagctgcccagaagcgacctgagccccgccgagatcagaagcagctggagcgaggccgcccccaagcccttcagcagatggagaaacctgcagcccgccctgagagccagaagcttctgcagagagcacatgcagctgttcagatggatcggcaccggcctgctgtgcaccggcctgagcgccttcctgctggtggcctgcctgctggacttccagagagccctggccctgttcgtgctgacctgcgtggtgctgaccttcctgggccacagactgctgaagagactgctgggccccaagctgagaagattcctgaagccccagggccaccccagactgctgctgtggttcaagagaggcctggccctggccgccttcctgggcctggtgctgtggctgagcctggacaccagccagagacccgagcagctggtgagcttcgccggcatctgcgtgttcgtggccctgctgttcgcctgcagcaagcaccactgcgccgtgagctggagagccgtgagctggggcctgggcctgcagttcgtgctgggcctgctggtgatcagaaccgagcccggcttcatcgccttcgagtggctgggcgagcagatcagaatcttcctgagctacaccaaggccggcagcagcttcgtgttcggcgaggccctggtgaaggacgtgttcgccttccaggtgctgcccatcatcgtgttcttcagctgcgtgatcagcgtgctgtaccacgtgggcctgatgcagtgggtgatcctgaagatcgcctggctgatgcaggtgaccatgggcaccaccgccaccgagaccctgagcgtggccggcaacatcttcgtgagccagaccgaggcccccctgctgatcagaccctacctggccgacatgaccctgagcgaggtgcacgtggtgatgaccggcggctacgccaccatcgccggcagcctgctgggcgcctacatcagcttcggcatcgacgccaccagcctgatcgccgccagcgtgatggccgccccctgcgccctggccctgagcaagctggtgtaccccgaggtggaggagagcaagttcagaagagaggagggcgtgaagctgacctacggcgacgcccagaacctgatcgaggccgccagcaccggcgccgccatcagcgtgaaggtggtggccaacatcgccgccaacctgatcgccttcctggccgtgctggacttcatcaacgccgccctgagctggctgggcgacatggtggacatccagggcctgagcttccagctgatctgcagctacatcctgagacccgtggccttcctgatgggcgtggcctgggaggactgccccgtggtggccgagctgctgggcatcaagctgttcctgaacgagttcgtggcctaccaggacctgagcaagtacaagcagagaagactggccggcgccgaggagtgggtgggcgacagaaagcagtggatcagcagaagaggcctggccatgctgaccagactggtgctgaacagctggccctag

SEQ ID NO: 99786 - DNA, 1911 bp, synthetic construct
  misc_feature 1..1911: note = Description of Artificial Sequence: Synthetic coding sequence
  source 1..1911: mol_type = other DNA
atggagaacgaccccagcagaagaagagagagcatcagcctgacccccgtggccaagggcctggagaacatgggcgccgacttcctggagagcctggaggagggccagctgcccagaagcgacctgagccccgccgagatcagaagcagctggagcgaggccgcccccaagcccttcagcagatggagaaacctgcagcccgccctgagagccagaagcttctgcagagagcacatgcagctgttcagatggatcggcaccggcctgctgtgcaccggcctgagcgccttcctgctggtggcctgcctgctggacttccagagagccctggccctgttcgtgctgacctgcgtggtgctgaccttcctgggccacagactgctgaagagactgctgggccccaagctgagaagattcctgaagccccagggccaccccagactgctgctgtggttcaagagaggcctggccctggccgccttcctgggcctggtgctgtggctgagcctggacaccagccagagacccgagcagctggtgagcttcgccggcatctgcgtgttcgtggccctgctgttcgcctgcagcaagcaccactgcgccgtgagctggagagccgtgagctggggcctgggcctgcagttcgtgctgggcctgctggtgatcagaaccgagcccggcttcatcgccttcgagtggctgggcgagcagatcagaatcttcctgagctacaccaaggccggcagcagcttcgtgttcggcgaggccctggtgaaggacgtgttcgccttccaggtgctgcccatcatcgtgttcttcagctgcgtgatcagcgtgctgtaccacgtgggcctgatgcagtgggtgatcctgaagatcgcctggctgatgcaggtgaccatgggcaccaccgccaccgagaccctgagcgtggccggcaacatcttcgtgagccagaccgaggcccccctgctgatcagaccctacctggccgacatgaccctgagcgaggtgcacgtggtgatgaccggcggctacgccaccatcgccggcagcctgctgggcgcctacatcagcttcggcatcgacgccaccagcctgatcgccgccagcgtgatggccgccccctgcgccctggccctgagcaagctggtgtaccccgaggtggaggagagcaagttcagaagagaggagggcgtgaagctgacctacggcgacgcccagaacctgatcgaggccgccagcaccggcgccgccatcagcgtgaaggtggtggccaacatcgccgccaacctgatcgccttcctggccgtgctggacttcatcaacgccgccctgagctggctgggcgacatggtggacatccagggcctgagcttccagctgatctgcagctacatcctgagacccgtggccttcctgatgggcgtggcctgggaggactgccccgtggtggccgagctgctgggcatcaagctgttcctgaacgagttcgtggcctaccaggacctgagcaagtacaagcagagaagactggccggcgccgaggagtgggtgggcgacagaaagcagtggatcagcgtgagagccgaggtgctgaccaccttcgccctgtgcggcttcgccaacttcagcagcatcggcatcatgctgggcggcctgaccagcatggtgccccagagaaagagcgacttcagccagatcgtgctgagagccctgttcaccggcgcctgcgtgagcctggtgaacgcctgcatggccggcatcctgtacatgcccagaggcgccgaggtggactgcatgagcctgctgaacaccaccctgagcagcagcagcttcgagatctaccagtgctgcagagaggccttccagagaatcttcaagagcacccccgccgagagccagccctag

SEQ ID NO: 99787 - DNA, 864 bp, synthetic construct
  misc_feature 1..864: note = Description of Artificial Sequence: Synthetic coding sequence
  source 1..864: mol_type = other DNA
atgcagctgttcagatggatcggcaccggcctgctgtgcaccggcctgagcgccttcctgctggtggcctgcctgctggacttccagagagccctggccctgttcgtgctgacctgcgtggtgctgaccttcctgggccacagactgctgaagagactgctgggccccaagctgagaagattcctgaagccccagggccaccccagactgctgctgtggttcaagagaggcctggccctggccgccttcctgggcctggtgctgtggctgagcctggacaccagccagagacccgagcagctggtgagcttcgccggcatctgcgtgttcgtggccctgctgttcgcctgcagcaagcaccactgcgccgtgagctggagagccgtgagctggggcctgggcctgcagttcgtgctgggcctgctggtgatcagaaccgagcccggcttcatcgccttcgagtggctgggcgagcagatcagaatcttcctgagctacaccaaggccggcagcagcttcgtgttcggcgaggccctggtgaaggacgtgttcgccttccaggtgctgcccatcatcgtgttcttcagctgcgtgatcagcgtgctgtaccacgtgggcctgatgcagtgggtgatcctgaagatcgcctggctgatgcaggtgaccatgggcaccaccgccaccgagaccctgagcgtggccggcaacatcttcgtgagccagaccgaggcccccctgctgatcagaccctacctggccgacatgaccctgagcgaggtgcacgtggtgatgaccggcggctacgccaccatcgccggcagcctgctgggcgcctacatcagcttcggcctggagaagctgtag

SEQ ID NO: 99788 - DNA, 1452 bp, synthetic construct
  misc_feature 1..1452: note = Description of Artificial Sequence: Synthetic coding sequence
  source 1..1452: mol_type = other DNA
atggagaacgaccccagcagaagaagagagagcatcagcctgacccccgtggccaagggcctggagaacatgggcgccgacttcctggagagcctggaggagggccagctgcccagaagcgacctgagccccgccgagatcagaagcagctggagcgaggccgcccccaagcccttcagcagatggagaaacctgcagcccgccctgagagccagaagcttctgcagagagcacatgcagctgttcagatggatcggcaccggcctgctgtgcaccggcctgagcgccttcctgctggtggcctgcctgctggacttccagagagccctggccctgttcgtgctgacctgcgtggtgctgaccttcctgggccacagactgctgaagagactgctgggccccaagctgagaagattcctgaagccccagggccaccccagactgctgctgtggttcaagagaggcctggccctggccgccttcctgggcctggtgctgtggctgagcctggacaccagccagagacccgagcagctggtgagcttcgccggcatctgcgtgttcgtggccctgctgttcgcctgcagcaagcaccactgcgccgtgagctggagagccgtgagctggggcctgggcctgcagttcgtgctgggcctgctggtgatcagaaccgagcccggcttcatcgccttcgagtggctgggcgagcagatcagaatcttcctgagctacaccaaggccggcagcagcttcgtgttcggcgaggccctggtgaaggacgtgttcgccttccaggtgctgcccatcatcgtgttcttcagctgcgtgatcagcgtgctgtaccacgtgggcctgatgcagtgggtgatcctgaagatcgcctggctgatgcaggtgaccatgggcaccaccgccaccgagaccctgagcgtggccggcaacatcttcgtgagccagaccgaggcccccctgctgatcagaccctacctggccgacatgaccctgagcgaggtgcacgtggtgatgaccggcggctacgccaccatcgccggcagcctgctgggcgcctacatcagcttcggcgtgagagccgaggtgctgaccaccttcgccctgtgcggcttcgccaacttcagcagcatcggcatcatgctgggcggcctgaccagcatggtgccccagagaaagagcgacttcagccagatcgtgctgagagccctgttcaccggcgcctgcgtgagcctggtgaacgcctgcatggccggcatcctgtacatgcccagaggcgccgaggtggactgcatgagcctgctgaacaccaccctgagcagcagcagcttcgagatctaccagtgctgcagagaggccttccagagcgtgaaccccgagttcagccccgaggccctggacaactgctgcagattctacaaccacaccatctgcgcccagtag

SEQ ID NO: 99789 - DNA, 1977 bp, synthetic construct
  misc_feature 1..1977: note = Description of Artificial Sequence: Synthetic coding sequence
  source 1..1977: mol_type = other DNA
atggagaaggccagcggcagacagagcatcgccctgagcaccgtggagaccggcaccgtgaaccccggcctggagctgatggagaaggaggtggagcccgagggcagcaagagaaccgacgcccagggccacagcctgggcgacggcctgggccccagcacctaccagagaagaagcagatggcccttcagcaaggccagaagcttctgcaagacccacgccagcctgttcaagaagatcctgctgggcctgctgtgcctggcctacgccgcctacctgctggccgcctgcatcctgaacttccagagagccctggccctgttcgtgatcacctgcctggtgatcttcgtgctggtgcacagcttcctgaagaagctgctgggcaagaagctgaccagatgcctgaagcccttcgagaacagcagactgagactgtggaccaagtgggtgttcgccggcgtgagcctggtgggcctgatcctgtggctggccctggacaccgcccagagacccgagcagctgatccccttcgccggcatctgcatgttcatcctgatcctgttcgcctgcagcaagcaccacagcgccgtgagctggagaaccgtgttcagcggcctgggcctgcagttcgtgttcggcatcctggtgatcagaaccgacctgggctacaccgtgttccagtggctgggcgagcaggtgcagatcttcctgaactacaccgtggccggcagcagcttcgtgttcggcgacaccctggtgaaggacgtgttcgccttccaggccctgcccatcatcatcttcttcggctgcgtggtgagcatcctgtactacctgggcctggtgcagtgggtggtgcagaaggtggcctggttcctgcagatcaccatgggcaccaccgccaccgagaccctggccgtggccggcaacatcttcgtgggcatgaccgaggcccccctgctgatcagaccctacctgggcgacatgaccctgagcgagatccacgccgtgatgaccggcggcttcgccaccatcagcggcaccgtgctgggcgccttcatcgccttcggcgtggacgccagcagcctgatcagcgccagcgtgatggccgccccctgcgccctggccagcagcaagctggcctaccccgaggtggaggagagcaagttcaagagcgaggagggcgtgaagctgcccagaggcaaggagagaaacgtgctggaggccgccagcaacggcgccgtggacgccatcggcctggccaccaacgtggccgccaacctgatcgccttcctggccgtgctggccttcatcaacgccgccctgagctggctgggcgagctggtggacatccagggcctgaccttccaggtgatctgcagctacctgctgagacccatggtgttcatgatgggcgtggagtggaccgactgccccatggtggccgagatggtgggcatcaagttcttcatcaacgagttcgtggcctaccagcagctgagccagtacaagaacaagagactgagcggcatggaggagtggatcgagggcgagaagcagtggatcagcgtgagagccgagatcatcaccaccttcagcctgtgcggcttcgccaacctgagcagcatcggcatcaccctgggcggcctgaccagcatcgtgccccacagaaagagcgacctgagcaaggtggtggtgagagccctgttcaccggcgcctgcgtgagcctgatcagcgcctgcatggccggcatcctgtacgtgcccagaggcgccgaggccgactgcgtgagcttccccaacaccagcttcaccaacagaacctacgagacctacatgtgctgcagaggcctgttccagagcaccagcctgaacggcaccaacccccccagcttcagcggcccctgggaggacaaggagttcagcgccatggccctgaccaactgctgcggcttctacaacaacaccgtgtgcgcctag

SEQ ID NO: 99790 - DNA, 2076 bp, synthetic construct
  misc_feature 1..2076: note = Description of Artificial Sequence: Synthetic coding sequence
  source 1..2076: mol_type = other DNA
atggagctgagaagcaccgccgcccccagagccgagggctacagcaacgtgggcttccagaacgaggagaacttcctggagaacgagaacaccagcggcaacaacagcatcagaagcagagccgtgcagagcagagagcacaccaacaccaagcaggacgaggagcaggtgaccgtggagcaggacagccccagaaacagagagcacatggaggacgacgacgaggagatgcagcagaagggctgcctggagagaagatacgacaccgtgtgcggcttctgcagaaagcacaagaccaccctgagacacatcatctggggcatcctgctggccggctacctggtgatggtgatcagcgcctgcgtgctgaacttccacagagccctgcccctgttcgtgatcaccgtggccgccatcttcttcgtggtgtgggaccacctgatggccaagtacgagcacagaatcgacgagatgctgagccccggcagaagactgctgaacagccactggttctggctgaagtgggtgatctggagcagcctggtgctggccgtgatcttctggctggccttcgacaccgccaagctgggccagcagcagctggtgagcttcggcggcctgatcatgtacatcgtgctgctgttcctgttcagcaagtaccccaccagagtgtactggagacccgtgctgtggggcatcggcctgcagttcctgctgggcctgctgatcctgagaaccgaccccggcttcatcgccttcgactggctgggcagacaggtgcagaccttcctggagtacaccgacgccggcgccagcttcgtgttcggcgagaagtacaaggaccacttcttcgccttcaaggtgctgcccatcgtggtgttcttcagcaccgtgatgagcatgctgtactacctgggcctgatgcagtggatcatcagaaaggtgggctggatcatgctggtgaccaccggcagcagccccatcgagagcgtggtggccagcggcaacatcttcgtgggccagaccgagagccccctgctggtgagaccctacctgccctacatcaccaagagcgagctgcacgccatcatgaccgccggcttcagcaccatcgccggcagcgtgctgggcgcctacatcagcttcggcgtgcccagcagccacctgctgaccgccagcgtgatgagcgcccccgccagcctggccgccgccaagctgttctggcccgagaccgagaagcccaagatcaccctgaagaacgccatgaagatggagagcggcgacagcggcaacctgctggaggccgccacccagggcgccagcagcagcatcagcctggtggccaacatcgccgtgaacctgatcgccttcctggccctgctgagcttcatgaacagcgccctgagctggttcggcaacatgttcgactacccccagctgagcttcgagctgatctgcagctacatcttcatgcccttcagcttcatgatgggcgtggagtggcaggacagcttcatggtggccagactgatcggctacaagaccttcttcaacgagttcgtggcctacgagcacctgagcaagtggatccacctgagaaaggagggcggccccaagttcgtgaacggcgtgcagcagtacatcagcatcagaagcgagatcatcgccacctacgccctgtgcggcttcgccaacatcggcagcctgggcatcgtgatcggcggcctgaccagcatggcccccagcagaaagagagacatcgccagcggcgccgtgagagccctgatcgccggcaccgtggcctgcttcatgaccgcctgcatcgccggcatcctgagcagcacccccgtggacatcaactgccaccacgtgctggagaacgccttcaacagcaccttccccggcaacaccaccaaggtgatcgcctgctgccagagcctgctgagcagcaccgtggccaagggccccggcgaggtgatccccggcggcaaccacagcctgtacagcctgaagggctgctgcaccctgctgaaccccagcaccttcaactgcaacggcatcagcaacaccttctag

SEQ ID NO: 99791 - DNA, 1869 bp, synthetic construct
  misc_feature 1..1869: note = Description of Artificial Sequence: Synthetic coding sequence
  source 1..1869: mol_type = other DNA
atggaggacgacgacgaggagatgcagcagaagggctgcctggagagaagatacgacaccgtgtgcggcttctgcagaaagcacaagaccaccctgagacacatcatctggggcatcctgctggccggctacctggtgatggtgatcagcgcctgcgtgctgaacttccacagagccctgcccctgttcgtgatcaccgtggccgccatcttcttcgtggtgtgggaccacctgatggccaagtacgagcacagaatcgacgagatgctgagccccggcagaagactgctgaacagccactggttctggctgaagtgggtgatctggagcagcctggtgctggccgtgatcttctggctggccttcgacaccgccaagctgggccagcagcagctggtgagcttcggcggcctgatcatgtacatcgtgctgctgttcctgttcagcaagtaccccaccagagtgtactggagacccgtgctgtggggcatcggcctgcagttcctgctgggcctgctgatcctgagaaccgaccccggcttcatcgccttcgactggctgggcagacaggtgcagaccttcctggagtacaccgacgccggcgccagcttcgtgttcggcgagaagtacaaggaccacttcttcgccttcaaggtgctgcccatcgtggtgttcttcagcaccgtgatgagcatgctgtactacctgggcctgatgcagtggatcatcagaaaggtgggctggatcatgctggtgaccaccggcagcagccccatcgagagcgtggtggccagcggcaacatcttcgtgggccagaccgagagccccctgctggtgagaccctacctgccctacatcaccaagagcgagctgcacgccatcatgaccgccggcttcagcaccatcgccggcagcgtgctgggcgcctacatcagcttcggcgtgcccagcagccacctgctgaccgccagcgtgatgagcgcccccgccagcctggccgccgccaagctgttctggcccgagaccgagaagcccaagatcaccctgaagaacgccatgaagatggagagcggcgacagcggcaacctgctggaggccgccacccagggcgccagcagcagcatcagcctggtggccaacatcgccgtgaacctgatcgccttcctggccctgctgagcttcatgaacagcgccctgagctggttcggcaacatgttcgactacccccagctgagcttcgagctgatctgcagctacatcttcatgcccttcagcttcatgatgggcgtggagtggcaggacagcttcatggtggccagactgatcggctacaagaccttcttcaacgagttcgtggcctacgagcacctgagcaagtggatccacctgagaaaggagggcggccccaagttcgtgaacggcgtgcagcagtacatcagcatcagaagcgagatcatcgccacctacgccctgtgcggcttcgccaacatcggcagcctgggcatcgtgatcggcggcctgaccagcatggcccccagcagaaagagagacatcgccagcggcgccgtgagagccctgatcgccggcaccgtggcctgcttcatgaccgcctgcatcgccggcatcctgagcagcacccccgtggacatcaactgccaccacgtgctggagaacgccttcaacagcaccttccccggcaacaccaccaaggtgatcgcctgctgccagagcctgctgagcagcaccgtggccaagggccccggcgaggtgatccccggcggcaaccacagcctgtacagcctgaagggctgctgcaccctgctgaaccccagcaccttcaactgcaacggcatcagcaacaccttctag

SEQ ID NO: 99792 - DNA, 1608 bp, synthetic construct
  misc_feature 1..1608: note = Description of Artificial Sequence: Synthetic coding sequence
  source 1..1608: mol_type = other DNA
atgagaagagagagaaccagaggcccccaggcctgggagttccccagccccaccaagagcggctgcagcctgcagagcctgagcagagacctgagagagctgagagagggcgagaagcccgaggaccaggccgagaccgaggagagctggcagggcctggccagaaagacccccggcaaggcctgcgcccccgagggcggcagctgccagcccggcaagaccgagaacaccatcaccatgaccaccagccaccagccccaggacagatacaaggccgtgtggctgatcttcttcatgctgggcctgggcaccctgctgccctggaacttcttcatgaccgccacccagtacttcaccaacagactggacatgagccagaacgtgagcctggtgaccgccgagctgagcaaggacgcccaggccagcgccgcccccgccgcccccctgcccgagagaaacagcctgagcgccatcttcaacaacgtgatgaccctgtgcgccatgctgcccctgctgctgttcacctacctgaacagcttcctgcaccagagaatcccccagagcgtgagaatcctgggcagcctggtggccatcctgctggtgttcctgatcaccgccatcctggtgaaggtgcagctggacgccctgcccttcttcgtgatcaccatgatcaagatcgtgctgatcaacagcttcggcgccatcctgcagggcagcctgttcggcctggccggcctgctgcccgccagctacaccgcccccatcatgagcggccagggcctggccggcttcttcgccagcgtggccatgatctgcgccatcgccagcggcagcgagctgagcgagagcgccttcggctacttcatcaccgcctgcgccgtgatcatcctgaccatcatctgctacctgggcctgcccagactggagttctacagatactaccagcagctgaagctggagggccccggcgagcaggagaccaagctggacctgatcagcaagggcgaggagcccagagccggcaaggaggagagcggcgtgagcgtgagcaacagccagcccaccaacgagagccacagcatcaaggccatcctgaagaacatcagcgtgctggccttcagcgtgtgcttcatcttcaccatcaccatcggcatgttccccgccgtgaccgtggaggtgaagagcagcatcgccggcagcagcacctgggagagatacttcatccccgtgagctgcttcctgaccttcaacatcttcgactggctgggcagaagcctgaccgccgtgttcatgtggcccggcaaggacagcagatggctgcccagcctggtgctggccagactggtgttcgtgcccctgctgctgctgtgcaacatcaagcccagaagatacctgaccgtggtgttcgagcacgacgcctggttcatcttcttcatggccgccttcgccttcagcaacggctacctggccagcctgtgcatgtgcttcggccccaagaaggtgaagcccgccgaggccgagaccgccggcgccatcatggccttcttcctgtgcctgggcctggccctgggcgccgtgttcagcttcctgttcagagccatcgtgtag

SEQ ID NO: 99793 - DNA, 1371 bp, synthetic construct
  misc_feature 1..1371: note = Description of Artificial Sequence: Synthetic coding sequence
  source 1..1371: mol_type = other DNA
atgaccaccagccaccagccccaggacagatacaaggccgtgtggctgatcttcttcatgctgggcctgggcaccctgctgccctggaacttcttcatgaccgccacccagtacttcaccaacagactggacatgagccagaacgtgagcctggtgaccgccgagctgagcaaggacgcccaggccagcgccgcccccgccgcccccctgcccgagagaaacagcctgagcgccatcttcaacaacgtgatgaccctgtgcgccatgctgcccctgctgctgttcacctacctgaacagcttcctgcaccagagaatcccccagagcgtgagaatcctgggcagcctggtggccatcctgctggtgttcctgatcaccgccatcctggtgaaggtgcagctggacgccctgcccttcttcgtgatcaccatgatcaagatcgtgctgatcaacagcttcggcgccatcctgcagggcagcctgttcggcctggccggcctgctgcccgccagctacaccgcccccatcatgagcggccagggcctggccggcttcttcgccagcgtggccatgatctgcgccatcgccagcggcagcgagctgagcgagagcgccttcggctacttcatcaccgcctgcgccgtgatcatcctgaccatcatctgctacctgggcctgcccagactggagttctacagatactaccagcagctgaagctggagggccccggcgagcaggagaccaagctggacctgatcagcaagggcgaggagcccagagccggcaaggaggagagcggcgtgagcgtgagcaacagccagcccaccaacgagagccacagcatcaaggccatcctgaagaacatcagcgtgctggccttcagcgtgtgcttcatcttcaccatcaccatcggcatgttccccgccgtgaccgtggaggtgaagagcagcatcgccggcagcagcacctgggagagatacttcatccccgtgagctgcttcctgaccttcaacatcttcgactggctgggcagaagcctgaccgccgtgttcatgtggcccggcaaggacagcagatggctgcccagcctggtgctggccagactggtgttcgtgcccctgctgctgctgtgcaacatcaagcccagaagatacctgaccgtggtgttcgagcacgacgcctggttcatcttcttcatggccgccttcgccttcagcaacggctacctggccagcctgtgcatgtgcttcggccccaagaaggtgaagcccgccgaggccgagaccgccggcgccatcatggccttcttcctgtgcctgggcctggccctgggcgccgtgttcagcttcctgttcagagccatcgtgtag

SEQ ID NO: 99794 - DNA, 1371 bp, synthetic construct; identical to SEQ ID NO: 99793
  misc_feature 1..1371: note = Description of Artificial Sequence: Synthetic coding sequence
  source 1..1371: mol_type = other DNA

SEQ ID NO: 99795 - DNA, 1371 bp, synthetic construct; identical to SEQ ID NO: 99793
  misc_feature 1..1371: note = Description of Artificial Sequence: Synthetic coding sequence
  source 1..1371: mol_type = other DNA

SEQ ID NO: 99796 - DNA, 1371 bp, synthetic construct; identical to SEQ ID NO: 99793
  misc_feature 1..1371: note = Description of Artificial Sequence: Synthetic coding sequence
  source 1..1371: mol_type = other DNA

SEQ ID NO: 99797 - DNA, 1371 bp, synthetic construct; identical to SEQ ID NO: 99793
  misc_feature 1..1371: note = Description of Artificial Sequence: Synthetic coding sequence
  source 1..1371: mol_type = other DNA

SEQ ID NO: 99798 - DNA, 1371 bp, synthetic construct; identical to SEQ ID NO: 99793
  misc_feature 1..1371: note = Description of Artificial Sequence: Synthetic coding sequence
  source 1..1371: mol_type = other DNA

SEQ ID NO: 99799 - DNA, 1371 bp, synthetic construct; identical to SEQ ID NO: 99793
  misc_feature 1..1371: note = Description of Artificial Sequence: Synthetic coding sequence
  source 1..1371: mol_type = other DNA

SEQ ID NO: 99800 - DNA, 1371 bp, synthetic construct; identical to SEQ ID NO: 99793
  misc_feature 1..1371: note = Description of Artificial Sequence: Synthetic coding sequence
  source 1..1371: mol_type = other DNA

SEQ ID NO: 99801 - DNA, 1371 bp, synthetic construct; identical to SEQ ID NO: 99793
  misc_feature 1..1371: note = Description of Artificial Sequence: Synthetic coding sequence
  source 1..1371: mol_type = other DNA

SEQ ID NO: 99802 - DNA, 510 bp, synthetic construct
  misc_feature 1..510: note = Description of Artificial Sequence: Synthetic coding sequence
  source 1..510: mol_type = other DNA
atgagaagagagagaaccagaggcccccaggcctgggagttccccagccccaccaagagcggctgcagcctgcagagcctgagcagatacaaggccgtgtggctgatcttcttcatgctgggcctgggcaccctgctgccctggaacttcttcatgaccgccacccagtacttcaccaacagactggacatgagccagaacgtgagcctggtgaccgccgagctgagcaaggacgcccaggccagcgccgcccccgccgcccccctgcccgagagaaacagcctgagcgccatcttcaacaacgtgatgaccctgtgcgccatgctgcccctgctgctgttcacctacctgaacagcttcctgcaccagagaatcccccagagcgtgagaatcctgggcagcctggtggccatcctgctggtgttcctgatcaccgccatcctggtgaaggtgcagctggacgccctgcccttcttcgtgatcaccatgatcaagatcgtgctgatctag

SEQ ID NO: 99803 - DNA, 1371 bp, synthetic construct
  misc_feature 1..1371: note = Description of Artificial Sequence: Synthetic coding sequence
  source 1..1371: mol_type = other DNA
atggccagaggcgacgcccccagagacagctaccacctggtgggcatcagcttcttcatcctgggcctgggcaccctgctgccctggaacttcttcatcaccgccatcccctacttccaggccagactggccggcgccggcaacagcaccgccagaatcctgagcaccaaccacaccggccccgaggacgccttcaacttcaacaactgggtgaccctgctgagccagctgcccctgctgctgttcaccctgctgaacagcttcctgtaccagtgcgtgcccgagaccgtgagaatcctgggcagcctgctggccatcctgctgctgttcgccctgaccgccgccctggtgaaggtggacatgagccccggccccttcttcagcatcaccatggccagcgtgtgcttcatcaacagcttcagcgccgtgctgcagggcagcctgttcggccagctgggcaccatgcccagcacctacagcaccctgttcctgagcggccagggcctggccggcatcttcgccgccctggccatgctgctgagcatggccagcggcgtggacgccgagaccagcgccctgggctacttcatcaccccctgcgtgggcatcctgatgagcatcgtgtgctacctgagcctgccccacctgaagttcgccagatactacctggccaacaagagcagccaggcccaggcccaggagctggagaccaaggccgagctgctgcagagcgacgagaacggcatccccagcagcccccagaaggtggccctgaccctggacctggacctggagaaggagcccgagagcgagcccgacgagccccagaagcccggcaagcccagcgtgttcaccgtgttccagaagatctggctgaccgccctgtgcctggtgctggtgttcaccgtgaccctgagcgtgttccccgccatcaccgccatggtgaccagcagcaccagccccggcaagtggagccagttcttcaaccccatctgctgcttcctgctgttcaacatcatggactggctgggcagaagcctgaccagctacttcctgtggcccgacgaggacagcagactgctgcccctgctggtgtgcctgagattcctgttcgtgcccctgttcatgctgtgccacgtgccccagagaagcagactgcccatcctgttcccccaggacgcctacttcatcaccttcatgctgctgttcgccgtgagcaacggctacctggtgagcctgaccatgtgcctggcccccagacaggtgctgccccacgagagagaggtggccggcgccctgatgaccttcttcctggccctgggcctgagctgcggcgccagcctgagcttcctgttcaaggccctgctgtag

SEQ ID NO: 99804 - DNA, 1371 bp, synthetic construct; identical to SEQ ID NO: 99803
  misc_feature 1..1371: note = Description of Artificial Sequence: Synthetic coding sequence
  source 1..1371: mol_type = other DNA

SEQ ID NO: 99805 - DNA, 1371 bp, synthetic construct; identical to SEQ ID NO: 99803
  misc_feature 1..1371: note = Description of Artificial Sequence: Synthetic coding sequence
  source 1..1371: mol_type = other DNA

SEQ ID NO: 99806 - DNA, 1428 bp, synthetic construct
  misc_feature 1..1428: note = Description of Artificial Sequence: Synthetic coding sequence
  source 1..1428: mol_type = other DNA
atggccgtggtgagcgaggacgacttccagcacagcagcaacagcacctacagaaccaccagcagcagcctgagagccgaccaggaggccctgctggagaagctgctggacagacccccccccggcctgcagagacccgaggacagattctgcggcacctacatcatcttcttcagcctgggcatcggcagcctgctgccctggaacttcttcatcaccgccaaggagtactggatgttcaagctgagaaacagcagcagccccgccaccggcgaggaccccgagggcagcgacatcctgaactacttcgagagctacctggccgtggccagcaccgtgcccagcatgctgtgcctggtggccaacttcctgctggtgaacagagtggccgtgcacatcagagtgctggccagcctgaccgtgatcctggccatcttcatggtgatcaccgccctggtgaaggtggacaccagcagctggaccagaggcttcttcgccgtgaccatcgtgtgcatggtgatcctgagcggcgccagcaccgtgttcagcagcagcatctacggcatgaccggcagcttccccatgagaaacagccaggccctgatcagcggcggcgccatgggcggcaccgtgagcgccgtggccagcctggtggacctggccgccagcagcgacgtgagaaacagcgccctggccttcttcctgaccgccaccgtgttcctggtgctgtgcatgggcctgtacctgctgctgagcagactggagtacgccagatactacatgagacccgtgctggccgcccacgtgttcagcggcgaggaggagctgccccaggacagcctgagcgcccccagcgtggccagcagattcatcgacagccacaccccccccctgagacccatcctgaagaagaccgccagcctgggcttctgcgtgacctacgtgttcttcatcaccagcctgatctaccccgccatctgcaccaacatcgagagcctgaacaagggcagcggcagcctgtggaccaccaagttcttcatccccctgaccaccttcctgctgtacaacttcgccgacctgtgcggcagacagctgaccgcctggatccaggtgcccggccccaacagcaaggccctgcccggcttcgtgctgctgagaacctgcctgatccccctgttcgtgctgtgcaactaccagcccagagtgcacctgaagaccgtggtgttccagagcgacgtgtaccccgccctgctgagcagcctgctgggcctgagcaacggctacctgagcaccctggccctgctgtacggccccaagatcgtgcccagagagctggccgaggccaccggcgtggtgatgagcttctacgtgtgcctgggcctgaccctgggcagcgcctgcagcaccctgctggtgcacctgatctag

SEQ ID NO: 99807 - DNA, 1590 bp, synthetic construct
  misc_feature 1..1590: note = Description of Artificial Sequence: Synthetic coding sequence
  source 1..1590: mol_type = other DNA
atgagccaggacaccgaggtggacatgaaggaggtggagctgaacgagctggagcccgagaagcagcccatgaacgccgccagcggcgccgccatgagcctggccggcgccgagaagaacggcctggtgaagatcaaggtggccgaggacgaggccgaggccgccgccgccgccaagttcaccggcctgagcaaggaggagctgctgaaggtggccggcagccccggctgggtgagaaccagatgggccctgctgctgctgttctggctgggctggctgggcatgctggccggcgccgtggtgatcatcgtgagagcccccagatgcagagagctgcccgcccagaagtggtggcacaccggcgccctgtacagaatcggcgacctgcaggccttccagggccacggcgccggcaacctggccggcctgaagggcagactggactacctgagcagcctgaaggtgaagggcctggtgctgggccccatccacaagaaccagaaggacgacgtggcccagaccgacctgctgcagatcgaccccaacttcggcagcaaggaggacttcgacagcctgctgcagagcgccaagaagaagagcatcagagtgatcctggacctgacccccaactacagaggcgagaacagctggttcagcacccaggtggacaccgtggccaccaaggtgaaggacgccctggagttctggctgcaggccggcgtggacggcttccaggtgagagacatcgagaacctgaaggacgccagcagcttcctggccgagtggcagaacatcaccaagggcttcagcgaggacagactgctgatcgccggcaccaacagcagcgacctgcagcagatcctgagcctgctggagagcaacaaggacctgctgctgaccagcagctacctgagcgacagcggcagcaccggcgagcacaccaagagcctggtgacccagtacctgaacgccaccggcaacagatggtgcagctggagcctgagccaggccagactgctgaccagcttcctgcccgcccagctgctgagactgtaccagctgatgctgttcaccctgcccggcacccccgtgttcagctacggcgacgagatcggcctggacgccgccgccctgcccggccagcccatggaggcccccgtgatgctgtgggacgagagcagcttccccgacatccccggcgccgtgagcgccaacatgaccgtgaagggccagagcgaggaccccggcagcctgctgagcctgttcagaagactgagcgaccagagaagcaaggagagaagcctgctgcacggcgacttccacgccttcagcgccggccccggcctgttcagctacatcagacactgggaccagaacgagagattcctggtggtgctgaacttcggcgacgtgggcctgagcgccggcctgcaggccagcgacctgcccgccagcgccagcctgcccgccaaggccgacctgctgctgagcacccagcccggcagagaggagggcagccccctggagctggagagactgaagctggagccccacgagggcctgctgctgagattcccctacgccgcctag

SEQ ID NO: 99808 - DNA, 1707 bp, synthetic construct
  misc_feature 1..1707: note = Description of Artificial Sequence: Synthetic coding sequence
  source 1..1707: mol_type = other DNA
atggagctgcagccccccgaggccagcatcgccgtggtgagcatccccagacagctgcccggcagccacagcgaggccggcgtgcagggcctgagcgccggcgacgacagcggcaccatgagccaggacaccgaggtggacatgaaggaggtggagctgaacgagctggagcccgagaagcagcccatgaacgccgccagcggcgccgccatgagcctggccggcgccgagaagaacggcctggtgaagatcaaggtggccgaggacgaggccgaggccgccgccgccgccaagttcaccggcctgagcaaggaggagctgctgaaggtggccggcagccccggctgggtgagaaccagatgggccctgctgctgctgttctggctgggctggctgggcatgctggccggcgccgtggtgatcatcgtgagagcccccagatgcagagagctgcccgcccagaagtggtggcacaccggcgccctgtacagaatcggcgacctgcaggccttccagggccacggcgccggcaacctggccggcctgaagggcagactggactacctgagcagcctgaaggtgaagggcctggtgctgggccccatccacaagaaccagaaggacgacgtggcccagaccgacctgctgcagatcgaccccaacttcggcagcaaggaggacttcgacagcctgctgcagagcgccaagaagaagagcatcagagtgatcctggacctgacccccaactacagaggcgagaacagctggttcagcacccaggtggacaccgtggccaccaaggtgaaggacgccctggagttctggctgcaggccggcgtggacggcttccaggtgagagacatcgagaacctgaaggacgccagcagcttcctggccgagtggcagaacatcaccaagggcttcagcgaggacagactgctgatcgccggcaccaacagcagcgacctgcagcagatcctgagcctgctggagagcaacaaggacctgctgctgaccagcagctacctgagcgacagcggcagcaccggcgagcacaccaagagcctggtgacccagtacctgaacgccaccggcaacagatggtgcagctggagcctgagccaggccagactgctgaccagcttcctgcccgcccagctgctgagactgtaccagctgatgctgttcaccctgcccggcacccccgtgttcagctacggcgacgagatcggcctggacgccgccgccctgcccggccagcccatggaggcccccgtgatgctgtgggacgagagcagcttccccgacatccccggcgccgtgagcgccaacatgaccgtgaagggccagagcgaggaccccggcagcctgctgagcctgttcagaagactgagcgaccagagaagcaaggagagaagcctgctgcacggcgacttccacgccttcagcgccggccccggcctgttcagctacatcagacactgggaccagaacgagagattcctggtggtgctgaacttcggcgacgtgggcctgagcgccggcctgcaggccagcgacctgcccgccagcgccagcctgcccgccaaggccgacctgctgctgagcacccagcccggcagagaggagggcagccccctggagctggagagactgaagctggagccccacgagggcctgctgctgagattcccctacgccgcctag

SEQ ID NO: 99809 - DNA, 1893 bp, synthetic construct
  misc_feature 1..1893: note = Description of Artificial Sequence: Synthetic coding sequence
  source 1..1893: mol_type = other DNA
atggagctgcagccccccgaggccagcatcgccgtggtgagcatccccagacagctgcccggcagccacagcgaggccggcgtgcagggcctgagcgccggcgacgacagcgagctgggcagccactgcgtggcccagaccggcctggagctgctggccagcggcgaccccctgcccagcgccagccagaacgccgagatgatcgagaccggcagcgactgcgtgacccaggccggcctgcagctgctggccagcagcgacccccccgccctggccagcaagaacgccgaggtgaccggcaccatgagccaggacaccgaggtggacatgaaggaggtggagctgaacgagctggagcccgagaagcagcccatgaacgccgccagcggcgccgccatgagcctggccggcgccgagaagaacggcctggtgaagatcaaggtggccgaggacgaggccgaggccgccgccgccgccaagttcaccggcctgagcaaggaggagctgctgaaggtggccggcagccccggctgggtgagaaccagatgggccctgctgctgctgttctggctgggctggctgggcatgctggccggcgccgtggtgatcatcgtgagagcccccagatgcagagagctgcccgcccagaagtggtggcacaccggcgccctgtacagaatcggcgacctgcaggccttccagggccacggcgccggcaacctggccggcctgaagggcagactggactacctgagcagcctgaaggtgaagggcctggtgctgggccccatccacaagaaccagaaggacgacgtggcccagaccgacctgctgcagatcgaccccaacttcggcagcaaggaggacttcgacagcctgctgcagagcgccaagaagaagagcatcagagtgatcctggacctgacccccaactacagaggcgagaacagctggttcagcacccaggtggacaccgtggccaccaaggtgaaggacgccctggagttctggctgcaggccggcgtggacggcttccaggtgagagacatcgagaacctgaaggacgccagcagcttcctggccgagtggcagaacatcaccaagggcttcagcgaggacagactgctgatcgccggcaccaacagcagcgacctgcagcagatcctgagcctgctggagagcaacaaggacctgctgctgaccagcagctacctgagcgacagcggcagcaccggcgagcacaccaagagcctggtgacccagtacctgaacgccaccggcaacagatggtgcagctggagcctgagccaggccagactgctgaccagcttcctgcccgcccagctgctgagactgtaccagctgatgctgttcaccctgcccggcacccccgtgttcagctacggcgacgagatcggcctggacgccgccgccctgcccggccagcccatggaggcccccgtgatgctgtgggacgagagcagcttccccgacatccccggcgccgtgagcgccaacatgaccgtgaagggccagagcgaggaccccggcagcctgctgagcctgttcagaagactgagcgaccagagaagcaaggagagaagcctgctgcacggcgacttccacgccttcagcgccggccccggcctgttcagctacatcagacactgggaccagaacgagagattcctggtggtgctgaacttcggcgacgtgggcctgagcgccggcctgcaggccagcgacctgcccgccagcgccagcctgcccgccaaggccgacctgctgctgagcacccagcccggcagagaggagggcagccccctggagctggagagactgaagctggagccccacgagggcctgctgctgagattcccctacgccgcctag

SEQ ID NO: 99810 - DNA, 1896 bp, synthetic construct
  misc_feature 1..1896: note = Description of Artificial Sequence: Synthetic coding sequence
  source 1..1896: mol_type = other DNA
atggagctgcagccccccgaggccagcatcgccgtggtgagcatccccagacagctgcccggcagccacagcgaggccggcgtgcagggcctgagcgccggcgacgacagcgagaccggcagcgactgcgtgacccaggccggcctgcagctgctggccagcagcgacccccccgccctggccagcaagaacgccgaggtgaccgtggagaccggcttccaccacgtgagccaggccgacatcgagttcctgaccagcatcgaccccaccgccagcgccagcggcagcgccggcatcaccggcaccatgagccaggacaccgaggtggacatgaaggaggtggagctgaacgagctggagcccgagaagcagcccatgaacgccgccagcggcgccgccatgagcctggccggcgccgagaagaacggcctggtgaagatcaaggtggccgaggacgaggccgaggccgccgccgccgccaagttcaccggcctgagcaaggaggagctgctgaaggtggccggcagccccggctgggtgagaaccagatgggccctgctgctgctgttctggctgggctggctgggcatgctggccggcgccgtggtgatcatcgtgagagcccccagatgcagagagctgcccgcccagaagtggtggcacaccggcgccctgtacagaatcggcgacctgcaggccttccagggccacggcgccggcaacctggccggcctgaagggcagactggactacctgagcagcctgaaggtgaagggcctggtgctgggccccatccacaagaaccagaaggacgacgtggcccagaccgacctgctgcagatcgaccccaacttcggcagcaaggaggacttcgacagcctgctgcagagcgccaagaagaagagcatcagagtgatcctggacctgacccccaactacagaggcgagaacagctggttcagcacccaggtggacaccgtggccaccaaggtgaaggacgccctggagttctggctgcaggccggcgtggacggcttccaggtgagagacatcgagaacctgaaggacgccagcagcttcctggccgagtggcagaacatcaccaagggcttcagcgaggacagactgctgatcgccggcaccaacagcagcgacctgcagcagatcctgagcctgctggagagcaacaaggacctgctgctgaccagcagctacctgagcgacagcggcagcaccggcgagcacaccaagagcctggtgacccagtacctgaacgccaccggcaacagatggtgcagctggagcctgagccaggccagactgctgaccagcttcctgcccgcccagctgctgagactgtaccagctgatgctgttcaccctgcccggcacccccgtgttcagctacggcgacgagatcggcctggacgccgccgccctgcccggccagcccatggaggcccccgtgatgctgtgggacgagagcagcttccccgacatccccggcgccgtgagcgccaacatgaccgtgaagggccagagcgaggaccccggcagcctgctgagcctgttcagaagactgagcgaccagagaagcaaggagagaagcctgctgcacggcgacttccacgccttcagcgccggccccggcctgttcagctacatcagacactgggaccagaacgagagattcctggtggtgctgaacttcggcgacgtgggcctgagcgccggcctgcaggccagcgacctgcccgccagcgccagcctgcccgccaaggccgacctgctgctgagcacccagcccggcagagaggagggcagccccctggagctggagagactgaagctggagccccacgagggcctgctgctgagattcccctacgccgcctag

SEQ ID NO: 99811 - DNA, 1986 bp, synthetic construct
  misc_feature 1..1986: note = Description of Artificial Sequence: Synthetic coding sequence
  source 1..1986: mol_type = other DNA
atggagctgcagccccccgaggccagcatcgccgtggtgagcatccccagacagctgcccggcagccacagcgaggccggcgtgcagggcctgagcgccggcgacgacagcgagctgggcagccactgcgtggcccagaccggcctggagctgctggccagcggcgaccccctgcccagcgccagccagaacgccgagatgatcgagaccggcagcgactgcgtgacccaggccggcctgcagctgctggccagcagcgacccccccgccctggccagcaagaacgccgaggtgaccgagaccggcttccaccacgtgagccaggccgacatcgagttcctgaccagcatcgaccccaccgccagcgccagcggcagcgccggcatcaccggcaccatgagccaggacaccgaggtggacatgaaggaggtggagctgaacgagctggagcccgagaagcagcccatgaacgccgccagcggcgccgccatgagcctggccggcgccgagaagaacggcctggtgaagatcaaggtggccgaggacgaggccgaggccgccgccgccgccaagttcaccggcctgagcaaggaggagctgctgaaggtggccggcagccccggctgggtgagaaccagatgggccctgctgctgctgttctggctgggctggctgggcatgctggccggcgccgtggtgatcatcgtgagagcccccagatgcagagagctgcccgcccagaagtggtggcacaccggcgccctgtacagaatcggcgacctgcaggccttccagggccacggcgccggcaacctggccggcctgaagggcagactggactacctgagcagcctgaaggtgaagggcctggtgctgggccccatccacaagaaccagaaggacgacgtggcccagaccgacctgctgcagatcgaccccaacttcggcagcaaggaggacttcgacagcctgctgcagagcgccaagaagaagagcatcagagtgatcctggacctgacccccaactacagaggcgagaacagctggttcagcacccaggtggacaccgtggccaccaaggtgaaggacgccctggagttctggctgcaggccggcgtggacggcttccaggtgagagacatcgagaacctgaaggacgccagcagcttcctggccgagtggcagaacatcaccaagggcttcagcgaggacagactgctgatcgccggcaccaacagcagcgacctgcagcagatcctgagcctgctggagagcaacaaggacctgctgctgaccagcagctacctgagcgacagcggcagcaccggcgagcacaccaagagcctggtgacccagtacctgaacgccaccggcaacagatggtgcagctggagcctgagccaggccagactgctgaccagcttcctgcccgcccagctgctgagactgtaccagctgatgctgttcaccctgcccggcacccccgtgttcagctacggcgacgagatcggcctggacgccgccgccctgcccggccagcccatggaggcccccgtgatgctgtgggacgagagcagcttccccgacatccccggcgccgtgagcgccaacatgaccgtgaagggccagagcgaggaccccggcagcctgctgagcctgttcagaagactgagcgaccagagaagcaaggagagaagcctgctgcacggcgacttccacgccttcagcgccggccccggcctgttcagctacatcagacactgggaccagaacgagagattcctggtggtgctgaacttcggcgacgtgggcctgagcgccggcctgcaggccagcgacctgcccgccagcgccagcctgcccgccaaggccgacctgctgctgagcacccagcccggcagagaggagggcagccccctggagctggagagactgaagctggagccccacgagggcctgctgctgagattcccctacgccgcctag

SEQ ID NO: 99812 - DNA, 1536 bp, synthetic construct
  misc_feature 1..1536: note = Description of Artificial Sequence: Synthetic coding sequence
  source 1..1536: mol_type = other DNA
atgagccaggacaccgaggtggacatgaaggaggtggagctgaacgagctggagcccgagaagcagcccatgaacgccgccagcggcgccgccatgagcctggccggcgccgagaagaacggcctggtgaagatcaaggtggccgaggacgaggccgaggccgccgccgccgccaagttcaccggcctgagcaaggaggagctgctgttctggctgggctggctgggcatgctggccggcgccgtggtgatcatcgtgagagcccccagatgcagagagctgcccgcccagaagtggtggcacaccggcgccctgtacagaatcggcgacctgcaggccttccagggccacggcgccggcaacctggccggcctgaagggcagactggactacctgagcagcctgaaggtgaagggcctggtgctgggccccatccacaagaaccagaaggacgacgtggcccagaccgacctgctgcagatcgaccccaacttcggcagcaaggaggacttcgacagcctgctgcagagcgccaagaagaagagcatcagagtgatcctggacctgacccccaactacagaggcgagaacagctggttcagcacccaggtggacaccgtggccaccaaggtgaaggacgccctggagttctggctgcaggccggcgtggacggcttccaggtgagagacatcgagaacctgaaggacgccagcagcttcctggccgagtggcagaacatcaccaagggcttcagcgaggacagactgctgatcgccggcaccaacagcagcgacctgcagcagatcctgagcctgctggagagcaacaaggacctgctgctgaccagcagctacctgagcgacagcggcagcaccggcgagcacaccaagagcctggtgacccagtacctgaacgccaccggcaacagatggtgcagctggagcctgagccaggccagactgctgaccagcttcctgcccgcccagctgctgagactgtaccagctgatgctgttcaccctgcccggcacccccgtgttcagctacggcgacgagatcggcctggacgccgccgccctgcccggccagcccatggaggcccccgtgatgctgtgggacgagagcagcttccccgacatccccggcgccgtgagcgccaacatgaccgtgaagggccagagcgaggaccccggcagcctgctgagcctgttcagaagactgagcgaccagagaagcaaggagagaagcctgctgcacggcgacttccacgccttcagcgccggccccggcctgttcagctacatcagacactgggaccagaacgagagattcctggtggtgctgaacttcggcgacgtgggcctgagcgccggcctgcaggccagcgacctgcccgccagcgccagcctgcccgccaaggccgacctgctgctgagcacccagcccggcagagaggagggcagccccctggagctggagagactgaagctggagccccacgagggcctgctgctgagattcccctacgccgcctag

SEQ ID NO: 99813 - DNA, 408 bp, synthetic construct
  misc_feature 1..408: note = Description of Artificial Sequence: Synthetic coding sequence
  source 1..408: mol_type = other DNA
atgagccaggacaccgaggtggacatgaaggaggtggagctgaacgagctggagcccgagaagcagcccatgaacgccgccagcggcgccgccatgagcctggccggcgccgagaagaacggcctggtgaagatcaaggtggccgaggacgaggccgaggccgccgccgccgccaagttcaccggcctgagcaaggaggagctgctgaaggtggccggcagccccggctgggtgagaaccagatgggccctgctgctgctgttctggctgggctggctgggcatgctggccggcgccgtggtgatcatcgtgagagcccccagatgcagagagctgcccgcccagaagtggtggcacaccggcgccctgtacagaatcggcgacctgcaggccttccagggccactag

SEQ ID NO: 99814 - DNA, 2058 bp, synthetic construct
  misc_feature 1..2058: note = Description of Artificial Sequence: Synthetic coding sequence
  source 1..2058: mol_type = other DNA
atggccgaggacaagagcaagagagacagcatcgagatgagcatgaagggctgccagaccaacaacggcttcgtgcacaacgaggacatcctggagcagacccccgaccccggcagcagcaccgacaacctgaagcacagcaccagaggcatcctgggcagccaggagcccgacttcaagggcgtgcagccctacgccggcatgcccaaggaggtgctgttccagttcagcggccaggccagatacagaatccccagagagatcctgttctggctgaccgtggccagcgtgctggtgctgatcgccgccaccatcgccatcatcgccctgagccccaagtgcctggactggtggcaggagggccccatgtaccagatctaccccagaagcttcaaggacagcaacaaggacggcaacggcgacctgaagggcatccaggacaagctggactacatcaccgccctgaacatcaagaccgtgtggatcaccagcttctacaagagcagcctgaaggacttcagatacggcgtggaggacttcagagaggtggaccccatcttcggcaccatggaggacttcgagaacctggtggccgccatccacgacaagggcctgaagctgatcatcgacttcatccccaaccacaccagcgacaagcacatctggttccagctgagcagaaccagaaccggcaagtacaccgactactacatctggcacgactgcacccacgagaacggcaagaccatcccccccaacaactggctgagcgtgtacggcaacagcagctggcacttcgacgaggtgagaaaccagtgctacttccaccagttcatgaaggagcagcccgacctgaacttcagaaaccccgacgtgcaggaggagatcaaggagatcctgagattctggctgaccaagggcgtggacggcttcagcctggacgccgtgaagttcctgctggaggccaagcacctgagagacgagatccaggtgaacaagacccagatccccgacaccgtgacccagtacagcgagctgtaccacgacttcaccaccacccaggtgggcatgcacgacatcgtgagaagcttcagacagaccatggaccagtacagcaccgagcccggcagatacagattcatgggcaccgaggcctacgccgagagcatcgacagaaccgtgatgtactacggcctgcccttcatccaggaggccgacttccccttcaacaactacctgagcatgctggacaccgtgagcggcaacagcgtgtacgaggtgatcaccagctggatggagaacatgcccgagggcaagtggcccaactggatgatcggcggccccgacagcagcagactgaccagcagactgggcaaccagtacgtgaacgtgatgaacatgctgctgttcaccctgcccggcacccccatcacctactacggcgaggagatcggcatgggcaacatcgtggccgccaacctgaacgagagctacgacatcaacaccctgagaagcaagagccccatgcagtgggacaacagcagcaacgccggcttcagcgaggccagcaacacctggctgcccaccaacagcgactaccacaccgtgaacgtggacgtgcagaagacccagcccagaagcgccctgaagctgtaccaggacctgagcctgctgcacgccaacgagctgctgctgaacagaggctggttctgccacctgagaaacgacagccactacgtggtgtacaccagagagctggacggcatcgacagaatcttcatcgtggtgctgaacttcggcgagagcaccctgctgaacctgcacaacatgatcagcggcctgcccgccaagatgagaatcagactgagcaccaacagcgccgacaagggcagcaaggtggacaccagcggcatcttcctggacaagggcgagggcctgatcttcgagcacaacaccaagaacctgctgcacagacagaccgccttcagagacagatgcttcgtgagcaacagagcctgctacagcagcgtgctgaacatcctgtacaccagctgctag

SEQ ID NO: 99815 - DNA, 1866 bp, synthetic construct
  misc_feature 1..1866: note = Description of Artificial Sequence: Synthetic coding sequence
  source 1..1866: mol_type = other DNA
atgaagaccttctggagcagacccagaatccagttcagcggccaggccagatacagaatccccagagagatcctgttctggctgaccgtggccagcgtgctggtgctgatcgccgccaccatcgccatcatcgccctgagccccaagtgcctggactggtggcaggagggccccatgtaccagatctaccccagaagcttcaaggacagcaacaaggacggcaacggcgacctgaagggcatccaggacaagctggactacatcaccgccctgaacatcaagaccgtgtggatcaccagcttctacaagagcagcctgaaggacttcagatacggcgtggaggacttcagagaggtggaccccatcttcggcaccatggaggacttcgagaacctggtggccgccatccacgacaagggcctgaagctgatcatcgacttcatccccaaccacaccagcgacaagcacatctggttccagctgagcagaaccagaaccggcaagtacaccgactactacatctggcacgactgcacccacgagaacggcaagaccatcccccccaacaactggctgagcgtgtacggcaacagcagctggcacttcgacgaggtgagaaaccagtgctacttccaccagttcatgaaggagcagcccgacctgaacttcagaaaccccgacgtgcaggaggagatcaaggagatcctgagattctggctgaccaagggcgtggacggcttcagcctggacgccgtgaagttcctgctggaggccaagcacctgagagacgagatccaggtgaacaagacccagatccccgacaccgtgacccagtacagcgagctgtaccacgacttcaccaccacccaggtgggcatgcacgacatcgtgagaagcttcagacagaccatggaccagtacagcaccgagcccggcagatacagattcatgggcaccgaggcctacgccgagagcatcgacagaaccgtgatgtactacggcctgcccttcatccaggaggccgacttccccttcaacaactacctgagcatgctggacaccgtgagcggcaacagcgtgtacgaggtgatcaccagctggatggagaacatgcccgagggcaagtggcccaactggatgatcggcggccccgacagcagcagactgaccagcagactgggcaaccagtacgtgaacgtgatgaacatgctgctgttcaccctgcccggcacccccatcacctactacggcgaggagatcggcatgggcaacatcgtggccgccaacctgaacgagagctacgacatcaacaccctgagaagcaagagccccatgcagtgggacaacagcagcaacgccggcttcagcgaggccagcaacacctggctgcccaccaacagcgactaccacaccgtgaacgtggacgtgcagaagacccagcccagaagcgccctgaagctgtaccaggacctgagcctgctgcacgccaacgagctgctgctgaacagaggctggttctgccacctgagaaacgacagccactacgtggtgtacaccagagagctggacggcatcgacagaatcttcatcgtggtgctgaacttcggcgagagcaccctgctgaacctgcacaacatgatcagcggcctgcccgccaagatgagaatcagactgagcaccaacagcgccgacaagggcagcaaggtggacaccagcggcatcttcctggacaagggcgagggcctgatcttcgagcacaacaccaagaacctgctgcacagacagaccgccttcagagacagatgcttcgtgagcaacagagcctgctacagcagcgtgctgaacatcctgtacaccagctgctag

SEQ ID NO: 99816 - DNA, 1656 bp, synthetic construct
  misc_feature 1..1656: note = Description of Artificial Sequence: Synthetic coding sequence
  source 1..1656: mol_type = other DNA
atggccgaggacaagagcaagagagacagcatcgagatgagcatgaagggctgccagaccaacaacggcttcgtgcacaacgaggacatcctggagcagacccccgaccccggcagcagcaccgacaacctgaagcacagcaccagaggcatcctgggcagccaggagcccgacttcaagggcgtgcagccctacgccggcatgcccaaggaggtgctgttccagttcagcggccaggccagatacagaatccccagagagatcctgttctggctgaccgtggccagcgtgctggtgctgatcgccgccaccatcgccatcatcgccctgagccccaagtgcctggactggtggcaggagggccccatgtaccagatctaccccagaagcttcaaggacagcaacaaggacggcaacggcgacctgaagggcatccaggacaagctggactacatcaccgccctgaacatcaagaccgtgtggatcaccagcttctacaagagcagcctgaaggacttcagatacggcgtggaggacttcagagaggtggaccccatcttcggcaccatggaggacttcgagaacctggtggccgccatccacgacaagggcctgaagctgatcatcgacttcatccccaaccacaccagcgacaagcacatctggttccagctgagcagaaccagaaccggcaagtacaccgactactacatctggcacgactgcacccacgagaacggcaagaccatcccccccaacaactggctgagcgtgtacggcaacagcagctggcacttcgacgaggtgagaaaccagtgctacttccaccagttcatgaaggagcagcccgacctgaacttcagaaaccccgacgtgcaggaggagatcaaggagatcctgagattctggctgaccaagggcgtggacggcttcagcctggacgccgtgaagttcctgctggaggccaagcacctgagagacgagatccaggtgaacaagacccagatccccgacaccgtgacccagtacagcgagctgtaccacgacttcaccaccacccaggtgggcatgcacgacatcgtgagaagcttcagacagaccatggaccagtacagcaccgagcccggcagatacagattcatgggcaccgaggcctacgccgagagcatcgacagaaccgtgatgtactacggcctgcccttcatccaggaggccgacttccccttcaacaactacctgagcatgctggacaccgtgagcggcaacagcgtgtacgaggtgatcaccagctggatggagaacatgcccgagggcaagtggcccaactggatgatcggcggccccgacagcagcagactgaccagcagactgggcaaccagtacgtgaacgtgatgaacatgctgctgttcaccctgcccggcacccccatcacctactacggcgaggagatcggcatgggcaacatcgtggccgccaacctgaacgagagctacgacatcaacaccctgagaagcaagagccccatgcagtgggacaacagcagcaacgccggcttcagcgaggccagcaacacctggctgcccaccaacagcgactaccacaccgtgaacgtggacgtgctgctgagacacccctgcagcagcgccgtggcctag

SEQ ID NO: 99817 - DNA, 1524 bp, synthetic construct
  misc_feature 1..1524: note = Description of Artificial Sequence: Synthetic coding sequence
  source 1..1524: mol_type = other DNA
atgggctgctggggcagaaacagaggcagactgctgtgcatgctggccctgaccttcatgttcatggtgctggaggtggtggtgagcagagtgaccagcagcctggccatgctgagcgacagcttccacatgctgagcgacgtgctggccctggtggtggccctggtggccgagagattcgccagaagaacccacgccacccagaagaacaccttcggctggatcagagccgaggtgatgggcgccctggtgaacgccatcttcctgaccggcctgtgcttcgccatcctgctggaggccatcgagagattcatcgagccccacgagatgcagcagcccctggtggtgctgggcgtgggcgtggccggcctgctggtgaacgtgctgggcctgtgcctgttccaccaccacagcggcttcagccaggacagcggccacggccacagccacggcggccacggccacggccacggcctgcccaagggccccagagtgaagagcaccagacccggcagcagcgacatcaacgtggcccccggcgagcagggccccgaccaggaggagaccaacaccctggtggccaacaccagcaacagcaacggcctgaagctggaccccgccgaccccgagaaccccagaagcggcgacaccgtggaggtgcaggtgaacggcaacctggtgagagagcccgaccacatggagctggaggaggacagagccggccagctgaacatgagaggcgtgttcctgcacgtgctgggcgacgccctgggcagcgtgatcgtggtggtgaacgccctggtgttctacttcagctggaagggctgcagcgagggcgacttctgcgtgaacccctgcttccccgacccctgcaaggccttcgtggagatcatcaacagcacccacgccagcgtgtacgaggccggcccctgctgggtgctgtacctggaccccaccctgtgcgtggtgatggtgtgcatcctgctgtacaccacctaccccctgctgaaggagagcgccctgatcctgctgcagaccgtgcccaagcagatcgacatcagaaacctgatcaaggagctgagaaacgtggagggcgtggaggaggtgcacgagctgcacgtgtggcagctggccggcagcagaatcatcgccaccgcccacatcaagtgcgaggaccccaccagctacatggaggtggccaagaccatcaaggacgtgttccacaaccacggcatccacgccaccaccatccagcccgagttcgccagcgtgggcagcaagagcagcgtggtgccctgcgagctggcctgcagaacccagtgcgccctgaagcagtgctgcggcaccctgccccaggcccccagcggcaaggacgccgagaagacccccgccgtgagcatcagctgcctggagctgagcaacaacctggagaagaagcccagaagaaccaaggccgagaacatccccgccgtggtgatcgagatcaagaacatgcccaacaagcagcccgagagcagcctgtag

SEQ ID NO: 99818 - DNA, 1119 bp, synthetic construct
  misc_feature 1..1119: note = Description of Artificial Sequence: Synthetic coding sequence
  source 1..1119: mol_type = other DNA
atggaggccaaggagaagcagcacctgctggacgccagacccgccatcagaagctacaccggcagcctgtggcaggagggcgccggctggatccccctgcccagacccggcctggacctgcaggccatcgagctggccgcccagagcaaccaccactgccacgcccagaagggccccgacagccactgcgaccccaagaagggcaaggcccagagacagctgtacgtggccagcgccatctgcctgctgttcatgatcggcgaggtggtgggcggctacctggcccacagcctggccgtgatgaccgacgccgcccacctgctgaccgacttcgccagcatgctgatcagcctgttcagcctgtggatgagcagcagacccgccaccaagaccatgaacttcggctggcagagagccgagatcctgggcgccctggtgagcgtgctgagcatctgggtggtgaccggcgtgctggtgtacctggccgtggagagactgatcagcggcgactacgagatcgacggcggcaccatgctgatcaccagcggctgcgccgtggccgtgaacatcatcatgggcctgaccctgcaccagagcggccacggccacagccacggcaccaccaaccagcaggaggagaaccccagcgtgagagccgccttcatccacgtgatcggcgacttcatgcagagcatgggcgtgctggtggccgcctacatcctgtacttcaagcccgagtacaagtacgtggaccccatctgcaccttcgtgttcagcatcctggtgctgggcaccaccctgaccatcctgagagacgtgatcctggtgctgatggagggcacccccaagggcgtggacttcaccgccgtgagagacctgctgctgagcgtggagggcgtggaggccctgcacagcctgcacatctgggccctgaccgtggcccagcccgtgctgagcgtgcacatcgccatcgcccagaacaccgacgcccaggccgtgctgaagaccgccagcagcagactgcagggcaagttccacttccacaccgtgaccatccagatcgaggactacagcgaggacatgaaggactgccaggcctgccagggccccagcgactag

SEQ ID NO: 99819 - DNA, 972 bp, synthetic construct
  misc_feature 1..972: note = Description of Artificial Sequence: Synthetic coding sequence
  source 1..972: mol_type = other DNA
atggaggccaaggagaagcagcacctgctggacgccagacccgccatcagaagctacaccggcagcctgtggcaggagggcgccggctggatccccctgcccagacccggcctggacctgcaggccatcgagctggccgcccagagcaaccaccactgccacgcccagaagggccccgacagccactgcgaccccaagaagggcaaggcccagagacagctgtacgtggccagcgccatctgcctgctgttcatgatcggcgaggtggtggagatcctgggcgccctggtgagcgtgctgagcatctgggtggtgaccggcgtgctggtgtacctggccgtggagagactgatcagcggcgactacgagatcgacggcggcaccatgctgatcaccagcggctgcgccgtggccgtgaacatcatcatgggcctgaccctgcaccagagcggccacggccacagccacggcaccaccaaccagcaggaggagaaccccagcgtgagagccgccttcatccacgtgatcggcgacttcatgcagagcatgggcgtgctggtggccgcctacatcctgtacttcaagcccgagtacaagtacgtggaccccatctgcaccttcgtgttcagcatcctggtgctgggcaccaccctgaccatcctgagagacgtgatcctggtgctgatggagggcacccccaagggcgtggacttcaccgccgtgagagacctgctgctgagcgtggagggcgtggaggccctgcacagcctgcacatctgggccctgaccgtggcccagcccgtgctgagcgtgcacatcgccatcgcccagaacaccgacgcccaggccgtgctgaagaccgccagcagcagactgcagggcaagttccacttccacaccgtgaccatccagatcgaggactacagcgaggacatgaaggactgccaggcctgccagggccccagcgactag

SEQ ID NO: 99820 - DNA, 345 bp, synthetic construct
  misc_feature 1..345: note = Description of Artificial Sequence: Synthetic coding sequence
  source 1..345: mol_type = other DNA
atgggccccagaagaagaagcagaaagcccgaggcccccagaagaagaagccccagccccacccccacccccggccccagcagaagaggccccagcctgggcgccagcagccaccagcacagcagaagaagacagggctggctgaaggagatcagaaagctgcagaagagcacccacctgctgatcagaaagctgcccttcagcagactggccgccgaggccttcctggtgcacctgttcgaggacgcctacctgctgaccctgcacgccggcagagtgaccctgttccccaaggacgtgcagctggccagaagaatcagaggcctggaggagggcctgggctag

SEQ ID NO: 99821 - DNA, 300 bp, synthetic construct
  misc_feature 1..300: note = Description of Artificial Sequence: Synthetic coding sequence
  source 1..300: mol_type = other DNA
atgcccttccaccactgccacagagaccccctgcccccccccggcctgacccccgagagactgcacgccagaagacagctgtacgccgcctgcgccgtgtgcttcgtgttcatggccggcgaggtggtgggcggctacctggcccacagcctggccatcatgaccgacgccgcccacctgctggccgacgtgggcagcatgatgggcagcctgttcagcctgtggctgagcaccagacccgccaccagaaccatgaccttcggctggcacagaagcgagaccctgggcgccctggcctag

SEQ ID NO: 99822 - DNA, 723 bp, synthetic construct
  misc_feature 1..723: note = Description of Artificial Sequence: Synthetic coding sequence
  source 1..723: mol_type = other DNA
atgcccttccaccactgccacagagaccccctgcccccccccggcctgacccccgagagactgcacgccagaagacagctgtacgccgcctgcgccgtgtgcttcgtgttcatggccggcgaggtggtgggcggctacctggcccacagcctggccatcatgaccgacgccgcccacctgctggccgacgtgggcagcatgatgggcagcctgttcagcctgtggctgagcaccagacccgccaccagaaccatgaccttcggctggcacagaagcgagaccctgggcgccctggccagcgtggtgagcctgtggatggtgaccggcatcctgctgtacctggccttcgtgagactgctgcacagcgactaccacatcgagggcggcgccatgctgctgaccgccagcatcgccgtgtgcgccaacctgctgatggccttcgtgctgcaccaggccggccccccccacagccacggcagcagaggcgccgagtacgcccccctggaggagggccccgaggagcccctgcccctgggcaacaccagcgtgagagccgccttcgtgcacgtgctgggcgacctgctgcagagcttcggcgtgctggccgccagcatcctgatctacttcaagccccagtacaaggccgccgaccccatcagcaccttcctgttcagcatctgcgccctgggcagcaccgcccccaccctgagagacgtgctgtag

SEQ ID NO: 99823 - DNA, 1152 bp, synthetic construct
  misc_feature 1..1152: note = Description of Artificial Sequence: Synthetic coding sequence
  source 1..1152: mol_type = other DNA
atgagagtggccgccggcgccagaggcgagaacatcgagcacctgaagctgagactggaggccagaccccccaccctgctgctgttcaccgagcccagcgagcccctgcccgaggagagcaagcccgtggagatgcccttccaccactgccacagagaccccctgcccccccccggcctgacccccgagagactgcacgccagaagacagctgtacgccgcctgcgccgtgtgcttcgtgttcatggccggcgaggtggtgggcggctacctggcccacagcctggccatcatgaccgacgccgcccacctgctggccgacgtgggcagcatgatgggcagcctgttcagcctgtggctgagcaccagacccgccaccagaaccatgaccttcggctggcacagaagcgagaccctgggcgccctggccagcgtggtgagcctgtggatggtgaccggcatcctgctgtacctggccttcgtgagactgctgcacagcgactaccacatcgagggcggcgccatgctgctgaccgccagcatcgccgtgtgcgccaacctgctgatggccttcgtgctgcaccaggccggccccccccacagccacggcagcagaggcgccgagtacgcccccctggaggagggccccgaggagcccctgcccctgggcaacaccagcgtgagagccgccttcgtgcacgtgctgggcgacctgctgcagagcttcggcgtgctggccgccagcatcctgatctacttcaagccccagtacaaggccgccgaccccatcagcaccttcctgttcagcatctgcgccctgggcagcaccgcccccaccctgagagacgtgctgagaatcctgatggagggcacccccagaaacgtgggcttcgagcccgtgagagacaccctgctgagcgtgcccggcgtgagagccacccacgagctgcacctgtgggccctgaccctgacctaccacgtggccagcgcccacctggccatcgacagcaccgccgaccccgaggccgtgctggccgaggccagcagcagactgtacagcagattcggcttcagcagctgcaccctgcaggtggagcagtaccagcccgagatggcccagtgcctgagatgccaggagcccccccaggcctag

SEQ ID NO: 99824 - DNA, 336 bp, synthetic construct
  misc_feature 1..336: note = Description of Artificial Sequence: Synthetic coding sequence
  source 1..336: mol_type = other DNA
atgcccttccaccactgccacagagaccccctgcccccccccggcctgacccccgagagactgcacgccagaagacagctgtacgccgcctgcgccgtgtgcttcgtgttcatggccggcgaggtggtgggcggctacctggcccacagcctggccatcatgaccgacgccgcccacctgctggccgacgtgggcagcatgatgggcagcctgttcagcctgtggctgagcaccagacccgccaccagaaccatgaccttcggctggcacagaagcgagaccctgggcgccctggccagcgtggtgagcctgtggatggtgaccggcatcctgtag

SEQ ID NO: 99825 - DNA, 1290 bp, synthetic construct
  misc_feature 1..1290: note = Description of Artificial Sequence: Synthetic coding sequence
  source 1..1290: mol_type = other DNA
atggccggcagcggcgcctggaagagactgaagagcatgctgagaaaggacgacgcccccctgttcctgaacgacaccagcgccttcgacttcagcgacgaggccggcgacgagggcctgagcagattcaacaagctgagagtggtggtggccgacgacggcagcgaggcccccgagagacccgtgaacggcgcccaccccaccctgcaggccgacgacgacagcctgctggaccaggacctgcccctgaccaacagccagctgagcctgaaggtggacagctgcgacaactgcagcaagcagagagagatcctgaagcagagaaaggtgaaggccagactgaccatcgccgccgtgctgtacctgctgttcatgatcggcgagctggtgggcggctacatcgccaacagcctggccatcatgaccgacgccctgcacatgctgaccgacctgagcgccatcatcctgaccctgctggccctgtggctgagcagcaagagccccaccaagagattcaccttcggcttccacagactggaggtgctgagcgccatgatcagcgtgctgctggtgtacatcctgatgggcttcctgctgtacgaggccgtgcagagaaccatccacatgaactacgagatcaacggcgacatcatgctgatcaccgccgccgtgggcgtggccgtgaacgtgatcatgggcttcctgctgaaccagagcggccacagacacagccacagccacagcctgcccagcaacagccccaccagaggcagcggctgcgagagaaaccacggccaggacagcctggccgtgagagccgccttcgtgcacgccctgggcgacctggtgcagagcgtgggcgtgctgatcgccgcctacatcatcagattcaagcccgagtacaagatcgccgaccccatctgcacctacgtgttcagcctgctggtggccttcaccaccttcagaatcatctgggacaccgtggtgatcatcctggagggcgtgcccagccacctgaacgtggactacatcaaggaggccctgatgaagatcgaggacgtgtacagcgtggaggacctgaacatctggagcctgaccagcggcaagagcaccgccatcgtgcacatccagctgatccccggcagcagcagcaagtgggaggaggtgcagagcaaggccaaccacctgctgctgaacaccttcggcatgtacagatgcaccatccagctgcagagctacagacaggaggtggacagaacctgcgccaactgccagagcagcagcccctag

SEQ ID NO: 99826 - DNA, 357 bp, synthetic construct
  misc_feature 1..357: note = Description of Artificial Sequence: Synthetic coding sequence
  source 1..357: mol_type = other DNA
atggaggagaagtacggcggcgacgtgctggccggccccggcggcggcggcggcctgggccccgtggacgtgcccagcgccagactgaccaagtacatcgtgctgctgtgcttcaccaagttcctgaaggccgtgggcctgttcgagagctacgacctgctgaaggccgtgcacatcgtgcagttcatcttcatcctgaagctgggcaccgccttcttcatggtgctgttccagaagcccttcagcagcggcaagaccatcaccaagcaccagatcatcggcagcctgaagatccccggcagaaaggagttcaaggacaagaagctgaacgaccccagaaagctggtgggcaactag

SEQ ID NO: 99827 - DNA, 2298 bp, synthetic construct
  misc_feature 1..2298: note = Description of Artificial Sequence: Synthetic coding sequence
  source 1..2298: mol_type = other DNA
atggaggagaagtacggcggcgacgtgctggccggccccggcggcggcggcggcctgggccccgtggacgtgcccagcgccagactgaccaagtacatcgtgctgctgtgcttcaccaagttcctgaaggccgtgggcctgttcgagagctacgacctgctgaaggccgtgcacatcgtgcagttcatcttcatcctgaagctgggcaccgccttcttcatggtgctgttccagaagcccttcagcagcggcaagaccatcaccaagcaccagtggatcaagatcttcaagcacgccgtggccggctgcatcatcagcctgctgtggttcttcggcctgaccctgtgcggccccctgagaaccctgctgctgttcgagcacagcgacatcgtggtgatcagcctgctgagcgtgctgttcaccagcagcggcggcggccccgccaagaccagaggcgccgccttcttcatcatcgccgtgatctgcctgctgctgttcgacaacgacgacctgatggccaagatggccgagcaccccgagggccaccacgacagcgccctgacccacatgctgtacaccgccatcgccttcctgggcgtggccgaccacaagggcggcgtgctgctgctggtgctggccctgtgctgcaaggtgggcttccacaccgccagcagaaagctgagcgtggacgtgggcggcgccaagagactgcaggccctgagccacctggtgagcgtgctgctgctgtgcccctgggtgatcgtgctgagcgtgaccaccgagagcaaggtggagagctggttcagcctgatcatgcccttcgccaccgtgatcttcttcgtgatgatcctggacttctacgtggacagcatctgcagcgtgaagatggaggtgagcaagtgcgccagatacggcagcttccccatcttcatcagcgccctgctgttcggcaacttctggacccaccccatcaccgaccagctgagagccatgaacaaggccgcccaccaggagagcaccgagcacgtgctgagcggcggcgtggtggtgagcgccatcttcttcatcctgagcgccaacatcctgagcagccccagcaagagaggccagaagggcaccctgatcggctacagccccgagggcacccccctgtacaacttcatgggcgacgccttccagcacagcagccagagcatccccagattcatcaaggagagcctgaagcagatcctggaggagagcgacagcagacagatcttctacttcctgtgcctgaacctgctgttcaccttcgtggagctgttctacggcgtgctgaccaacagcctgggcctgatcagcgacggcttccacatgctgttcgactgcagcgccctggtgatgggcctgttcgccgccctgatgagcagatggaaggccaccagaatcttcagctacggctacggcagaatcgagatcctgagcggcttcatcaacggcctgttcctgatcgtgatcgccttcttcgtgttcatggagagcgtggccagactgatcgacccccccgagctggacacccacatgctgacccccgtgagcgtgggcggcctgatcgtgaacctgatcggcatctgcgccttcagccacgcccacagccacgcccacggcgccagccagggcagctgccacagcagcgaccacagccacagccaccacatgcacggccacagcgaccacggccacggccacagccacggcagcgccggcggcggcatgaacgccaacatgagaggcgtgttcctgcacgtgctggccgacaccctgggcagcatcggcgtgatcgtgagcaccgtgctgatcgagcagttcggctggttcatcgccgaccccctgtgcagcctgttcatcgccatcctgatcttcctgagcgtggtgcccctgatcaaggacgcctgccaggtgctgctgctgagactgccccccgagtacgagaaggagctgcacatcgccctggagaagatccagaagatcgagggcctgatcagctacagagacccccacttctggagacacagcgccagcatcgtggccggcaccatccacatccaggtgaccagcgacgtgctggagcagagaatcgtgcagcaggtgaccggcatcctgaaggacgccggcgtgaacaacctgaccatccaggtggagaaggaggcctacttccagcacatgagcggcctgagcaccggcttccacgacgtgctggccatgaccaagcagatggagagcatgaagtactgcaaggacggcacctacatcatgtag

SEQ ID NO: 99828 - DNA, 1083 bp, synthetic construct
  misc_feature 1..1083: note = Description of Artificial Sequence: Synthetic coding sequence
  source 1..1083: mol_type = other DNA
atgggcgacgccttccagcacagcagccagagcatccccagattcatcaaggagagcctgaagcagatcctggaggagagcgacagcagacagatcttctacttcctgtgcctgaacctgctgttcaccttcgtggagctgttctacggcgtgctgaccaacagcctgggcctgatcagcgacggcttccacatgctgttcgactgcagcgccctggtgatgggcctgttcgccgccctgatgagcagatggaaggccaccagaatcttcagctacggctacggcagaatcgagatcctgagcggcttcatcaacggcctgttcctgatcgtgatcgccttcttcgtgttcatggagagcgtggccagactgatcgacccccccgagctggacacccacatgctgaccccctgccacagccacgcccacggcgccagccagggcagctgccacagcagcgaccacagccacagccaccacatgcacggccacagcgaccacggccacggccacagccacggcagcgccggcggcggcatgaacgccaacatgagaggcgtgttcctgcacgtgctggccgacaccctgggcagcatcggcgtgatcgtgagcaccgtgctgatcgagcagttcggctggttcatcgccgaccccctgtgcagcctgttcatcgccatcctgatcttcctgagcgtggtgcccctgatcaaggacgcctgccaggtgctgctgctgagactgccccccgagtacgagaaggagctgcacatcgccctggagaagatccagaagatcgagggcctgatcagctacagagacccccacttctggagacacagcgccagcatcgtggccggcaccatccacatccaggtgaccagcgacgtgctggagcagagaatcgtgcagcaggtgaccggcatcctgaaggacgccggcgtgaacaacctgaccatccaggtggagaaggaggcctacttccagcacatgagcggcctgagcaccggcttccacgacgtgctggccatgaccaagcagatggagagcatgaagtactgcaaggacggcacctacatcatgtag

SEQ ID NO: 99829 - DNA, 1386 bp, synthetic construct
  misc_feature 1..1386: note = Description of Artificial Sequence: Synthetic coding sequence
  source 1..1386: mol_type = other DNA
atgggcaccatccacctgttcagaaagccccagagaagcttcttcggcaagctgctgagagagttcagactggtggccgccgacagaagaagctggaagatcctgctgttcggcgtgatcaacctgatctgcaccggcttcctgctgatgtggtgcagcagcaccaacagcatcgccctgaccgcctacacctacctgaccatcttcgacctgttcagcctgatgacctgcctgatcagctactgggtgaccctgagaaagcccagccccgtgtacagcttcggcttcgagagactggaggtgctggccgtgttcgccagcaccgtgctggcccagctgggcgccctgttcatcctgaaggagagcgccgagagattcctggagcagcccgagatccacaccggcagactgctggtgggcaccttcgtggccctgtgcttcaacctgttcaccatgctgagcatcagaaacaagcccttcgcctacgtgagcgaggccgccagcaccagctggctgcaggagcacgtggccgacctgagcagaagcctgtgcggcatcatccccggcctgagcagcatcttcctgcccagaatgaaccccttcgtgctgatcgacctggccggcgccttcgccctgtgcatcacctacatgctgatcgagatcaacaactacttcgccgtggacaccgccagcgccatcgccatcgccctgatgaccttcggcaccatgtaccccatgagcgtgtacagcggcaaggtgctgctgcagaccacccccccccacgtgatcggccagctggacaagctgatcagagaggtgagcaccctggacggcgtgctggaggtgagaaacgagcacttctggaccctgggcttcggcagcctggccggcagcgtgcacgtgagaatcagaagagacgccaacgagcagatggtgctggcccacgtgaccaacagactgtacaccctggtgagcaccctgaccgtgcagatcttcaaggacgactggatcagacccgccctgctgagcggccccgtggccgccaacgtgctgaacttcagcgaccaccacgtgatccccatgcccctgctgaagggcaccgacgacctgaaccccgtgaccagcacccccgccaagcccagcagccccccccccgagttcagcttcaacacccccggcaagaacgtgaaccccgtgatcctgctgaacacccagaccagaccctacggcttcggcctgaaccacggccacaccccctacagcagcatgctgaaccagggcctgggcgtgcccggcatcggcgccacccagggcctgagaaccggcttcaccaacatccccagcagatacggcaccaacaacagaatcggccagcccagaccctag

SEQ ID NO: 99830 - DNA, 795 bp, synthetic construct
  misc_feature 1..795: note = Description of Artificial Sequence: Synthetic coding sequence
  source 1..795: mol_type = other DNA
atgaaccccttcgtgctgatcgacctggccggcgccttcgccctgtgcatcacctacatgctgatcgagatcaacaactacttcgccgtggacaccgccagcgccatcgccatcgccctgatgaccttcggcaccatgtaccccatgagcgtgtacagcggcaaggtgctgctgcagaccacccccccccacgtgatcggccagctggacaagctgatcagagaggtgagcaccctggacggcgtgctggaggtgagaaacgagcacttctggaccctgggcttcggcagcctggccggcagcgtgcacgtgagaatcagaagagacgccaacgagcagatggtgctggcccacgtgaccaacagactgtacaccctggtgagcaccctgaccgtgcagatcttcaaggacgactggatcagacccgccctgctgagcggccccgtggccgccaacgtgctgaacttcagcgaccaccacgtgatccccatgcccctgctgaagggcaccgacgacctgaaccccgtgaccagcacccccgccaagcccagcagccccccccccgagttcagcttcaacacccccggcaagaacgtgaaccccgtgatcctgctgaacacccagaccagaccctacggcttcggcctgaaccacggccacaccccctacagcagcatgctgaaccagggcctgggcgtgcccggcatcggcgccacccagggcctgagaaccggcttcaccaacatccccagcagatacggcaccaacaacagaatcggccagcccagaccctag

SEQ ID NO: 99831 - DNA, 1506 bp, synthetic construct
  misc_feature 1..1506: note = Description of Artificial Sequence: Synthetic coding sequence
  source 1..1506: mol_type = other DNA
atgggcaccatccacctgttcagaaagccccagagaagcttcttcggcaagctgctgagagagttcagactggtggccgccgacagaagaagctggaagatcctgctgttcggcgtgatcaacctgatctgcaccggcttcctgctgatgtggtgcagcagcaccaacagcatcgccctgaccgcctacacctacctgaccatcttcgacctgttcagagacggcgtgagccccttctggctgggctggagccagacccccgacctgaagtggagcacccacctgggcctgcccaagtgctgggacaacagaagagagctgccctgcctgagcaacagcctgatgacctgcctgatcagctactgggtgaccctgagaaagcccagccccgtgtacagcttcggcttcgagagactggaggtgctggccgtgttcgccagcaccgtgctggcccagctgggcgccctgttcatcctgaaggagagcgccgagagattcctggagcagcccgagatccacaccggcagactgctggtgggcaccttcgtggccctgtgcttcaacctgttcaccatgctgagcatcagaaacaagcccttcgcctacgtgagcgaggccgccagcaccagctggctgcaggagcacgtggccgacctgagcagaagcctgtgcggcatcatccccggcctgagcagcatcttcctgcccagaatgaaccccttcgtgctgatcgacctggccggcgccttcgccctgtgcatcacctacatgctgatcgagatcaacaactacttcgccgtggacaccgccagcgccatcgccatcgccctgatgaccttcggcaccatgtaccccatgagcgtgtacagcggcaaggtgctgctgcagaccacccccccccacgtgatcggccagctggacaagctgatcagagaggtgagcaccctggacggcgtgctggaggtgagaaacgagcacttctggaccctgggcttcggcagcctggccggcagcgtgcacgtgagaatcagaagagacgccaacgagcagatggtgctggcccacgtgaccaacagactgtacaccctggtgagcaccctgaccgtgcagatcttcaaggacgactggatcagacccgccctgctgagcggccccgtggccgccaacgtgctgaacttcagcgaccaccacgtgatccccatgcccctgctgaagggcaccgacgacctgaaccccgtgaccagcacccccgccaagcccagcagccccccccccgagttcagcttcaacacccccggcaagaacgtgaaccccgtgatcctgctgaacacccagaccagaccctacggcttcggcctgaaccacggccacaccccctacagcagcatgctgaaccagggcctgggcgtgcccggcatcggcgccacccagggcctgagaaccggcttcaccaacatccccagcagatacggcaccaacaacagaatcggccagcccagaccctag

SEQ ID NO: 99832 - DNA, 1164 bp, synthetic construct
  misc_feature 1..1164: note = Description of Artificial Sequence: Synthetic coding sequence
  source 1..1164: mol_type = other DNA
atgacctgcctgatcagctactgggtgaccctgagaaagcccagccccgtgtacagcttcggcttcgagagactggaggtgctggccgtgttcgccagcaccgtgctggcccagctgggcgccctgttcatcctgaaggagagcgccgagagattcctggagcagcccgagatccacaccggcagactgctggtgggcaccttcgtggccctgtgcttcaacctgttcaccatgctgagcatcagaaacaagcccttcgcctacgtgagcgaggccgccagcaccagctggctgcaggagcacgtggccgacctgagcagaagcctgtgcggcatcatccccggcctgagcagcatcttcctgcccagaatgaaccccttcgtgctgatcgacctggccggcgccttcgccctgtgcatcacctacatgctgatcgagatcaacaactacttcgccgtggacaccgccagcgccatcgccatcgccctgatgaccttcggcaccatgtaccccatgagcgtgtacagcggcaaggtgctgctgcagaccacccccccccacgtgatcggccagctggacaagctgatcagagaggtgagcaccctggacggcgtgctggaggtgagaaacgagcacttctggaccctgggcttcggcagcctggccggcagcgtgcacgtgagaatcagaagagacgccaacgagcagatggtgctggcccacgtgaccaacagactgtacaccctggtgagcaccctgaccgtgcagatcttcaaggacgactggatcagacccgccctgctgagcggccccgtggccgccaacgtgctgaacttcagcgaccaccacgtgatccccatgcccctgctgaagggcaccgacgacctgaaccccgtgaccagcacccccgccaagcccagcagccccccccccgagttcagcttcaacacccccggcaagaacgtgaaccccgtgatcctgctgaacacccagaccagaccctacggcttcggcctgaaccacggccacaccccctacagcagcatgctgaaccagggcctgggcgtgcccggcatcggcgccacccagggcctgagaaccggcttcaccaacatccccagcagatacggcaccaacaacagaatcggccagcccagaccctag

SEQ ID NO: 99833 - DNA, 1317 bp, synthetic construct
  misc_feature 1..1317: note = Description of Artificial Sequence: Synthetic coding sequence
  source 1..1317: mol_type = other DNA
atgggcaccatccacctgttcagaaagccccagagaagcttcttcggcaagctgctgagagagttcagactggtggccgccgacagaagaagctggaagatcctgctgttcggcgtgatcaacctgatctgcaccggcttcctgctgatgtggtgcagcagcaccaacagcatcgccctgaccgcctacacctacctgaccatcttcgacctgttcagcctgatgacctgcctgatcagctactgggtgaccctgagaaagcccagccccgtgtacagcttcggcttcgagagactggaggtgctggccgtgttcgccagcaccgtgctggcccagctgggcgccctgttcatcctgaaggagagcgccgagagattcctggagcagcccgagatccacaccggcagactgctggtgggcaccttcgtggccctgtgcttcaacctgttcaccatgctgagcatcagaaacaagcccttcgcctacgtgagcgaggccgccagcaccagctggctgcaggagcacgtggccgacctgagcagaagcctgtgcggcatcatccccggcctgagcagcatcttcctgcccagaatgaaccccttcgtgctgatcgacctggccggcgccttcgccctgtgcatcacctacatgctgatcgagatcaacaactacttcgccgtggacaccgccagcgccatcgccatcgccctgatgaccttcggcaccatgtaccccatgagcgtgtacagcggcaaggtgctgctgcagaccacccccccccacgtgatcggccagctggacaagctgatcagagaggccggcagcgtgcacgtgagaatcagaagagacgccaacgagcagatggtgctggcccacgtgaccaacagactgtacaccctggtgagcaccctgaccgtgcagatcttcaaggacgactggatcagacccgccctgctgagcggccccgtggccgccaacgtgctgaacttcagcgaccaccacgtgatccccatgcccctgctgaagggcaccgacgacctgaaccccgtgaccagcacccccgccaagcccagcagccccccccccgagttcagcttcaacacccccggcaagaacgtgaaccccgtgatcctgctgaacacccagaccagaccctacggcttcggcctgaaccacggccacaccccctacagcagcatgctgaaccagggcctgggcgtgcccggcatcggcgccacccagggcctgagaaccggcttcaccaacatccccagcagatacggcaccaacaacagaatcggccagcccagaccctag

SEQ ID NO: 99834 - DNA, 1299 bp, synthetic construct
  misc_feature 1..1299: note = Description of Artificial Sequence: Synthetic coding sequence
  source 1..1299: mol_type = other DNA
atgagctggaagatcctgctgttcggcgtgatcaacctgatctgcaccggcttcctgctgatgtggtgcagcagcaccaacagcatcgccctgaccgcctacacctacctgaccatcttcgacctgttcagcctgatgacctgcctgatcagctactgggtgaccctgagaaagcccagccccgtgtacagcttcggcttcgagagactggaggtgctggccgtgttcgccagcaccgtgctggcccagctgggcgccctgttcatcctgaaggagagcgccgagagattcctggagcagcccgagatccacaccggcagactgctggtgggcaccttcgtggccctgtgcttcaacctgttcaccatgctgagcatcagaaacaagcccttcgcctacgtgagcgaggccgccagcaccagctggctgcaggagcacgtggccgacctgagcagaagcctgtgcggcatcatccccggcctgagcagcatcttcctgcccagaatgaaccccttcgtgctgatcgacctggccggcgccttcgccctgtgcatcacctacatgctgatcgagatcaacaactacttcgccgtggacaccgccagcgccatcgccatcgccctgatgaccttcggcaccatgtaccccatgagcgtgtacagcggcaaggtgctgctgcagaccacccccccccacgtgatcggccagctggacaagctgatcagagaggtgagcaccctggacggcgtgctggaggtgagaaacgagcacttctggaccctgggcttcggcagcctggccggcagcgtgcacgtgagaatcagaagagacgccaacgagcagatggtgctggcccacgtgaccaacagactgtacaccctggtgagcaccctgaccgtgcagatcttcaaggacgactggatcagacccgccctgctgagcggccccgtggccgccaacgtgctgaacttcagcgaccaccacgtgatccccatgcccctgctgaagggcaccgacgacctgaaccccgtgaccagcacccccgccaagcccagcagccccccccccgagttcagcttcaacacccccggcaagaacgtgaaccccgtgatcctgctgaacacccagaccagaccctacggcttcggcctgaaccacggccacaccccctacagcagcatgctgaaccagggcctgggcgtgcccggcatcggcgccacccagggcctgagaaccggcttcaccaacatccccagcagatacggcaccaacaacagaatcggccagcccagaccctag

SEQ ID NO: 99835 - DNA, 1131 bp, synthetic construct
  misc_feature 1..1131: note = Description of Artificial Sequence: Synthetic coding sequence
  source 1..1131: mol_type = other DNA
atgctgcccctgagcatcaaggacgacgagtacaagccccccaagttcaacctgttcggcaagatcagcggctggttcagaagcatcctgagcgacaagaccagcagaaacctgttcttcttcctgtgcctgaacctgagcttcgccttcgtggagctgctgtacggcatctggagcaactgcctgggcctgatcagcgacagcttccacatgttcttcgacagcaccgccatcctggccggcctggccgccagcgtgatcagcaagtggagagacaacgacgccttcagctacggctacgtgagagccgaggtgctggccggcttcgtgaacggcctgttcctgatcttcaccgccttcttcatcttcagcgagggcgtggagagagccctggccccccccgacgtgcaccacgagagactgctgctggtgagcatcctgggcttcgtggtgaacctgatcggcatcttcgtgttcaagcacggcggccacggccacagccacggcagcggccacggccacagccacagcctgttcaacggcgccctggaccaggcccacggccacgtggaccactgccacagccacgaggtgaagcacggcgccgcccacagccacgaccacgcccacggccacggccacttccacagccacgacggccccagcctgaaggagaccaccggccccagcagacagatcctgcagggcgtgttcctgcacatcctggccgacaccctgggcagcatcggcgtgatcgccagcgccatcatgatgcagaacttcggcctgatgatcgccgaccccatctgcagcatcctgatcgccatcctgatcgtggtgagcgtgatccccctgctgagagagagcgtgggcatcctgatgcagagaaccccccccctgctggagaacagcctgccccagtgctaccagagagtgcagcagctgcagggcgtgtacagcctgcaggagcagcacttctggaccctgtgcagcgacgtgtacgtgggcaccctgaagctgatcgtggcccccgacgccgacgccagatggatcctgagccagacccacaacatcttcacccaggccggcgtgagacagctgtacgtgcagatcgacttcgccgccatgtag

SEQ ID NO: 99836 - DNA, 273 bp, synthetic construct
  misc_feature 1..273: note = Description of Artificial Sequence: Synthetic coding sequence
  source 1..273: mol_type = other DNA
tgagtgatccccctgctgagagagagcgtgggcatcctgatgcagagaaccccccccctgctggagaacagcctgccccagtgctaccagagagtgcagcagctgcagggcgtgtacagcctgcaggagcagcacttctggaccctgtgcagcgacgtgtacgtgggcaccctgaagctgatcgtggcccccgacgccgacgccagatggatcctgagccagacccacaacatcttcacccagaagctggaggaggagaacgagaacctgtag

SEQ ID NO: 99837 - DNA, 1131 bp, synthetic construct; identical to SEQ ID NO: 99835
  misc_feature 1..1131: note = Description of Artificial Sequence: Synthetic coding sequence
  source 1..1131: mol_type = other DNA

SEQ ID NO: 99838 - DNA, 963 bp, synthetic construct
  misc_feature 1..963: note = Description of Artificial Sequence: Synthetic coding sequence
  source 1..963: mol_type = other DNA
atgtaccactgccacagcggcagcaagcccaccgagaagggcgccaacgagtacgcctacgccaagtggaagctgtgcagcgccagcgccatctgcttcatcttcatgatcgccgaggtggtgggcggccacatcgccggcagcctggccgtggtgaccgacgccgcccacctgctgatcgacctgaccagcttcctgctgagcctgttcagcctgtggctgagcagcaagccccccagcaagagactgaccttcggctggcacagagccgagatcctgggcgccctgctgagcatcctgtgcatctgggtggtgaccggcgtgctggtgtacctggcctgcgagagactgctgtaccccgactaccagatccaggccaccgtgatgatcatcgtgagcagctgcgccgtggccgccaacatcgtgctgaccgtggtgctgcaccagagatgcctgggccacaaccacaaggaggtgcaggccaacgccagcgtgagagccgccttcgtgcacgccctgggcgacctgttccagagcatcagcgtgctgatcagcgccctgatcatctacttcaagcccgagtacaagatcgccgaccccatctgcaccttcatcttcagcatcctggtgctggccagcaccatcaccatcctgaaggacttcagcatcctgctgatggagggcgtgcccaagagcctgaactacagcggcgtgaaggagctgatcctggccgtggacggcgtgctgagcgtgcacagcctgcacatctggagcctgaccatgaaccaggtgatcctgagcgcccacgtggccaccgccgccagcagagacagccaggtggtgagaagagagatcgccaaggccctgagcaagagcttcaccatgcacagcctgaccatccagatggagagccccgtggaccaggaccccgactgcctgttctgcgaggacccctgcgactag

SEQ ID NO: 99839 - DNA, 1110 bp, synthetic construct
  misc_feature 1..1110: note = Description of Artificial Sequence: Synthetic coding sequence
  source 1..1110: mol_type = other DNA
atggagttcctggagagaacctacctggtgaacgacaaggccgccaagatgtacgccttcaccctggagagcgtggagctgcagcagaagcccgtgaacaaggaccagtgccccagagagagacccgaggagctggagagcggcggcatgtaccactgccacagcggcagcaagcccaccgagaagggcgccaacgagtacgcctacgccaagtggaagctgtgcagcgccagcgccatctgcttcatcttcatgatcgccgaggtggtgggcggccacatcgccggcagcctggccgtggtgaccgacgccgcccacctgctgatcgacctgaccagcttcctgctgagcctgttcagcctgtggctgagcagcaagccccccagcaagagactgaccttcggctggcacagagccgagatcctgggcgccctgctgagcatcctgtgcatctgggtggtgaccggcgtgctggtgtacctggcctgcgagagactgctgtaccccgactaccagatccaggccaccgtgatgatcatcgtgagcagctgcgccgtggccgccaacatcgtgctgaccgtggtgctgcaccagagatgcctgggccacaaccacaaggaggtgcaggccaacgccagcgtgagagccgccttcgtgcacgccctgggcgacctgttccagagcatcagcgtgctgatcagcgccctgatcatctacttcaagcccgagtacaagatcgccgaccccatctgcaccttcatcttcagcatcctggtgctggccagcaccatcaccatcctgaaggacttcagcatcctgctgatggagggcgtgcccaagagcctgaactacagcggcgtgaaggagctgatcctggccgtggacggcgtgctgagcgtgcacagcctgcacatctggagcctgaccatgaaccaggtgatcctgagcgcccacgtggccaccgccgccagcagagacagccaggtggtgagaagagagatcgccaaggccctgagcaagagcttcaccatgcacagcctgaccatccagatggagagccccgtggaccaggaccccgactgcctgttctgcgaggacccctgcgactag

SEQ ID NO: 99840 - DNA, 1458 bp, synthetic construct
  misc_feature 1..1458: note = Description of Artificial Sequence: Synthetic coding sequence
  source 1..1458: mol_type = other DNA
atgggcagatacagcggcaagacctgcagactgctgttcatgctggtgctgaccgtggccttcttcgtggccgagctggtgagcggctacctgggcaacagcatcgccctgctgagcgacagcttcaacatgctgagcgacctgatcagcctgtgcgtgggcctgagcgccggctacatcgccagaagacccaccagaggcttcagcgccacctacggctacgccagagccgaggtggtgggcgccctgagcaacgccgtgttcctgaccgccctgtgcttcaccatcttcgtggaggccgtgctgagactggccagacccgagagaatcgacgaccccgagctggtgctgatcgtgggcgtgctgggcctgctggtgaacgtggtgggcctgctgatcttccaggactgcgccgcctggttcgcctgctgcctgagaggcagaagcagaagactgcagcagagacagcagctggccgagggctgcgtgcccggcgccttcggcggcccccagggcgccgaggaccccagaagagccgccgaccccaccgcccccggcagcgacagcgccgtgaccctgagaggcaccagcgtggagagaaagagagagaagggcgccaccgtgttcgccaacgtggccggcgacagcttcaacacccagaacgagcccgaggacatgatgaagaaggagaagaagagcgaggccctgaacatcagaggcgtgctgctgcacgtgatgggcgacgccctgggcagcgtggtggtggtgatcaccgccatcatcttctacgtgctgcccctgaagagcgaggacccctgcaactggcagtgctacatcgaccccagcctgaccgtgctgatggtgatcatcatcctgagcagcgccttccccctgatcaaggagaccgccgccatcctgctgcagatggtgcccaagggcgtgaacatggaggagctgatgagcaagctgagcgccgtgcccggcatcagcagcgtgcacgaggtgcacatctgggagctggtgagcggcaagatcatcgccaccctgcacatcaagtaccccaaggacagaggctaccaggacgccagcaccaagatcagagagatcttccaccacgccggcatccacaacgtgaccatccagttcgagaacgtggacctgaaggagcccctggagcagaaggacctgctgctgctgtgcaacagcccctgcatcagcaagggctgcgccaagcagctgtgctgcccccccggcgccctgcccctggcccacgtgaacggctgcgccgagcacaacggcggccccagcctggacacctacggcagcgacggcctgagcagaagagacgccagagaggtggccatcgaggtgagcctggacagctgcctgagcgaccacggccagagcctgaacaagacccaggaggaccagtgctacgtgaacagaacccacttctag

SEQ ID NO: 99841 - DNA, 723 bp, synthetic construct
  misc_feature 1..723: note = Description of Artificial Sequence: Synthetic coding sequence
  source 1..723: mol_type = other DNA
atgggcgacgccctgggcagcgtggtggtggtgatcaccgccatcatcttctacgtgctgcccctgaagagcgaggacccctgcaactggcagtgctacatcgaccccagcctgaccgtgctgatggtgatcatcatcctgagcagcgccttccccctgatcaaggagaccgccgccatcctgctgcagatggtgcccaagggcgtgaacatggaggagctgatgagcaagctgagcgccgtgcccggcatcagcagcgtgcacgaggtgcacatctgggagctggtgagcggcaagatcatcgccaccctgcacatcaagtaccccaaggacagaggctaccaggacgccagcaccaagatcagagagatcttccaccacgccggcatccacaacgtgaccatccagttcgagaacgtggacctgaaggagcccctggagcagaaggacctgctgctgctgtgcaacagcccctgcatcagcaagggctgcgccaagcagctgtgctgcccccccggcgccctgcccctggcccacgtgaacggctgcgccgagcacaacggcggccccagcctggacacctacggcagcgacggcctgagcagaagagacgccagagaggtggccatcgaggtgagcctggacagctgcctgagcgaccacggccagagcctgaacaagacccaggaggaccagtgctacgtgaacagaacccacttctag

SEQ ID NO: 99842 - DNA, 672 bp, synthetic construct
  misc_feature 1..672: note = Description of Artificial Sequence: Synthetic coding sequence
  source 1..672: mol_type = other DNA
atgggcagatacagcggcaagacctgcagactgctgttcatgctggtgctgaccgtggccttcttcgtggccgagctggtgagcggctacctgggcaacagcatcgccctgctgagcgacagcttcaacatgctgagcgacctgatcagcctgtgcgtgggcctgagcgccggctacatcgccagaagacccaccagaggcttcagcgccacctacggctacgccagagccgaggtggtgggcgccctgagcaacgccgtgttcctgaccgccctgtgcttcaccatcttcgtggaggccgtgctgagactggccagacccgagagaatcgacgaccccgagctggtgctgatcgtgggcgtgctgggcctgctggtgaacgtggtgggcctgctgatcttccaggactgcgccgcctggttcgcctgctgcctgagaggcagaagcagaagactgcagcagagacagcagctggccgagggctgcgtgcccggcgccttcggcggcccccagggcgccgaggaccccagaagagccgccgaccccaccgcccccggcagcgacagcgccgtgaccctgagaggcaccagcgtggagagaaagagagagaagggcgccaccgtgttcgccaacgtggccgagctgatccacaacaccagattcctgctgtag

SEQ ID NO: 99843 - DNA, 567 bp, synthetic construct
  misc_feature 1..567: note = Description of Artificial Sequence: Synthetic coding sequence
  source 1..567: mol_type = other DNA
atggaccacagccaccacatgggcatgagctacatggacagcaacagcaccatgcagcccagccaccaccaccccaccaccagcgccagccacagccacggcggcggcgacagcagcatgatgatgatgcccatgaccttctacttcggcttcaagaacgtggagctgctgttcagcggcctggtgatcaacaccgccggcgagatggccggcgccttcgtggccgtgttcctgctggccatgttctacgagggcctgaagatcgccagagagagcctgctgagaaagagccaggtgagcatcagatacaacagcatgcccgtgcccggccccaacggcaccatcctgatggagacccacaagaccgtgggccagcagatgctgagcttcccccacctgctgcagacctgctgggactacagacacgagcccccccacctgagcctgagccccagctactacagcgacctgaactaccccaagaaggccaaggtgctgctgagagtgagcgtggagctgatgatccaggaggccctgatgatcaccgccggcgacagcctgtgctag

SEQ ID NO: 99844 - DNA, 573 bp, synthetic construct
  misc_feature 1..573: note = Description of Artificial Sequence: Synthetic coding sequence
  source 1..573: mol_type = other DNA
atggaccacagccaccacatgggcatgagctacatggacagcaacagcaccatgcagcccagccaccaccaccccaccaccagcgccagccacagccacggcggcggcgacagcagcatgatgatgatgcccatgaccttctacttcggcttcaagaacgtggagctgctgttcagcggcctggtgatcaacaccgccggcgagatggccggcgccttcgtggccgtgttcctgctggccatgttctacgagggcctgaagatcgccagagagagcctgctgagaaagagccaggtgagcatcagatacaacagcatgcccgtgcccggccccaacggcaccatcctgatggagacccacaagaccgtgggccagcagatgctgagcttcccccacctgctgcagaccgtgctgcacatcatccaggtggtgatcagctacttcctgatgctgatcttcatgacctacaacggctacctgtgcatcgccgtggccgccggcgccggcaccggctacttcctgttcagctggaagaaggccgtggtggtggacatcaccgagcactgccactag

SEQ ID NO: 99845 - DNA, 432 bp, synthetic construct
  misc_feature 1..432: note = Description of Artificial Sequence: Synthetic coding sequence
  source 1..432: mol_type = other DNA
atggccatgcacttcatcttcagcgacaccgccgtgctgctgttcgacttctggagcgtgcacagccccgccggcatggccctgagcgtgctggtgctgctgctgctggccgtgctgtacgagggcatcaaggtgggcaaggccaagctgctgaaccaggtgctggtgaacctgcccaccagcatcagccagcagaccatcgccgagaccgacggcgacagcgccggcagcgacagcttccccgtgggcagaacccaccacagatggtacctgtgccacttcggccagagcctgatccacgtgatccaggtggtgatcggctacttcatcatgctggccgtgatgagctacaacacctggatcttcctgggcgtggtgctgggcagcgccgtgggctactacctggcctaccccctgctgagcaccgcctag

SEQ ID NO: 99846 - DNA, 1650 bp, synthetic construct
  misc_feature 1..1650: note = Description of Artificial Sequence: Synthetic coding sequence
  source 1..1650: mol_type = other DNA
atgagccccaccatcagccacaaggacagcagcagacagagaagacccggcaacttcagccacagcctggacatgaagagcggccccctgccccccggcggctgggacgacagccacctggacagcgccggcagagagggcgacagagaggccctgctgggcgacaccggcaccggcgacttcctgaaggccccccagagcttcagagccgagctgagcagcatcctgctgctgctgttcctgtacgtgctgcagggcatccccctgggcctggccggcagcatccccctgatcctgcagagcaagaacgtgagctacaccgaccaggccttcttcagcttcgtgttctggcccttcagcctgaagctgctgtgggcccccctggtggacgccgtgtacgtgaagaacttcggcagaagaaagagctggctggtgcccacccagtacatcctgggcctgttcatgatctacctgagcacccaggtggacagactgctgggcaacaccgacgacagaacccccgacgtgatcgccctgaccgtggccttcttcctgttcgagttcctggccgccacccaggacatcgccgtggacggctgggccctgaccatgctgagcagagagaacgtgggctacgccagcacctgcaacagcgtgggccagaccgccggctacttcctgggcaacgtgctgttcctggccctggagagcgccgacttctgcaacaagtacctgagattccagccccagcccagaggcatcgtgaccctgagcgacttcctgttcttctggggcaccgtgttcctgatcaccaccaccctggtggccctgctgaagaaggagaacgaggtgagcgtggtgaaggaggagacccagggcatcaccgacacctacaagctgctgttcgccatcatcaagatgcccgccgtgctgaccttctgcctgctgatcctgaccgccaagatcggcttcagcgccgccgacgccgtgaccggcctgaagctggtggaggagggcgtgcccaaggagcacctggccctgctggccgtgcccatggtgcccctgcagatcatcctgcccctgatcatcagcaagtacaccgccggcccccagcccctgaacaccttctacaaggccatgccctacagactgctgctgggcctggagtacgccctgctggtgtggtggacccccaaggtggagcaccagggcggcttccccatctactactacatcgtggtgctgctgagctacgccctgcaccaggtgaccgtgtacagcatgtacgtgagcatcatggccttcaacgccaaggtgagcgaccccctgatcggcggcacctacatgaccctgctgaacaccgtgagcaacctgggcggcaactggcccagcaccgtggccctgtggctggtggaccccctgaccgtgaaggagtgcgtgggcgccagcaaccagaactgcagaacccccgacgccgtggagctgtgcaagaagctgggcggcagctgcgtgaccgccctggacggctactacgtggagagcatcatctgcgtgttcatcggcttcggctggtggttcttcctgggccccaagttcaagaagctgcaggacgagggcagcagcagctggaagtgcaagagaaacaactag

SEQ ID NO: 99847 - DNA, 1650 bp, synthetic construct; identical to SEQ ID NO: 99846
  misc_feature 1..1650: note = Description of Artificial Sequence: Synthetic coding sequence
  source 1..1650: mol_type = other DNA

SEQ ID NO: 99848 - DNA, 1920 bp, synthetic construct
  misc_feature 1..1920: note = Description of Artificial Sequence: Synthetic coding sequence
  source 1..1920: mol_type = other DNA
atgctgagctacggcgagagactgggcagccccgccgtgagccccctgcccgtgagaggcggccacgtgatgagaggcaccgccttcgcctacgtgcccagcccccaggtgctgcacagaatccccggcaccagcgcctacgccttccccagcctgggccccgtggccctggccgagcacacctgcccctgcggcgaggtgctggagagacacgagcccctgcccgccaagctggccctggaggaggagcagaagcccgagagcagactggtgcccaagctgagacaggccggcgccatgctgctgaaggtgcccctgatgctgaccttcctgtacctgttcgtgtgcagcctggacatgctgagcagcgccttccagctggccggcggcaaggtggccggcgacatcttcaaggacaacgccatcctgagcaaccccgtggccggcctggtggtgggcatcctggtgaccgtgctggtgcagagcagcagcaccagcaccagcatcatcgtgagcatggtgagcagcggcctgctggaggtgagcagcgccatccccatcatcatgggcagcaacatcggcaccagcgtgaccaacaccatcgtggccctgatgcaggccggcgacagaaccgacttcagaagagccttcgccggcgccaccgtgcacgactgcttcaactggctgagcgtgctggtgctgctgcccctggaggccgccaccggctacctgcaccacatcaccagactggtggtggccagcttcaacatccacggcggcagagacgcccccgacctgctgaagatcatcaccgagcccttcaccaagctgatcatccagctggacgagagcgtgatcaccagcatcgccaccggcgacgagagcctgagaaaccacagcctgatccagatctggtgccaccccgacagcctgcaggcccccaccagcatgagcagagccgaggccaacagcagccagaccctgggcaacgccaccatggagaagtgcaaccacatcttcgtggacaccggcctgcccgacctggccgtgggcctgatcctgctggccggcagcctggtgctgctgtgcacctgcctgatcctgctggtgaagatgctgaacagcctgctgaagggccaggtggccaaggtgatccagaaggtgatcaacaccgacttccccgcccccttcacctgggtgaccggctacttcgccatggtggtgggcgccagcatgaccttcgtggtgcagagcagcagcgtgttcaccagcgccatcacccccctgatcggcctgggcgtgatcagcatcgagagagcctaccccctgaccctgggcagcaacatcggcaccaccaccaccgccatcctggccgccctggccagccccagagagaagctgagcagcgccttccagatcgccctgtgccacttcttcttcaacatcagcggcatcctgctgtggtaccccgtgccctgcaccagactgcccatcagaatggccaaggccctgggcaagagaaccgccaagtacagatggttcgccgtgctgtacctgctggtgtgcttcctgctgctgcccagcctggtgttcggcatcagcatggccggctggcaggtgatggtgggcgtgggcacccccttcggcgccctgctggccttcgtggtgctgatcaacgtgctgcagagcagaagccccggccacctgcccaagtggctgcagacctgggacttcctgcccagatggatgcacagcctgaagcccctggaccacctgatcaccagagccaccctgtgctgcgccagacccgagcccagaagcccccccctgccccccagagtgttcctggaggagctgccccccgccacccccagccccagactggccctgcccgcccaccacaacgccaccagactgtag

SEQ ID NO: 99849 - DNA, 330 bp, synthetic construct
  misc_feature 1..330: note = Description of Artificial Sequence: Synthetic coding sequence
  source 1..330: mol_type = other DNA
atgctgagctacggcgagagactgggcagccccgccgtgagccccctgcccgtgagaggcggccacgtgatgagaggcaccgccttcgcctacgtgcccagcccccaggtgctgcacagaatccccggcaccagcgcctacgccttccccagcctgggccccgtggccctggccgagcacacctgcccctgcggcgaggtgctggagagacacgagcccctgcccgccaagctggccctggaggaggagcagaagcccgagagcagactggtgcccaagctgagacaggccggcgccatgctgctgaaggtgcccctgatgctgacctag

SEQ ID NO: 99850 - DNA, 1023 bp, synthetic construct
  misc_feature 1..1023: note = Description of Artificial Sequence: Synthetic coding sequence
  source 1..1023: mol_type = other DNA
atgctgagctacggcgagagactgggcagccccgccgtgagccccctgcccgtgagaggcggccacgtgatgagaggcaccgccttcgcctacgtgcccagcccccaggtgctgcacagaatccccggcaccagcgcctacgccttccccagcctgggccccgtggccctggccgagcacacctgcccctgcggcgaggtgctggagagacacgagcccctgcccgccaagctggccctggaggaggagcagaagcccgagagcagactggtgcccaagctgagacaggccggcgccatgctgctgaaggtgcccctgatgctgaccttcctgtacctgttcgtgtgcagcctggacatgctgagcagcgccttccagctggccggcggcaaggtggccggcgacatcttcaaggacaacgccatcctgagcaaccccgtggccggcctggtggtgggcatcctggtgaccgtgctggtgcagagcagcagcaccagcaccagcatcatcgtgagcatggtgagcagcggcctgctggaggtgagcagcgccatccccatcatcatgggcagcaacatcggcaccagcgtgaccaacaccatcgtggccctgatgcaggccggcgacagaaccgacttcagaagagccttcgccggcgccaccgtgcacgactgcttcaactggctgagcgtgctggtgctgctgcccctggaggccgccaccggctacctgcaccacatcaccagactggtggtggccagcttcaacatccacggcggcagagacgcccccgacctgctgaagatcatcaccgagcccttcaccaagctgatcatccagctggacgagagcgtgatcaccagcatcgccaccggcgacgagagcctgagaaaccacagcctgatccagatctggtgccaccccgacagcctgcagcagaacctggagggcagagagatcacccacttcgacctgagaaagaagcaggccatggaggacagcagcgtgccccactgcccctag

SEQ ID NO: 99851 - DNA, 2073 bp, synthetic construct
  misc_feature 1..2073: note = Description of Artificial Sequence: Synthetic coding sequence
  source 1..2073: mol_type = other DNA
atggccccctggcccgagctgggcgacgcccagcccaaccccgacaagtacctggagggcgccgccggccagcagcccaccgcccccgacaagagcaaggagaccaacaagaccgacaacaccgaggcccccgtgaccaagatcgagctgctgcccagctacagcaccgccaccctgatcgacgagcccaccgaggtggacgacccctggaacctgcccaccctgcaggacagcggcatcaagtggagcgagagagacaccaagggcaagatcctgtgcttcttccagggcatcggcagactgatcctgctgctgggcttcctgtacttcttcgtgtgcagcctggacatcctgagcagcgccttccagctggtgggcggcaagatggccggccagttcttcagcaacagcagcatcatgagcaaccccctgctgggcctggtgatcggcgtgctggtgaccgtgctggtgcagagcagcagcaccagcaccagcatcgtggtgagcatggtgagcagcagcctgctgaccgtgagagccgccatccccatcatcatgggcgccaacatcggcaccagcatcaccaacaccatcgtggccctgatgcaggtgggcgacagaagcgagttcagaagagccttcgccggcgccaccgtgcacgacttcttcaactggctgagcgtgctggtgctgctgcccgtggaggtggccacccactacctggagatcatcacccagctgatcgtggagagcttccacttcaagaacggcgaggacgcccccgacctgctgaaggtgatcaccaagcccttcaccaagctgatcgtgcagctggacaagaaggtgatcagccagatcgccatgaacgacgagaaggccaagaacaagagcctggtgaagatctggtgcaagaccttcaccaacaagacccagatcaacgtgaccgtgcccagcaccgccaactgcaccagccccagcctgtgctggaccgacggcatccagaactggaccatgaagaacgtgacctacaaggagaacatcgccaagtgccagcacatcttcgtgaacttccacctgcccgacctggccgtgggcaccatcctgctgatcctgagcctgctggtgctgtgcggctgcctgatcatgatcgtgaagatcctgggcagcgtgctgaagggccaggtggccaccgtgatcaagaagaccatcaacaccgacttccccttccccttcgcctggctgaccggctacctggccatcctggtgggcgccggcatgaccttcatcgtgcagagcagcagcgtgttcaccagcgccctgacccccctgatcggcatcggcgtgatcaccatcgagagagcctaccccctgaccctgggcagcaacatcggcaccaccaccaccgccatcctggccgccctggccagccccggcaacgccctgagaagcagcctgcagatcgccctgtgccacttcttcttcaacatcagcggcatcctgctgtggtaccccatccccttcaccagactgcccatcagaatggccaagggcctgggcaacatcagcgccaagtacagatggttcgccgtgttctacctgatcatcttcttcttcctgatccccctgaccgtgttcggcctgagcctggccggctggagagtgctggtgggcgtgggcgtgcccgtggtgttcatcatcatcctggtgctgtgcctgagactgctgcagagcagatgccccagagtgctgcccaagaagctgcagaactggaacttcctgcccctgtggatgagaagcctgaagccctgggacgccgtggtgagcaagttcaccggctgcttccagatgagatgctgctgctgctgcagagtgtgctgcagagcctgctgcctgctgtgcgactgccccaagtgctgcagatgcagcaagtgctgcgaggacctggaggaggcccaggagggccaggacgtgcccgtgaaggcccccgagaccttcgacaacatcaccatcagcagagaggcccagggcgaggtgcccgccagcgacagcaagaccgagtgcaccgccctgtag

SEQ ID NO: 99852 - DNA, 2070 bp, synthetic construct
  misc_feature 1..2070: note = Description of Artificial Sequence: Synthetic coding sequence
  source 1..2070: mol_type = other DNA
atggccccctggcccgagctgggcgacgcccagcccaaccccgacaagtacctggagggcgccgccggccagcagcccaccgcccccgacaagagcaaggagaccaacaagaacaacaccgaggcccccgtgaccaagatcgagctgctgcccagctacagcaccgccaccctgatcgacgagcccaccgaggtggacgacccctggaacctgcccaccctgcaggacagcggcatcaagtggagcgagagagacaccaagggcaagatcctgtgcttcttccagggcatcggcagactgatcctgctgctgggcttcctgtacttcttcgtgtgcagcctggacatcctgagcagcgccttccagctggtgggcggcaagatggccggccagttcttcagcaacagcagcatcatgagcaaccccctgctgggcctggtgatcggcgtgctggtgaccgtgctggtgcagagcagcagcaccagcaccagcatcgtggtgagcatggtgagcagcagcctgctgaccgtgagagccgccatccccatcatcatgggcgccaacatcggcaccagcatcaccaacaccatcgtggccctgatgcaggtgggcgacagaagcgagttcagaagagccttcgccggcgccaccgtgcacgacttcttcaactggctgagcgtgctggtgctgctgcccgtggaggtggccacccactacctggagatcatcacccagctgatcgtggagagcttccacttcaagaacggcgaggacgcccccgacctgctgaaggtgatcaccaagcccttcaccaagctgatcgtgcagctggacaagaaggtgatcagccagatcgccatgaacgacgagaaggccaagaacaagagcctggtgaagatctggtgcaagaccttcaccaacaagacccagatcaacgtgaccgtgcccagcaccgccaactgcaccagccccagcctgtgctggaccgacggcatccagaactggaccatgaagaacgtgacctacaaggagaacatcgccaagtgccagcacatcttcgtgaacttccacctgcccgacctggccgtgggcaccatcctgctgatcctgagcctgctggtgctgtgcggctgcctgatcatgatcgtgaagatcctgggcagcgtgctgaagggccaggtggccaccgtgatcaagaagaccatcaacaccgacttccccttccccttcgcctggctgaccggctacctggccatcctggtgggcgccggcatgaccttcatcgtgcagagcagcagcgtgttcaccagcgccctgacccccctgatcggcatcggcgtgatcaccatcgagagagcctaccccctgaccctgggcagcaacatcggcaccaccaccaccgccatcctggccgccctggccagccccggcaacgccctgagaagcagcctgcagatcgccctgtgccacttcttcttcaacatcagcggcatcctgctgtggtaccccatccccttcaccagactgcccatcagaatggccaagggcctgggcaacatcagcgccaagtacagatggttcgccgtgttctacctgatcatcttcttcttcctgatccccctgaccgtgttcggcctgagcctggccggctggagagtgctggtgggcgtgggcgtgcccgtggtgttcatcatcatcctggtgctgtgcctgagactgctgcagagcagatgccccagagtgctgcccaagaagctgcagaactggaacttcctgcccctgtggatgagaagcctgaagccctgggacgccgtggtgagcaagttcaccggctgcttccagatgagatgctgctgctgctgcagagtgtgctgcagagcctgctgcctgctgtgcgactgccccaagtgctgcagatgcagcaagtgctgcgaggacctggaggaggcccaggagggccaggacgtgcccgtgaaggcccccgagaccttcgacaacatcaccatcagcagagaggcccagggcgaggtgcccgccagcgacagcaagaccgagtgcaccgccctgtag

SEQ ID NO: 99853 - DNA, 2070 bp, synthetic construct; identical to SEQ ID NO: 99852
  misc_feature 1..2070: note = Description of Artificial Sequence: Synthetic coding sequence
  source 1..2070: mol_type = other DNA

SEQ ID NO: 99854 - DNA, 486 bp, synthetic construct
  misc_feature 1..486: note = Description of Artificial Sequence: Synthetic coding sequence
  source 1..486: mol_type = other DNA
atggccccctggcccgagctgggcgacgcccagcccaaccccgacaagtacctggagggcgccgccggccagcagcccaccgcccccgacaagagcaaggagaccaacaagaccgacaacaccgaggcccccgtgaccaagatcgagctgctgcccagctacagcaccgccaccctgatcgacgagcccaccgaggtggacgacccctggaacctgcccaccctgcaggacagcggcatcaagtggagcgagagagacaccaagggcaagatcctgtgcttcttccagggcatcggcagactgatcctgctgctgggcttcctgtacttcttcgtgtgcagcctggacatcctgagcagcgccttccagctggtgggcggcaagatggccggccagttcttcagcaacagcagcatcatgagcaaccccctgctgggcctggtgatcggcgtgctggtgaccgtgctggtgcagagcagcagctag

SEQ ID NO: 99855 - DNA, 492 bp, synthetic construct
  misc_feature 1..492: note = Description of Artificial Sequence: Synthetic coding sequence
  source 1..492: mol_type = other DNA
atggccccctggcccgagctgggcgacgcccagcccaaccccgacaagtacctggagggcgccgccggccagcagcccaccgcccccgacaagagcaaggagaccaacaagaacaacaccgaggcccccgtgaccaagatcgagctgctgcccagctacagcaccgccaccctgatcgacgagcccaccgaggtggacgacccctggaacctgcccaccctgcaggacagcggcatcaagtggagcgagagagacaccaagggcaagatcctgtgcttcttccagggcatcggcagactgatcctgctgctgggcttcctgtacttcttcgtgtgcagcctggacatcctgagcagcgccttccagctggtgggcggcaagatggccggccagttcttcagcaacagcagcatcatgagcaaccccctgctgggcctggtgatcggcgtgctggtgaccgtgctggtgcagagcagcagcaccagcacctag

SEQ ID NO: 99856 - DNA, 1800 bp, synthetic construct
  misc_feature 1..1800: note = Description of Artificial Sequence: Synthetic coding sequence
  source 1..1800: mol_type = other DNA
atgcccagcagcctgcccggcagccaggtgccccaccccaccctggacgccgtggacctggtggagaagaccctgagaaacgagggcaccagcagcagcgcccccgtgctggaggagggcgacaccgacccctggaccctgccccagctgaaggacaccagccagccctggaaggagctgagagtggccggcagactgagaagagtggccggcagcgtgctgaaggcctgcggcctgctgggcagcctgtacttcttcatctgcagcctggacgtgctgagcagcgccttccagctgctgggcagcaaggtggccggcgacatcttcaaggacaacgtggtgctgagcaaccccgtggccggcctggtgatcggcgtgctggtgaccgccctggtgcagagcagcagcaccagcagcagcatcgtggtgagcatggtggccgccaagctgctgaccgtgagagtgagcgtgcccatcatcatgggcgtgaacgtgggcaccagcatcaccagcaccctggtgagcatggcccagagcggcgacagagacgagttccagagagccttcagcggcagcgccgtgcacggcatcttcaactggctgaccgtgctggtgctgctgcccctggagagcgccaccgccctgctggagagactgagcgagctggccctgggcgccgccagcctgacccccagagcccaggcccccgacatcctgaaggtgctgaccaagcccctgacccacctgatcgtgcagctggacagcgacatgatcatgagcagcgccaccggcaacgccaccaacagcagcctgatcaagcactggtgcggcaccaccggccagcccacccaggagaacagcagctgcggcgccttcggcccctgcaccgagaagaacagcaccgcccccgccgacagactgccctgcagacacctgttcgccggcaccgagctgaccgacctggccgtgggctgcatcctgctggccggcagcctgctggtgctgtgcggctgcctggtgctgatcgtgaagctgctgaacagcgtgctgagaggcagagtggcccaggtggtgagaaccgtgatcaacgccgacttccccttccccctgggctggctgggcggctacctggccgtgctggccggcgccggcctgaccttcgccctgcagagcagcagcgtgttcaccgccgccgtggtgcccctgatgggcgtgggcgtgatcagcctggacagagcctaccccctgctgctgggcagcaacatcggcaccaccaccaccgccctgctggccgccctggccagccccgccgacagaatgctgagcgccctgcaggtggccctgatccacttcttcttcaacctggccggcatcctgctgtggtacctggtgcccgccctgagactgcccatccccctggccagacacttcggcgtggtgaccgccagatacagatgggtggccggcgtgtacctgctgctgggcttcctgctgctgcccctggccgccttcggcctgagcctggccggcggcatggagctggccgccgtgggcggccccctggtgggcctggtgctgctggtgatcctggtgaccgtgctgcagagaagaagacccgcctggctgcccgtgagactgagaagctgggcctggctgcccgtgtggctgcacagcctggagccctgggacagactggtgaccagatgctgcccctgcaacgtgtgcagcccccccaaggccaccaccaaggaggcctactgctacgagaaccccgagatcctggccagccagcagctgtag

SEQ ID NO: 99857 - DNA, 1800 bp, synthetic construct; identical to SEQ ID NO: 99856
  misc_feature 1..1800: note = Description of Artificial Sequence: Synthetic coding sequence
  source 1..1800: mol_type = other DNA

SEQ ID NO: 99858 - DNA, 570 bp, synthetic construct
  misc_feature 1..570: note = Description of Artificial Sequence: Synthetic coding sequence
  source 1..570: mol_type = other DNA
atgaccctgatggccgccgtgtacaccatcgccctgagatacaccagaaccagcgacaaggagctgtacttcagcaccaccgccgtgtgcatcaccgaggtgatcaagctgctgctgagcgtgggcatcctggccaaggagaccggcagcctgggcagattcaaggccagcctgagagagaacgtgctgggcagccccaaggagctgctgaagctgagcgtgcccagcctggtgtacgccgtgcagaacaacatggccttcctggccctgagcaacctggacgccgccgtgtaccaggtgacctaccagctgaagatcccctgcaccgccctgtgcaccgtgctgatgctgaacagaaccctgagcaagctgcagtgggtgagcgtgttcatgctgtgcgccggcgtgaccctggtgcagtggaagcccgcccaggccaccaaggtggtggagtacatcctgaagaagttcaaggagttcagatacttcagcctgggcgagaagcacagcaacgtgagcatcagagactactgcgacatcagctggagactgctggtgagatggagctag

SEQ ID NO: 99859 - DNA, 1014 bp, synthetic construct
  misc_feature 1..1014: note = Description of Artificial Sequence: Synthetic coding sequence
  source 1..1014: mol_type = other DNA
atggccgcccccagagacaacgtgaccctgctgttcaagctgtactgcctggccgtgatgaccctgatggccgccgtgtacaccatcgccctgagatacaccagaaccagcgacaaggagctgtacttcagcaccaccgccgtgtgcatcaccgaggtgatcaagctgctgctgagcgtgggcatcctggccaaggagaccggcagcctgggcagattcaaggccagcctgagagagaacgtgctgggcagccccaaggagctgctgaagctgagcgtgcccagcctggtgtacgccgtgcagaacaacatggccttcctggccctgagcaacctggacgccgccgtgtaccaggtgacctaccagctgaagatcccctgcaccgccctgtgcaccgtgctgatgctgaacagaaccctgagcaagctgcagtgggtgagcgtgttcatgctgtgcgccggcgtgaccctggtgcagtggaagcccgcccaggccaccaaggtggtggtggagcagaaccccctgctgggcttcggcgccatcgccatcgccgtgctgtgcagcggcttcgccggcgtgtacttcgagaaggtgctgaagagcagcgacaccagcctgtgggtgagaaacatccagatgtacctgagcggcatcatcgtgaccctggccggcgtgtacctgagcgacggcgccgagatcaaggagaagggcttcttctacggctacacctactacgtgtggttcgtgatcttcctggccagcgtgggcggcctgtacaccagcgtggtggtgaagtacaccgacaacatcatgaagggcttcagcgccgccgccgccatcgtgctgagcaccatcgccagcgtgatgctgttcggcctgcagatcaccctgaccttcgccctgggcaccctgctggtgtgcgtgagcatctacctgtacggcctgcccagacaggacaccaccagcatccagcagggcgagaccgccagcaaggagagagtgatcggcgtgtag

SEQ ID NO: 99860 - DNA, 837 bp, synthetic construct
  misc_feature 1..837: note = Description of Artificial Sequence: Synthetic coding sequence
  source 1..837: mol_type = other DNA
atggccgcccccagagacaacgtgaccctgctgttcaagctgtactgcctggccgtgatgaccctgatggccgccgtgtacaccatcgccctgagatacaccagaaccagcgacaaggagctgtacttcagcaccaccgccgtgtgcatcaccgaggtgatcaagctgctgctgagcgtgggcatcctggccaaggagaccggcagcctgggcagattcaaggccagcctgagagagaacgtgctgggcagccccaaggagctgctgaagctgagcgtgcccagcctggtgtacgccgtgcagaacaacatggccttcctggccctgagcaacctggacgccgccgtgtaccaggtgacctaccagctgaagatcccctgcaccgccctgtgcaccgtgctgatgctgaacagaaccctgagcaagctgcagtgggtgagcgtgttcatgctgtgcgccggcgtgaccctggtgcagtggaagcccgcccaggccaccaaggtggtggtggagcagaaccccctgctgggcttcggcgccatcgccatcgccgtgctgtgcagcggcttcgccgtgctggccagcgtgggcggcctgtacaccagcgtggtggtgaagtacaccgacaacatcatgaagggcttcagcgccgccgccgccatcgtgctgagcaccatcgccagcgtgatgctgttcggcctgcagatcaccctgaccttcgccctgggcaccctgctggtgtgcgtgagcatctacctgtacggcctgcccagacaggacaccaccagcatccagcagggcgagaccgccagcaaggagagagtgatcggcgtgtag

SEQ ID NO: 99861 - DNA, 570 bp, synthetic construct
  misc_feature 1..570: note = Description of Artificial Sequence: Synthetic coding sequence
  source 1..570: mol_type = other DNA
atggccgcccccagagacaacgtgaccctgctgttcaagctgtactgcctggccgtgatgaccctgatggccgccgtgtacaccatcgccctgagatacaccagaaccagcgacaaggagctgtacttcagcaccaccgccgtgtgcatcaccgaggtgatcaagctgctgctgagcgtgggcatcctggccaaggagaccggcagcctgggcagattcaaggccagcctgagagagaacgtgctgggcagccccaaggagctgctgaagctgagcgtgcccagcctggtgtacgccgtgcagaacaacatggccttcctggccctgagcaacctggacgccgccgtgtaccaggtgacctaccagctgaagatcccctgcaccgccctgtgcaccgtgctgatgctgaacagaaccctgagcaagctgcagtgggtgagcgtgttcatgctgtgcgccggcgtgaccctggtgcagtggaagcccgcccaggccaccaaggtggtgttcctgcaggtgctggtggccagcaccctgctgctgtggctgagcacccagaccaccagctag

SEQ ID NO: 99862 - DNA, 537 bp, synthetic construct
  misc_feature 1..537: note = Description of Artificial Sequence: Synthetic coding sequence
  source 1..537: mol_type = other DNA
atggccgcccccagagacaacgtgaccctgctgttcaagctgtactgcctggccgtgatgaccctgatggccgccgtgtacaccatcgccctgagatacaccagaaccagcgacaaggagctgtacttcagcaccaccgccgtgtgcatcaccgaggtgatcaagctgctgctgagcgtgggcatcctggccaaggagaccggcagcctgggcagattcaaggccagcctgagagagaacgtgctgggcagccccaaggagctgctgaagctgagcgtgcccagcctggtgtacgccgtgcagaacaacatggccttcctggccctgagcaacctggacgccgccgtgtaccaggtgacctaccagctgaagatcccctgcaccgccctgtgcaccgtgctgatgctgaacagaaccctgagcaagctgcagaagaaggacttcagcatggtgacccacatcatgagcggcctgagcagcgtgagcatccaggagctgaaggtgctgagcagaagcttcatcttcttcctgagctag

SEQ ID NO: 99863 - DNA, 612 bp, synthetic construct
  misc_feature 1..612: note = Description of Artificial Sequence: Synthetic coding sequence
  source 1..612: mol_type = other DNA
atgctgaacagaaccctgagcaagctgcagtgggtgagcgtgttcatgctgtgcgccggcgtgaccctggtgcagtggaagcccgcccaggccaccaaggtggtggtggagcagaaccccctgctgggcttcggcgccatcgccatcgccgtgctgtgcagcggcttcgccggcgtgtacttcgagaaggtgctgaagagcagcgacaccagcctgtgggtgagaaacatccagatgtacctgagcggcatcatcgtgaccctggccggcgtgtacctgagcgacggcgccgagatcaaggagaagggcttcttctacggctacacctactacgtgtggttcgtgatcttcctggccagcgtgggcggcctgtacaccagcgtggtggtgaagtacaccgacaacatcatgaagggcttcagcgccgccgccgccatcgtgctgagcaccatcgccagcgtgatgctgttcggcctgcagatcaccctgaccttcgccctgggcaccctgctggtgtgcgtgagcatctacctgtacggcctgcccagacaggacaccaccagcatccagcagggcgagaccgccagcaaggagagagtgatcggcgtgtag

SEQ ID NO: 99864 - DNA, 1191 bp, synthetic construct
  misc_feature 1..1191: note = Description of Artificial Sequence: Synthetic coding sequence
  source 1..1191: mol_type = other DNA
atggccgccgtgggcgccggcggcagcaccgccgcccccggccccggcgccgtgagcgccggcgccctggagcccggcaccgccagcgccgcccacagaagactgaagtacatcagcctggccgtgctggtggtgcagaacgccagcctgatcctgagcatcagatacgccagaaccctgcccggcgacagattcttcgccaccaccgccgtggtgatggccgaggtgctgaagggcctgacctgcctgctgctgctgttcgcccagaagagaggcaacgtgaagcacctggtgctgttcctgcacgaggccgtgctggtgcagtacgtggacaccctgaagctggccgtgcccagcctgatctacaccctgcagaacaacctgcagtacgtggccatcagcaacctgcccgccgccaccttccaggtgacctaccagctgaagatcctgaccaccgccctgttcagcgtgctgatgctgaacagaagcctgagcagactgcagtgggccagcctgctgctgctgttcaccggcgtggccatcgtgcaggcccagcaggccggcggcggcggccccagacccctggaccagaaccccggcgccggcctggccgccgtggtggccagctgcctgagcagcggcttcgccggcgtgtacttcgagaagatcctgaagggcagcagcggcagcgtgtggctgagaaacctgcagctgggcctgttcggcaccgccctgggcctggtgggcctgtggtgggccgagggcaccgccgtggccaccagaggcttcttcttcggctacacccccgccgtgtggggcgtggtgctgaaccaggccttcggcggcctgctggtggccgtggtggtgaagtacgccgacaacatcctgaagggcttcgccaccagcctgagcatcgtgctgagcaccgtggccagcatcagactgttcggcttccacgtggaccccctgttcgccctgggcgccggcctggtgatcggcgccgtgtacctgtacagcctgcccagaggcgccgccaaggccatcgccagcgccagcgccagcgccagcggcccctgcgtgcaccagcagccccccggccagcccccccccccccagctgagcagccacagaggcgacctgatcaccgagcccttcctgcccaagctgctgaccaaggtgaagggcagctag

SEQ ID NO: 99865 - DNA, 492 bp, synthetic construct
  misc_feature 1..492: note = Description of Artificial Sequence: Synthetic coding sequence
  source 1..492: mol_type = other DNA
atggccgccgtgggcgccggcggcagcaccgccgcccccggccccggcgccgtgagcgccggcgccctggagcccggcaccgccagcgccgcccacagaagactgaagtacatcagcctggccgtgctggtggtgcagaacgccagcctgatcctgagcatcagatacgccagaaccctgcccggcgacagattcttcgccaccaccgccgtggtgatggccgaggtgctgaagggcctgacctgcctgctgctgctgttcgcccagaagagaggcaacgtgaagcacctggtgctgttcctgcacgaggccgtgctggtgcagtacgtggacaccctgaagctggccgtgcccagcctgatctacaccctgcagaacaacctgcagtacgtggccatcagcaacctgcccgccgccaccttccaggtgagccccaagcccagcatggcccccgaggagctgaccggcctgggcaccggcgtgtgggagtag

SEQ ID NO: 99866 - DNA, 657 bp, synthetic construct
  misc_feature 1..657: note = Description of Artificial Sequence: Synthetic coding sequence
  source 1..657: mol_type = other DNA
atgaagctgtgcagagacgcccacagaagactgaagtacatcagcctggccgtgctggtggtgcagaacgccagcctgatcctgagcatcagatacgccagaaccctgcccggcgacagattcttcgccaccaccgccgtggtgatggccgaggtgctgaagggcctgacctgcctgctgctgctgttcgcccagaagagaggcaacgtgaagcacctggtgctgttcctgcacgaggccgtgctggtgcagtacgtggacaccctgaagctggccgtgcccagcctgatctacaccctgcagaacaacctgcagtacgtggccatcagcaacctgcccgccgccaccttccagcccagccccagatgcagccagagccacagcctgtgcctgtgcctgagactgagagccctgagaagccccgccgccagcagagccgccaccaccaccgccgccgtgttccccccctggagaccccaccacggcgccctgagcgccaaggtgagcgccggcgaggtgagagccggcagcaacggcggcacccagggcagaggcaccggcgtggagggcgtgggccacctgcaggaccccagcagacacccccccggccccggcagcagcggcttcggcagatggagcttcctgcccggccactag

SEQ ID NO: 99867 - DNA, 1182 bp, synthetic construct
  misc_feature 1..1182: note = Description of Artificial Sequence: Synthetic coding sequence
  source 1..1182: mol_type = other DNA
atggccgccgtgggcgccggcggcagcaccgccgcccccggccccggcgccgtgagcgccggcgccctggagcccggcaccgccagcgccgcccacagaagactgaagtacatcagcctggccgtgctggtggtgcagaacgccagcctgatcctgagcatcagatacgccagaaccctgcccggcgacagattcttcgccaccaccgccgtggtgatggccgaggtgctgaagggcctgacctgcctgctgctgctgttcgcccagaagagaggcaacgtgaagcacctggtgctgttcctgcacgaggccgtgctggtgcagtacgtggacaccctgaagctggccgtgcccagcctgatctacaccctgcagaacaacctgcagtacgtggccatcagcaacctgcccgccgccaccttccaggtgacctaccagctgaagatcctgaccaccgccctgttcagcgtgctgatgctgaacagaagcctgagcagactgcagtgggccagcctgctgctgctgttcaccggcgtggccatcgtgcaggcccagcaggccggcggcggcggccccagacccctggaccagaaccccggcgccggcctggccgccgtggtggccagctgcctgagcagcggcttcgccggcgtgtacttcgagaagatcctgaagggcagcagcggcagcgtgtggctgagaaacctgcagctgggcctgttcggcaccgccctgggcctggtgggcctgtggtgggccgagggcaccgccgtggccaccagaggcttcttcttcggctacacccccgccgtgtggggcgtggtgctgaaccaggccttcggcggcctgctggtggccgtggtggtgaagtacgccgacaacatcctgaagggcttcgccaccagcctgagcatcgtgctgagcaccgtggccagcatcagactgttcggcttccacgtggaccccctgttcgccctgggcgccggcctggtgatcggcgccgtgtacctgtacagcctgcccagaggcgccgccaaggccatcgccagcgccagcgccagcgccagcggcccctgcgtgcaccagcagccccccggccagcccccccccccccagctgagcagccacagaggcgacctgatcaccgagcccttcctgcccaagagcgtgctggtgaagtag

SEQ ID NO: 99868 - DNA, 675 bp, synthetic construct
  misc_feature 1..675: note = Description of Artificial Sequence: Synthetic coding sequence
  source 1..675: mol_type = other DNA
atggccgccgtgggcgccggcggcagcaccgccgcccccggccccggcgccgtgagcgccggcgccctggagcccggcaccgccagcgccgcccacagaagactgaagtacatcagcctggccgtgctggtggtgcagaacgccagcctgatcctgagcatcagatacgccagaaccctgcccggcgacagattcttcgccaccaccgccgtggtgatggccgaggtgctgaagggcctgacctgcctgctgctgctgttcgcccagaagagaggcaacgtgaagcacctggtgctgttcctgcacgaggccgtgctggtgcagtacgtggacaccctgaagctggccgtgcccagcctgatctacaccctgcagaacaacctgcagtacgtggccatcagcaacctgcccgccgccaccttccagcccagccccagatgcagccagagccacagcctgtgcctgtgcctgagactgagagccctgagaagccccgccgccagcagagccgccaccaccaccgccgccgtgttccccccctggagaccccaccacggcgccctgagcgccaaggtggcccaccagggcgagggcttcctggccgccggcatcgaggacatcggcctggccagcttcagcctgctggccctgggccccgccggcaccaagctgtag

SEQ ID NO: 99869 - DNA, 999 bp, synthetic construct
  misc_feature 1..999: note = Description of Artificial Sequence: Synthetic coding sequence
  source 1..999: mol_type = other DNA
atggccgccgtgggcgccggcggcagcaccgccgcccccggccccggcgccgtgagcgccggcgccctggagcccggcaccgccagcgccggcaacgtgaagcacctggtgctgttcctgcacgaggccgtgctggtgcagtacgtggacaccctgaagctggccgtgcccagcctgatctacaccctgcagaacaacctgcagtacgtggccatcagcaacctgcccgccgccaccttccaggtgacctaccagctgaagatcctgaccaccgccctgttcagcgtgctgatgctgaacagaagcctgagcagactgcagtgggccagcctgctgctgctgttcaccggcgtggccatcgtgcaggcccagcaggccggcggcggcggccccagacccctggaccagaaccccggcgccggcctggccgccgtggtggccagctgcctgagcagcggcttcgccggcgtgtacttcgagaagatcctgaagggcagcagcggcagcgtgtggctgagaaacctgcagctgggcctgttcggcaccgccctgggcctggtgggcctgtggtgggccgagggcaccgccgtggccaccagaggcttcttcttcggctacacccccgccgtgtggggcgtggtgctgaaccaggccttcggcggcctgctggtggccgtggtggtgaagtacgccgacaacatcctgaagggcttcgccaccagcctgagcatcgtgctgagcaccgtggccagcatcagactgttcggcttccacgtggaccccctgttcgccctgggcgccggcctggtgatcggcgccgtgtacctgtacagcctgcccagaggcgccgccaaggccatcgccagcgccagcgccagcgccagcggcccctgcgtgcaccagcagccccccggccagcccccccccccccagctgagcagccacagaggcgacctgatcaccgagcccttcctgcccaagagcgtgctggtgaagtag

SEQ ID NO: 99870 - DNA, 729 bp, synthetic construct
  misc_feature 1..729: note = Description of Artificial Sequence: Synthetic coding sequence
  source 1..729: mol_type = other DNA
atggccgccgtgggcgccggcggcagcaccgccgcccccggccccggcgccgtgagcgccggcgccctggagcccggcaccgccagcgccgcccacagaagactgaagtacatcagcctggccgtgctggtggtgcagaacgccagcctgatcctgagcatcagatacgccagaaccctgcccggcgacagattcttcgccaccaccgccgtggtgatggccgaggtgctgaagggcctgacctgcctgctgctgctgttcgcccagaagagaggcaacgtgaagcacctggtgctgttcctgcacgaggccgtgctggtgcagtacgtggacaccctgaagctggccgtgcccagcctgatctacaccctgcagaacaacctgcagtacgtggccatcagcaacctgcccgccgccaccttccagcccagccccagatgcagccagagccacagcctgtgcctgtgcctgagactgagagccctgagaagccccgccgccagcagagccgccaccaccaccgccgccgtgttccccccctggagaccccaccacggcgccctgagcgccaaggtgagcgccggcgaggtgagagccggcagcaacggcggcacccagggcagaggcaccggcgtggagggcgtgggccacctgcaggaccccagcagacacccccccggccccggcagcagcggcttcggcagatggagcttcctgcccggccactag

SEQ ID NO: 99871 - DNA, 531 bp, synthetic construct
  misc_feature 1..531: note = Description of Artificial Sequence: Synthetic coding sequence
  source 1..531: mol_type = other DNA
atggccgaggtgctgaagggcctgacctgcctgctgctgctgttcgcccagaagagaggcaacgtgaagcacctggtgctgttcctgcacgaggccgtgctggtgcagtacgtggacaccctgaagctggccgtgcccagcctgatctacaccctgcagaacaacctgcagtacgtggccatcagcaacctgcccgccgccaccttccaggtgacctaccagctgaagatcctgaccaccgccctgttcagcgtgctgatgctgaacagaagcctgagcagactgcagtgggccagcctgctgctgctgttcaccggcgtggccatcgtgcaggcccagcaggccggcggcggcggccccagacccctggaccagaaccccggcgccggcctggccgccgtggtggccagctgcctgagcagcggcttcgccggcgtgtacttcgagaagatcctgaagggcagcagcggcagcgtgtggctgagaaacctgcagctgggcctgttcggcaccgccctgggcctggtgtag

SEQ ID NO: 99872 - DNA, 1266 bp, synthetic construct
  misc_feature 1..1266: note = Description of Artificial Sequence: Synthetic coding sequence
  source 1..1266: mol_type = other DNA
atggccgccgtgggcgccggcggcagcaccgccgcccccggccccggcgccgtgagcgccggcgccctggagcccggcaccgccagcgccgagctgctgctgacctgggaggaggccgaggccagaggccagggcctgccccagcccctgcccgacaccagcgtgagaatccccgcccacagaagactgaagtacatcagcctggccgtgctggtggtgcagaacgccagcctgatcctgagcatcagatacgccagaaccctgcccggcgacagattcttcgccaccaccgccgtggtgatggccgaggtgctgaagggcctgacctgcctgctgctgctgttcgcccagaagagaggcaacgtgaagcacctggtgctgttcctgcacgaggccgtgctggtgcagtacgtggacaccctgaagctggccgtgcccagcctgatctacaccctgcagaacaacctgcagtacgtggccatcagcaacctgcccgccgccaccttccaggtgacctaccagctgaagatcctgaccaccgccctgttcagcgtgctgatgctgaacagaagcctgagcagactgcagtgggccagcctgctgctgctgttcaccggcgtggccatcgtgcaggcccagcaggccggcggcggcggccccagacccctggaccagaaccccggcgccggcctggccgccgtggtggccagctgcctgagcagcggcttcgccggcgtgtacttcgagaagatcctgaagggcagcagcggcagcgtgtggctgagaaacctgcagctgggcctgttcggcaccgccctgggcctggtgggcctgtggtgggccgagggcaccgccgtggccaccagaggcttcttcttcggctacacccccgccgtgtggggcgtggtgctgaaccaggccttcggcggcctgctggtggccgtggtggtgaagtacgccgacaacatcctgaagggcttcgccaccagcctgagcatcgtgctgagcaccgtggccagcatcagactgttcggcttccacgtggaccccctgttcgccctgggcgccggcctggtgatcggcgccgtgtacctgtacagcctgcccagaggcgccgccaaggccatcgccagcgccagcgccagcgccagcggcccctgcgtgcaccagcagccccccggccagcccccccccccccagctgagcagccacagaggcgacctgatcaccgagcccttcctgcccaagagcgtgctggtgaagtag

SEQ ID NO: 99873 - DNA, 1068 bp, synthetic construct
  misc_feature 1..1068: note = Description of Artificial Sequence: Synthetic coding sequence
  source 1..1068: mol_type = other DNA
atggccgaggtgcacagaagacagcacgccagagtgaagggcgaggcccccgccaagagcagcaccctgagagacgaggaggagctgggcatggccagcgccgagaccctgaccgtgttcctgaagctgctggccgccggcttctacggcgtgagcagcttcctgatcgtggtggtgaacaagagcgtgctgaccaactacagattccccagcagcctgtgcgtgggcctgggccagatggtggccaccgtggccgtgctgtgggtgggcaaggccctgagagtggtgaagttccccgacctggacagaaacgtgcccagaaagaccttccccctgcccctgctgtacttcggcaaccagatcaccggcctgttcagcaccaagaagctgaacctgcccatgttcaccgtgctgagaagattcagcatcctgttcaccatgttcgccgagggcgtgctgctgaagaagaccttcagctggggcatcaagatgaccgtgttcgccatgatcatcggcgccttcgtggccgccagcagcgacctggccttcgacctggagggctacgccttcatcctgatcaacgacgtgctgaccgccgccaacggcgcctacgtgaagcagaagctggacagcaaggagctgggcaagtacggcctgctgtactacaacgccctgttcatgatcctgcccaccctggccatcgcctacttcaccggcgacgcccagaaggccgtggagttcgagggctgggccgacaccctgttcctgctgcagttcaccctgagctgcgtgatgggcttcatcctgatgtacgccaccgtgctgtgcacccagtacaacagcgccctgaccaccaccatcgtgggctgcatcaagaacatcctgatcacctacatcggcatggtgttcggcggcgactacatcttcacctggaccaacttcatcggcctgaacatcagcatcgccggcagcctggtgtacagctacatcaccttcaccgaggagcagctgagcaagcagagcgaggccaacaacaagctggacatcaagggcaagggcgccgtgtag

SEQ ID NO: 99874 - DNA, 783 bp, synthetic construct
  misc_feature 1..783: note = Description of Artificial Sequence: Synthetic coding sequence
  source 1..783: mol_type = other DNA
atggtggccaccgtggccgtgctgtgggtgggcaaggccctgagagtggtgaagttccccgacctggacagaaacgtgcccagaaagaccttccccctgcccctgctgtacttcggcaaccagatcaccggcctgttcagcaccaagaagctgaacctgcccatgttcaccgtgctgagaagattcagcatcctgttcaccatgttcgccgagggcgtgctgctgaagaagaccttcagctggggcatcaagatgaccgtgttcgccatgatcatcggcgccttcgtggccgccagcagcgacctggccttcgacctggagggctacgccttcatcctgatcaacgacgtgctgaccgccgccaacggcgcctacgtgaagcagaagctggacagcaaggagctgggcaagtacggcctgctgtactacaacgccctgttcatgatcctgcccaccctggccatcgcctacttcaccggcgacgcccagaaggccgtggagttcgagggctgggccgacaccctgttcctgctgcagttcaccctgagctgcgtgatgggcttcatcctgatgtacgccaccgtgctgtgcacccagtacaacagcgccctgaccaccaccatcgtgggctgcatcaagaacatcctgatcacctacatcggcatggtgttcggcggcgactacatcttcacctggaccaacttcatcggcctgaacatcagctgcatctgccacagaggcctgtgcgagctgagagtgggcagcgccaccctgggcggctag

SEQ ID NO: 99875 - DNA, 1104 bp, synthetic construct
  misc_feature 1..1104: note = Description of Artificial Sequence: Synthetic coding sequence
  source 1..1104: mol_type = other DNA
atgagcagcagaagcgtgctgagccccgtggtgggcaccgacgcccccgaccagcacctggagctgaagaagccccaggagctgaaggagatggagagactgcccctggccaacgaggacaagaccatgttcgccaacctgaagtacgtgagcctgggcatcctggtgttccagaccaccagcctggtgctgaccatgagatacagcagaaccctgaaggaggagggccccagatacctgagcagcaccgccgtggtggtggccgagctgctgaagatcatggcctgcatcctgctggtgtacaaggacagcaagtgcagcctgagagccctgaacagagtgctgcacgacgagatcctgaacaagcccatggagaccctgaagctggccatccccagcggcatctacaccctgcagaacaacctgctgtacgtggccctgagcaacctggacgccgccacctaccaggtgacctaccagctgaagatcctgaccaccgccctgttcagcgtgagcatgctgagcaagaagctgggcgtgtaccagtggctgagcctggtgatcctgatgaccggcgtggccttcgtgcagtggcccagcgacagccagctggacagcaaggagctgagcgccggcagccagttcgtgggcctgatggccgtgctgaccgcctgcttcagcagcggcttcgccggcgtgtacttcgagaagatcctgaaggagaccaagcagagcgtgtggatcagaaacatccagctgggcttcttcggcagcatcttcggcctgatgggcgtgtacatctacgacggcgagctggtgagcaagaacggcttcttccagggctacaacagactgacctggatcgtggtggtgctgcaggccctgggcggcctggtgatcgccgccgtgatcaagtacgccgacaacatcctgaagggcttcgccaccagcctgagcatcatcctgagcaccctgatcagctacttctggctgcaggacttcgtgcccaccagcgtgttcttcctgggcgccatcctggtgatcaccgccaccttcctgtacggctacgaccccaagcccgccggcaaccccaccaaggcctag

SEQ ID NO: 99876 - DNA, 978 bp, synthetic construct
  misc_feature 1..978: note = Description of Artificial Sequence: Synthetic coding sequence
  source 1..978: mol_type = other DNA
atgttcgccaacctgaagtacgtgagcctgggcatcctggtgttccagaccaccagcctggtgctgaccatgagatacagcagaaccctgaaggaggagggccccagatacctgagcagcaccgccgtggtggtggccgagctgctgaagatcatggcctgcatcctgctggtgtacaaggacagcaagtgcagcctgagagccctgaacagagtgctgcacgacgagatcctgaacaagcccatggagaccctgaagctggccatccccagcggcatctacaccctgcagaacaacctgctgtacgtggccctgagcaacctggacgccgccacctaccaggtgacctaccagctgaagatcctgaccaccgccctgttcagcgtgagcatgctgagcaagaagctgggcgtgtaccagtggctgagcctggtgatcctgatgaccggcgtggccttcgtgcagtggcccagcgacagccagctggacagcaaggagctgagcgccggcagccagttcgtgggcctgatggccgtgctgaccgcctgcttcagcagcggcttcgccggcgtgtacttcgagaagatcctgaaggagaccaagcagagcgtgtggatcagaaacatccagctgggcttcttcggcagcatcttcggcctgatgggcgtgtacatctacgacggcgagctggtgagcaagaacggcttcttccagggctacaacagactgacctggatcgtggtggtgctgcaggccctgggcggcctggtgatcgccgccgtgatcaagtacgccgacaacatcctgaagggcttcgccaccagcctgagcatcatcctgagcaccctgatcagctacttctggctgcaggacttcgtgcccaccagcgtgttcttcctgggcgccatcctggtgatcaccgccaccttcctgtacggctacgaccccaagcccgccggcaaccccaccaaggcctag

SEQ ID NO: 99877 - DNA, 675 bp, synthetic construct
  misc_feature 1..675: note = Description of Artificial Sequence: Synthetic coding sequence
  source 1..675: mol_type = other DNA
atgttcgccaacctgaagtacgtgagcctgggcatcctggtgttccagaccaccagcctggtgctgaccatgagatacagcagaaccctgaaggaggagggccccagatacctgagcagcaccgccgtggtggtggccgagctgctgaagatcatggcctgcatcctgctggtgtacaaggacagcaagtgcagcctgagagccctgaacagagtgctgcacgacgagatcctgaacaagcccatggagaccctgaagctggccatccccagcggcatctacaccctgcagaacaacctgctgtacgtggccctgagcaacctggacgccgccacctaccaggtgacctaccagctgaagatcctgaccaccgccctgttcagcgtgagcatgctgagcaagaagctgggcgtgtaccagtggctgagcctggtgatcctgatgaccggcgtggccttcgtgcagtggcccagcgacagccagctggacagcaaggagctgagcgccggcagccagttcgtgggcctgatggccgtgctgaccgcctgcttcagcagcggcttcgccggcgtgtacttcgagaagatcctgaaggagaccaagcagagcgtgtggatcagaaacatccagctgggcttcttcggcagcatcttcggcctgatgggcgtgtactag

SEQ ID NO: 99878 - DNA, 978 bp, synthetic construct; identical to SEQ ID NO: 99876
  misc_feature 1..978: note = Description of Artificial Sequence: Synthetic coding sequence
  source 1..978: mol_type = other DNA

SEQ ID NO: 99879 - DNA, 663 bp, synthetic construct
  misc_feature 1..663: note = Description of Artificial Sequence: Synthetic coding sequence
  source 1..663: mol_type = other DNA
atgttcgccaacctgaagtacgtgagcctgggcatcctggtgttccagaccaccagcctggtgctgaccatgagatacagcagaaccctgaaggaggagggccccagatacctgagcagcaccgccgtggtggtggccgagctgctgaagatcatggcctgcatcctgctggtgtacaaggacagcaagtgcagcctgagagccctgaacagagtgctgcacgacgagatcctgaacaagcccatggagaccctgaagctggccatccccagcggcatctacaccctgcagaacaacctgctgtacgtggccctgagcaacctggacgccgccacctaccaggtgacctaccagctgaagatcctgaccaccgccctgttcagcgtgagcatgctgagcaagaagctgggcgtgtaccagtggctgagcctggtgatcctgatgaccggcgtggccttcgtgcagtggcccagcgacagccagctggacagcaaggagctgagcgccggcagccagttcgtgggcctgatggccgtgctgaccgcctgcttcagcagcggcttcgccggcgtgtacttcgagaagatcctgaaggagaccaagcagagcgtgtggatcagaaacatccagctggtgagcttcagcctggagcccagcctgtag

SEQ ID NO: 99880 - DNA, 258 bp, synthetic construct
  misc_feature 1..258: note = Description of Artificial Sequence: Synthetic coding sequence
  source 1..258: mol_type = other DNA
atgttcgccaacctgaagtacgtgagcctgggcatcctggtgttccagaccaccagcctggtgctgaccatgagatacagcagaaccctgaaggaggagggccccagatacctgagcagcaccgccgtggtggtggccgagctgctgaagatcatggcctgcatcctgctggtgtacaaggacagcaagtgcagcctgagagccctgaacagagtgctgcacgacgagatcctgaacaagcccatggagaccctgtag

SEQ ID NO: 99881 - DNA, 1104 bp, synthetic construct; identical to SEQ ID NO: 99875
  misc_feature 1..1104: note = Description of Artificial Sequence: Synthetic coding sequence
  source 1..1104: mol_type = other DNA

SEQ ID NO: 99882 - DNA, 969 bp, synthetic construct
  misc_feature 1..969: note = Description of Artificial Sequence: Synthetic coding sequence
  source 1..969: mol_type = other DNA
atggccagcagcagcagcctggtgcccgacagactgagactgcccctgtgcttcctgggcgtgttcgtgtgctacttctactacggcatcctgcaggagaagatcaccagaggcaagtacggcgagggcgccaagcaggagaccttcaccttcgccctgaccctggtgttcatccagtgcgtgatcaacgccgtgttcgccaagatcctgatccagttcttcgacaccgccagagtggacagaaccagaagctggctgtacgccgcctgcagcatcagctacctgggcgccatggtgagcagcaacagcgccctgcagttcgtgaactaccccacccaggtgctgggcaagagctgcaagcccatccccgtgatgctgctgggcgtgaccctgctgaagaagaagtaccccctggccaagtacctgtgcgtgctgctgatcgtggccggcgtggccctgttcatgtacaagcccaagaaggtggtgggcatcgaggagcacaccgtgggctacggcgagctgctgctgctgctgagcctgaccctggacggcctgaccggcgtgagccaggaccacatgagagcccactaccagaccggcagcaaccacatgatgctgaacatcaacctgtggagcaccctgctgctgggcatgggcatcctgttcaccggcgagctgtgggagttcctgagcttcgccgagagataccccgccatcatctacaacatcctgctgttcggcctgaccagcgccctgggccagagcttcatcttcatgaccgtggtgtacttcggccccctgacctgcagcatcatcaccaccaccagaaagttcttcaccatcctggccagcgtgatcctgttcgccaaccccatcagccccatgcagtgggtgggcaccgtgctggtgttcctgggcctgggcctggacgccaagttcggcaagggcgccaagaagaccagccactag

SEQ ID NO: 99883 - DNA, 450 bp, synthetic construct
  misc_feature 1..450: note = Description of Artificial Sequence: Synthetic coding sequence
  source 1..450: mol_type = other DNA
ccccagagctgcctgatcggcaagatcagcagagccagagaccagagcagaggctgcagattcccctggcccagcggcatggagcccagaaccagagtgggccccctgctggtgctgcccgacgcctgcaagcagcccatcagacccagaccctggtgccacagcagaaacaccgtgagcagctgcctgggcaccagaggcaagtacggcgagggcgccaagcaggagaccttcaccttcgccctgaccctggtgttcatccagtgcgtgatcaacgccgtgttcgccaagatctggtggatcgtgcccggcgccggcagcatgctgcccgtgctgagccccatctgggtgccctggagccccgccatccagcactacagcctgagcaccacccagctgagaagcctggtgaaccccgccagccagagccagagctgcagcctgggctag

SEQ ID NO: 99884 - DNA, 1080 bp, synthetic construct
  misc_feature 1..1080: note = Description of Artificial Sequence: Synthetic coding sequence
  source 1..1080: mol_type = other DNA
atgagacccctgccccccgtgggcgacgtgagactggagctgagcccccccccccccctgctgcccgtgcccgtggtgagcggcagccccgtgggcagcagcggcagactgatggccagcagcagcagcctggtgcccgacagactgagactgcccctgtgcttcctgggcgtgttcgtgtgctacttctactacggcatcctgcaggagaagatcaccagaggcaagtacggcgagggcgccaagcaggagaccttcaccttcgccctgaccctggtgttcatccagtgcgtgatcaacgccgtgttcgccaagatcctgatccagttcttcgacaccgccagagtggacagaaccagaagctggctgtacgccgcctgcagcatcagctacctgggcgccatggtgagcagcaacagcgccctgcagttcgtgaactaccccacccaggtgctgggcaagagctgcaagcccatccccgtgatgctgctgggcgtgaccctgctgaagaagaagtaccccctggccaagtacctgtgcgtgctgctgatcgtggccggcgtggccctgttcatgtacaagcccaagaaggtggtgggcatcgaggagcacaccgtgggctacggcgagctgctgctgctgctgagcctgaccctggacggcctgaccggcgtgagccaggaccacatgagagcccactaccagaccggcagcaaccacatgatgctgaacatcaacctgtggagcaccctgctgctgggcatgggcatcctgttcaccggcgagctgtgggagttcctgagcttcgccgagagataccccgccatcatctacaacatcctgctgttcggcctgaccagcgccctgggccagagcttcatcttcatgaccgtggtgtacttcggccccctgacctgcagcatcatcaccaccaccagaaagttcttcaccatcctggccagcgtgatcctgttcgccaaccccatcagccccatgcagtgggtgggcaccgtgctggtgttcctgggcctgggcctggacgccaagttcggcaagggcgccaagaagaccagccactag

SEQ ID NO: 99885 - DNA, 720 bp, synthetic construct
  misc_feature 1..720: note = Description of Artificial Sequence: Synthetic coding sequence
  source 1..720: mol_type = other DNA
atggccagcagcagcagcctggtgcccgacagactgagactgcccctgtgcttcctgggcgtgttcgtgtgctacttctactacggcatcctgcaggagaagatcaccagaggcaagtacggcgagggcgccaagcaggagaccttcaccttcgccctgaccctggtgttcatccagtgcgtgatcaacgccgtgttcgccaagatcctgatccagttcttcgacaccgccagagtggacagaaccagaagctggctgtacgccgcctgcagcatcagctacctgggcgccatggtgagcagcaacagcgccctgcagttcgtgaactaccccacccaggtgctgggcaagagctgcaagcccatccccgtgatgctgctgggcgtgaccctgctgaagaagaagtaccccctggccaagtacctgtgcgtgctgctgatcgtggccggcgtggccctgttcatgtacaagcccaagaaggtggtgggcatcgaggagcacaccgtgggctacggcgagctgctgctgctgctgagcctgaccctggacggcctgaccggcgtgagccaggaccacatgagagcccactaccagaccggcagcaaccacatgatgctgaacatcaacctgtggagcaccctgctgctgggcatgggcgagagccagttctgctgcagcagccacgtgagccccgagggcagactgcccagcagcttctag

SEQ ID NO: 99886 - DNA, 597 bp, synthetic construct
  misc_feature 1..597: note = Description of Artificial Sequence: Synthetic coding sequence
  source 1..597: mol_type = other DNA
atgctgctgggcgtgaccctgctgaagaagaagtaccccctggccaagtacctgtgcgtgctgctgatcgtggccggcgtggccctgttcatgtacaagcccaagaaggtggtgggcatcgaggagcacaccgtgggctacggcgagctgctgctgctgctgagcctgaccctggacggcctgaccggcgtgagccaggaccacatgagagcccactaccagaccggcagcaaccacatgatgctgaacatcaacctgtggagcaccctgctgctgggcatgggcatcctgttcaccggcgagctgtgggagttcctgagcttcgccgagagataccccgccatcatctacaacatcctgctgttcggcctgaccagcgccctgggccagagcttcatcttcatgaccgtggtgtacttcggccccctgacctgcagcatcatcaccaccaccagaaagttcttcaccatcctggccagcgtgatcctgttcgccaaccccatcagccccatgcagtgggtgggcaccgtgctggtgttcctgggcctgggcctggacgccaagttcggcaagggcgccaagaagaccagccactag

SEQ ID NO: 99887 - DNA, 570 bp, synthetic construct
  misc_feature 1..570: note = Description of Artificial Sequence: Synthetic coding sequence
  source 1..570: mol_type = other DNA
atgctgctgggcgtgaccctgctgaagaagaagtaccccctggccaagtacctgtgcgtgctgctgatcgtggccggcgtggccctgttcatgtacaagcccaagaaggtggtgggcatcgaggagcacaccgtgggctacggcgagctgctgctgctgctgagcctgaccctggacggcctgaccggcgtgagccaggaccacatgagagcccactaccagaccggcagcaaccacatgatgctgaacatcaacctgtggagcaccctgctgctgggcatgggcatcctgttcaccggcgagctgtgggagttcctgagcttcgccgagagataccccgccatcatctacaacatcctgctgttcggcctgaccagcgccctgggccagagcttcatcttcatgaccgtggtgtacttcggccccctgacctgcagcatcatcaccaccaccagaaagttcttcaccatcctggccagcgtgatcctgttcgccaaccccatcagccccatgcagtgggtgggcaccgtgctggtgttcctggccatgggcagctgctgcgtggcctag

SEQ ID NO: 99888 - DNA, 1179 bp, synthetic construct
  misc_feature 1..1179: note = Description of Artificial Sequence: Synthetic coding sequence
  source 1..1179: mol_type = other DNA
atggacgccagatggtgggccgtggtggtgctggccgccttccccagcctgggcgccggcggcgagacccccgaggccccccccgagagctggacccagctgtggttcttcagattcgtggtgaacgccgccggctacgccagcttcatggtgcccggctacctgctggtgcagtacttcagaagaaagaactacctggagaccggcagaggcctgtgcttccccctggtgaaggcctgcgtgttcggcaacgagcccaaggccagcgacgaggtgcccctggcccccagaaccgaggccgccgagaccacccccatgtggcaggccctgaagctgctgttctgcgccaccggcctgcaggtgagctacctgacctggggcgtgctgcaggagagagtgatgaccagaagctacggcgccaccgccaccagccccggcgagagattcaccgacagccagttcctggtgctgatgaacagagtgctggccctgatcgtggccggcctgagctgcgtgctgtgcaagcagcccagacacggcgcccccatgtacagatacagcttcgccagcctgagcaacgtgctgagcagctggtgccagtacgaggccctgaagttcgtgagcttccccacccaggtgctggccaaggccagcaaggtgatccccgtgatgctgatgggcaagctggtgagcagaagaagctacgagcactgggagtacctgaccgccaccctgatcagcatcggcgtgagcatgttcctgctgagcagcggccccgagcccagaagcagccccgccaccaccctgagcggcctgttcaccgtgggcagcctgctggagcagggcgccctgctggagggcaccagattcatgggcagacacagcgagttcgccgcccacgccctgctgctgagcatctgcagcgcctgcggccagctgttcatcttctacaccatcggccagttcggcgccgccgtgttcaccatcatcatgaccctgagacaggccttcgccatcctgctgagctgcctgctgtacggccacaccgtgaccgtggtgggcggcctgggcgtggccgtggtgttcgccgccctgctgctgagagtgtacgccagaggcagactgaagcagagaggcaagaaggccgtgcccgtggagagccccgtgcagaaggtgtag

SEQ ID NO: 99889 - DNA, 1299 bp, synthetic construct
  misc_feature 1..1299: note = Description of Artificial Sequence: Synthetic coding sequence
  source 1..1299: mol_type = other DNA
atggacgccagatggtgggccgtggtggtgctggccgccttccccagcctgggcgccggcggcgagacccccgaggccccccccgagagctggacccagctgtggttcttcagattcgtggtgaacgccgccggctacgccagcttcatggtgcccggctacctgctggtgcagtacttcagaagaaagaactacctggagaccggcagaggcctgtgcttccccctggtgaaggcctgcgtgttcggcaacgagcccaaggccagcgacgaggtgcccctggcccccagaaccgaggccgccgagaccacccccatgtggcaggccctgaagctgctgttctgcgccaccggcctgcaggtgagctacctgacctggggcgtgctgcaggagagagtgatgaccagaagctacggcgccaccgccaccagccccggcgagagattcaccgacagccagttcctggtgctgatgaacagagtgctggccctgatcgtggccggcctgagctgcgtgctgtgcaagcagcccagacacggcgcccccatgtacagatacagcttcgccagcctgagcaacgtgctgagcagctggtgccagtacgaggccctgaagttcgtgagcttccccacccaggtgctggccaaggccagcaaggtgatccccgtgatgctgatgggcaagctggtgagcagaagaagctacgagcactgggagtacctgaccgccaccctgatcagcatcggcgtgagcatgttcctgctgagcagcggccccgagcccagaagcagccccgccaccaccctgagcggcctgatcctgctggccggctacatcgccttcgacagcttcaccagcaactggcaggacgccctgttcgcctacaagatgagcagcgtgcagatgatgttcggcgtgaacttcttcagctgcctgttcaccgtgggcagcctgctggagcagggcgccctgctggagggcaccagattcatgggcagacacagcgagttcgccgcccacgccctgctgctgagcatctgcagcgcctgcggccagctgttcatcttctacaccatcggccagttcggcgccgccgtgttcaccatcatcatgaccctgagacaggccttcgccatcctgctgagctgcctgctgtacggccacaccgtgaccgtggtgggcggcctgggcgtggccgtggtgttcgccgccctgctgctgagagtgtacgccagaggcagactgaagcagagaggcaagaaggccgtgcccgtggagagccccgtgcagaaggtgtag

SEQ ID NO: 99890 - DNA, 900 bp, synthetic construct
  misc_feature 1..900: note = Description of Artificial Sequence: Synthetic coding sequence
  source 1..900: mol_type = other DNA
atgaccagaagctacggcgccaccgccaccagccccggcgagagattcaccgacagccagttcctggtgctgatgaacagagtgctggccctgatcgtggccggcctgagctgcgtgctgtgcaagcagcccagacacggcgcccccatgtacagatacagcttcgccagcctgagcaacgtgctgagcagctggtgccagtacgaggccctgaagttcgtgagcttccccacccaggtgctggccaaggccagcaaggtgatccccgtgatgctgatgggcaagctggtgagcagaagaagctacgagcactgggagtacctgaccgccaccctgatcagcatcggcgtgagcatgttcctgctgagcagcggccccgagcccagaagcagccccgccaccaccctgagcggcctgatcctgctggccggctacatcgccttcgacagcttcaccagcaactggcaggacgccctgttcgcctacaagatgagcagcgtgcagatgatgttcggcgtgaacttcttcagctgcctgttcaccgtgggcagcctgctggagcagggcgccctgctggagggcaccagattcatgggcagacacagcgagttcgccgcccacgccctgctgctgagcatctgcagcgcctgcggccagctgttcatcttctacaccatcggccagttcggcgccgccgtgttcaccatcatcatgaccctgagacaggccttcgccatcctgctgagctgcctgctgtacggccacaccgtgaccgtggtgggcggcctgggcgtggccgtggtgttcgccgccctgctgctgagagtgtacgccagaggcagactgaagcagagaggcaagaaggccgtgcccgtggagagccccgtgcagaaggtgtag

SEQ ID NO: 99891 - DNA, 1020 bp, synthetic construct
  misc_feature 1..1020: note = Description of Artificial Sequence: Synthetic coding sequence
  source 1..1020: mol_type = other DNA
atgctgctggccatgcccgccctgtggtacctggccaccagctggtgcagcaccagcggcggcagaaccacctggagacccgtgagctacctgacctggggcgtgctgcaggagagagtgatgaccagaagctacggcgccaccgccaccagccccggcgagagattcaccgacagccagttcctggtgctgatgaacagagtgctggccctgatcgtggccggcctgagctgcgtgctgtgcaagcagcccagacacggcgcccccatgtacagatacagcttcgccagcctgagcaacgtgctgagcagctggtgccagtacgaggccctgaagttcgtgagcttccccacccaggtgctggccaaggccagcaaggtgatccccgtgatgctgatgggcaagctggtgagcagaagaagctacgagcactgggagtacctgaccgccaccctgatcagcatcggcgtgagcatgttcctgctgagcagcggccccgagcccagaagcagccccgccaccaccctgagcggcctgatcctgctggccggctacatcgccttcgacagcttcaccagcaactggcaggacgccctgttcgcctacaagatgagcagcgtgcagatgatgttcggcgtgaacttcttcagctgcctgttcaccgtgggcagcctgctggagcagggcgccctgctggagggcaccagattcatgggcagacacagcgagttcgccgcccacgccctgctgctgagcatctgcagcgcctgcggccagctgttcatcttctacaccatcggccagttcggcgccgccgtgttcaccatcatcatgaccctgagacaggccttcgccatcctgctgagctgcctgctgtacggccacaccgtgaccgtggtgggcggcctgggcgtggccgtggtgttcgccgccctgctgctgagagtgtacgccagaggcagactgaagcagagaggcaagaaggccgtgcccgtggagagccccgtgcagaaggtgtag

SEQ ID NO: 99892 - DNA, 852 bp, synthetic construct
  misc_feature 1..852: note = Description of Artificial Sequence: Synthetic coding sequence
  source 1..852: mol_type = other DNA
atggacctgacccagcaggccaaggacatccagaacatcaccgtgcaggagaccaacaagaacaacagcgagagcatcgagtgcagcaagatcaccatggacctgaagttcaacaacagcagaaagtacatcagcatcaccgtgcccagcaagacccagaccatgagcccccacatcaagagcgtggacgacgtggtggtgctgggcatgaacctgagcaagttcaacaagctgacccagttcttcatctgcgtggccggcgtgttcgtgttctacctgatctacggctacctgcaggagctgatcttcagcgtggagggcttcaagagctgcggctggtacctgaccctggtgcagttcgccttctacagcatcttcggcctgatcgagctgcagctgatccaggacaagagaagaagaatccccggcaagacctacatgatcatcgccttcctgaccgtgggcaccatgggcctgagcaacaccagcctgggctacctgaactaccccacccaggtgatcttcaagtgctgcaagctgatccccgtgatgctgggcggcgtgttcatccagggcaagagatacaacgtggccgacgtgagcgccgccatctgcatgagcctgggcctgatctggttcaccctggccgacagcaccaccgcccccaacttcaacctgaccggcgtggtgctgatcagcctggccctgtgcgccgacgccgtgatcggcaacgtgcaggagaaggccatgaagctgcacaacgccagcaacagcgagatgaacatcaccaccagcagctacagcggcgtgttcatcttccccaacaagctgaagatccccctggtgctgtag

SEQ ID NO: 99893 - DNA, 1206 bp, synthetic construct
  misc_feature 1..1206: note = Description of Artificial Sequence: Synthetic coding sequence
  source 1..1206: mol_type = other DNA
atggacctgacccagcaggccaaggacatccagaacatcaccgtgcaggagaccaacaagaacaacagcgagagcatcgagtgcagcaagatcaccatggacctgaagttcaacaacagcagaaagtacatcagcatcaccgtgcccagcaagacccagaccatgagcccccacatcaagagcgtggacgacgtggtggtgctgggcatgaacctgagcaagttcaacaagctgacccagttcttcatctgcgtggccggcgtgttcgtgttctacctgatctacggctacctgcaggagctgatcttcagcgtggagggcttcaagagctgcggctggtacctgaccctggtgcagttcgccttctacagcatcttcggcctgatcgagctgcagctgatccaggacaagagaagaagaatccccggcaagacctacatgatcatcgccttcctgaccgtgggcaccatgggcctgagcaacaccagcctgggctacctgaactaccccacccaggtgatcttcaagtgctgcaagctgatccccgtgatgctgggcggcgtgttcatccagggcaagagatacaacgtggccgacgtgagcgccgccatctgcatgagcctgggcctgatctggttcaccctggccgacagcaccaccgcccccaacttcaacctgaccggcgtggtgctgatcagcctggccctgtgcgccgacgccgtgatcggcaacgtgcaggagaaggccatgaagctgcacaacgccagcaacagcgagatggtgctgtacagctacagcatcggcttcgtgtacatcctgctgggcctgacctgcaccagcggcctgggccccgccgtgaccttctgcgccaagaaccccgtgagaacctacggctacgccttcctgttcagcctgaccggctacttcggcatcagcttcgtgctggccctgatcaagatcttcggcgccctgatcgccgtgaccgtgaccaccggcagaaaggccatgaccatcgtgctgagcttcatcttcttcgccaagcccttcaccttccagtacgtgtggagcggcctgctggtggtgctgggcatcttcctgaacgtgtacagcaagaacatggacaagatcagactgcccagcctgtacgacctgatcaacaagagcgtggaggccagaaagagcagaaccctggcccagaccgtgtag

SEQ ID NO: 99894 - DNA, 657 bp, synthetic construct
  misc_feature 1..657: note = Description of Artificial Sequence: Synthetic coding sequence
  source 1..657: mol_type = other DNA
atgctgagactggcccagacccccagaagactgcccagccccttcagagtgacctacagaccctggggcaccagagccttcggcgccttccccgtgttcggcacccagatcagcagcccccccgagaacctggacaccgcccacctgccccaccccgagggcgccttcgaggagtggatgagaagcggctggaagaagagagacctgacccagcaggccaaggacatccagaacatcaccgtgcaggagaccaacaagaacaacagcgagagcatcgagtgcagcaagatcaccatggacctgaagttcaacaacagcagaaagtacatcagcatcaccgtgcccagcaagacccagaccatgagcccccacatcaagagcgtggacgacgtggtggtgctgggcatgaacctgagcaagttcaacaagctgacccagttcttcatctgcgtggccggcgtgttcgtgttctacctgatctacggctacctgcaggagctgatcttcagcgtggagggcttcaagagctgcggctggtacctgaccctggtgcagttcgccttctacagcatcttcggcctgatcgagctgcagctgatccaggacaagagaagaagatacgtggtgtgcttctacttcctgatcttcctgtactag

SEQ ID NO: 99895 - DNA, 996 bp, synthetic construct
  misc_feature 1..996: note = Description of Artificial Sequence: Synthetic coding sequence
  source 1..996: mol_type = other DNA
atgagacccgccctggccgtgggcctggtgttcgccggctgctgcagcaacgtgatcttcctggagctgctggccagaaagcaccccggctgcggcaacatcgtgaccttcgcccagttcctgttcatcgccgtggagggcttcctgttcgaggccgacctgggcagaaagccccccgccatccccatcagatactacgccatcatggtgaccatgttcttcaccgtgagcgtggtgaacaactacgccctgaacctgaacatcgccatgcccctgcacatgatcttcagaagcggcagcctgatcgccaacatgatcctgggcatcatcatcctgaagaagagatacagcatcttcaagtacaccagcatcgccctggtgagcgtgggcatcttcatctgcaccttcatgagcgccaagcaggtgaccagccagagcagcctgagcgagaacgacggcttccaggccttcgtgtggtggctgctgggcatcggcgccctgaccttcgccctgctgatgagcgccagaatgggcatcttccaggagaccctgtacaagagattcggcaagcacagcaaggaggccctgttctacaaccacgccctgcccctgcccggcttcgtgttcctggccagcgacatctacgaccacgccgtgctgttcaacaagagcgagctgtacgagatccccgtgatcggcgtgaccctgcccatcatgtggttctacctgctgatgaacatcatcacccagtacgtgtgcatcagaggcgtgttcatcctgaccaccgagtgcgccagcctgaccgtgaccctggtggtgaccctgagaaagttcgtgagcctgatcttcagcatcctgtacttccagaaccccttcaccctgtggcactggctgggcaccctgttcgtgttcatcggcaccctgatgtacaccgaggtgtggaacaacctgggcaccaccaagagcgagccccagaaggacagcaagaagaactag

SEQ ID NO: 99896 - DNA, 1095 bp, synthetic construct
  misc_feature 1..1095: note = Description of Artificial Sequence: Synthetic coding sequence
  source 1..1095: mol_type = other DNA
atgaacagagcccccctgaagagaagcagaatcctgcacatggccctgaccggcgccagcgaccccagcgccgaggccgaggccaacggcgagaagcccttcctgctgagagccctgcagatcgccctggtggtgagcctgtactgggtgaccagcatcagcatggtgttcctgaacaagtacctgctggacagccccagcctgagactggacacccccatcttcgtgaccttctaccagtgcctggtgaccaccctgctgtgcaagggcctgagcgccctggccgcctgctgccccggcgccgtggacttccccagcctgagactggacctgagagtggccagaagcgtgctgcccctgagcgtggtgttcatcggcatgatcaccttcaacaacctgtgcctgaagtacgtgggcgtggccttctacaacgtgggcagaagcctgaccaccgtgttcaacgtgctgctgagctacctgctgctgaagcagaccaccagcttctacgccctgctgacctgcggcatcatcatcggcggcttctggctgggcgtggaccaggagggcgccgagggcaccctgagctggctgggcaccgtgttcggcgtgctggccagcctgtgcgtgagcctgaacgccatctacaccaccaaggtgctgcccgccgtggacggcagcatctggagactgaccttctacaacaacgtgaacgcctgcatcctgttcctgcccctgctgctgctgctgggcgagctgcaggccctgagagacttcgcccagctgggcagcgcccacttctggggcatgatgaccctgggcggcctgttcggcttcgccatcggctacgtgaccggcctgcagatcaagttcaccagccccctgacccacaacgtgagcggcaccgccaaggcctgcgcccagaccgtgctggccgtgctgtactacgaggagaccaagagcttcctgtggtggaccagcaacatgatggtgctgggcggcagcagcgcctacacctgggtgagaggctgggagatgaagaagacccccgaggagcccagccccaaggacagcgagaagagcgccatgggcgtgtag

SEQ ID NO: 99897 - DNA, 1056 bp, synthetic construct
  misc_feature 1..1056: note = Description of Artificial Sequence: Synthetic coding sequence
  source 1..1056: mol_type = other DNA
atggccctgaccggcgccagcgaccccagcgccgaggccgaggccaacggcgagaagcccttcctgctgagagccctgcagatcgccctggtggtgagcctgtactgggtgaccagcatcagcatggtgttcctgaacaagtacctgctggacagccccagcctgagactggacacccccatcttcgtgaccttctaccagtgcctggtgaccaccctgctgtgcaagggcctgagcgccctggccgcctgctgccccggcgccgtggacttccccagcctgagactggacctgagagtggccagaagcgtgctgcccctgagcgtggtgttcatcggcatgatcaccttcaacaacctgtgcctgaagtacgtgggcgtggccttctacaacgtgggcagaagcctgaccaccgtgttcaacgtgctgctgagctacctgctgctgaagcagaccaccagcttctacgccctgctgacctgcggcatcatcatcggcggcttctggctgggcgtggaccaggagggcgccgagggcaccctgagctggctgggcaccgtgttcggcgtgctggccagcctgtgcgtgagcctgaacgccatctacaccaccaaggtgctgcccgccgtggacggcagcatctggagactgaccttctacaacaacgtgaacgcctgcatcctgttcctgcccctgctgctgctgctgggcgagctgcaggccctgagagacttcgcccagctgggcagcgcccacttctggggcatgatgaccctgggcggcctgttcggcttcgccatcggctacgtgaccggcctgcagatcaagttcaccagccccctgacccacaacgtgagcggcaccgccaaggcctgcgcccagaccgtgctggccgtgctgtactacgaggagaccaagagcttcctgtggtggaccagcaacatgatggtgctgggcggcagcagcgcctacacctgggtgagaggctgggagatgaagaagacccccgaggagcccagccccaaggacagcgagaagagcgccatgggcgtgtag

SEQ ID NO: 99898 - DNA, 1056 bp, synthetic construct; identical to SEQ ID NO: 99897
  misc_feature 1..1056: note = Description of Artificial Sequence: Synthetic coding sequence
  source 1..1056: mol_type = other DNA

SEQ ID NO: 99899 - DNA, 219 bp, synthetic construct
  misc_feature 1..219: note = Description of Artificial Sequence: Synthetic coding sequence
  source 1..219: mol_type = other DNA
atggccctgaccggcgccagcgaccccagcgccgaggccgaggccaacggcgagaagcccttcctgctgagagccctgcagatcgccctggtggtgagcctgtactgggtgaccagcatcagcatggtgttcctgaacaagtacctgctggacagccccagcctgagactggacacccccatcttcgtgaccttctaccagtgcctggtgaccacctag

SEQ ID NO: 99900 - DNA, 498 bp, synthetic construct
  misc_feature 1..498: note = Description of Artificial Sequence: Synthetic coding sequence
  source 1..498: mol_type = other DNA
atggccctgaccggcgccagcgaccccagcgccgaggccgaggccaacggcgagaagcccttcctgctgagagccctgcagatcgccctggtggtgagcctgtactgggtgaccagcatcagcatggtgttcctgaacaagtacctgctggacagccccagcctgagactggacacccccatcttcgtgaccttctaccagtgcctggtgaccaccctgctgtgcaagggcctgagcgccctggccgcctgctgccccggcgccgtggacttccccagcctgagactggacctgagagtggccagaagcgtgctgcccctgagcgtggtgttcatcggcatgatcaccttcaacaacctgtgcctgaagtacgtgggcgtggccttctacaacgtgggcagaagcctgaccaccgtgttcaacgtgctgctgagctacctgctgctgaagcagaccaccagcttctacgccctgctgacctgcggcatcatcatctag

SEQ ID NO: 99901 - DNA, 741 bp, synthetic construct
  misc_feature 1..741: note = Description of Artificial Sequence: Synthetic coding sequence
  source 1..741: mol_type = other DNA
atgaacagagcccccctgaagagaagcagaatcctgcacatggccctgaccggcgccagcgaccccagcgccgaggccgaggccaacggcgagaagcccttcctgctgagagccctgcagatcgccctggtggtgagcctgtactgggtgaccagcatcagcatggtgttcctgaacaagtacctgctggacagccccagcctgagactggacacccccatcttcgtgaccttctaccagtgcctggtgaccaccctgctgtgcaagggcctgagcgccctggccgcctgctgccccggcgccgtggacttccccagcctgagactggacctgagagtggccagaagcgtgctgcccctgagcgtggtgttcatcggcatgatcaccttcaacaacctgtgcctgaagtacgtgggcgtggccttctacaacgtgggcagaagcctgaccaccgtgttcaacgtgctgctgagctacctgctgctgaagcagaccaccagcttctacgccctgctgacctgcggcatcatcatcggcggcttctggctgggcgtggaccaggagggcgccgagggcaccctgagctggctgggcaccgtgttcggcgtgctggccagcctgtgcgtgagcctgaacgccatctacaccaccaaggtgctgcccgccgtggacggcagcatctggagactgaccttctacaacaacgtgaacgcctgcatcctgttcctgcccctgctgtag

SEQ ID NO: 99902 - DNA, 1014 bp, synthetic construct
  misc_feature 1..1014: note = Description of Artificial Sequence: Synthetic coding sequence
  source 1..1014: mol_type = other DNA
atgaccgccggcggccaggccgaggccgagggcgccggcggcgagcccggcgccgccagactgcccagcagagtggccagactgctgagcgccctgttctacggcacctgcagcttcctgatcgtgctggtgaacaaggccctgctgaccacctacggcttccccagccccatcttcctgggcatcggccagatggccgccaccatcatgatcctgtacgtgagcaagctgaacaagatcatccacttccccgacttcgacaagaagatccccgtgaagctgttccccctgcccctgctgtacgtgggcaaccacatcagcggcctgagcagcaccagcaagctgagcctgcccatgttcaccgtgctgagaaagttcaccatccccctgaccctgctgctggagaccatcatcctgggcaagcagtacagcctgaacatcatcctgagcgtgttcgccatcatcctgggcgccttcatcgccgccggcagcgacctggccttcaacctggagggctacatcttcgtgttcctgaacgacatcttcaccgccgccaacggcgtgtacaccaagcagaagatggaccccaaggagctgggcaagtacggcgtgctgttctacaacgcctgcttcatgatcatccccaccctgatcatcagcgtgagcaccggcgacctgcagcaggccaccgagttcaaccagtggaagaacgtggtgttcatcctgcagttcctgctgagctgcttcctgggcttcctgctgatgtacagcaccgtgctgtgcagctactacaacagcgccctgaccaccgccgtggtgggcgccatcaagaacgtgagcgtggcctacatcggcatcctgatcggcggcgactacatcttcagcctgctgaacttcgtgggcctgaacatctgcatggccggcggcctgagatacagcttcctgaccctgagcagccagctgaagcccaagcccgtgggcgaggagaacatctgcctggacctgaagagctag

SEQ ID NO: 99903 - DNA, 492 bp, synthetic construct
  misc_feature 1..492: note = Description of Artificial Sequence: Synthetic coding sequence
  source 1..492: mol_type = other DNA
atgaccgccggcggccaggccgaggccgagggcgccggcggcgagcccggcgccgccagactgcccagcagagtggccagactgctgagcgccctgttctacggcacctgcagcttcctgatcgtgctggtgaacaaggccctgctgaccacctacggcttccccagccccatcttcctgggcatcggccagatggccgccaccatcatgatcctgtacgtgagcaagctgaacaagatcatccacttccccgacttcgacaagaagatccccgtgaagctgttccccctgcccctgctgtacgtgggcaaccacatcagcggcctgagcagcaccagcaagctgagcctgcccatgttcaccgtgctgagaaagttcaccatccccctgaccctgctgctggagaccatcatcctgggcaagcagtacagcctgaacatcatcctgagcgtgttcgccatcatcctgggcgccttcatcgccgccggctag

SEQ ID NO: 99904 - DNA, 750 bp, synthetic construct
  misc_feature 1..750: note = Description of Artificial Sequence: Synthetic coding sequence
  source 1..750: mol_type = other DNA
atgaccgccggcggccaggccgaggccgagggcgccggcggcgagcccggcgccgccagactgcccagcagagtggccagactgctgagcgccctgttctacggcacctgcagcttcctgatcgtgctggtgaacaaggccctgctgaccacctacggcttccccagccccatcttcctgggcatcggccagatggccgccaccatcatgatcctgtacgtgagcaagctgaacaagatcatccacttccccgacttcgacaagaagatccccgtgaagctgttccccctgcccctgctgtacgtgggcaaccacatcagcggcctgagcagcaccagcaagctgagcctgcccatgttcaccgtgctgagaaagttcaccatccccctgaccctgctgctggagaccatcatcctgggcaagcagtacagcctgaacatcatcctgagcgtgttcgccatcatcctgggcgccttcatcgccgccggcttcctgctgatgtacagcaccgtgctgtgcagctactacaacagcgccctgaccaccgccgtggtgggcgccatcaagaacgtgagcgtggcctacatcggcatcctgatcggcggcgactacatcttcagcctgctgaacttcgtgggcctgaacatctgcatggccggcggcctgagatacagcttcctgaccctgagcagccagctgaagcccaagcccgtgggcgaggagaacatctgcctggacctgaagagctag

SEQ ID NO: 99905 - DNA, 1251 bp, synthetic construct
  misc_feature 1..1251: note = Description of Artificial Sequence: Synthetic coding sequence
  source 1..1251: mol_type = other DNA
atgagacagctgtgcagaggcagagtgctgggcatcagcgtggccatcgcccacggcgtgttcagcggcagcctgaacatcctgctgaagttcctgatcagcagataccagttcagcttcctgaccctggtgcagtgcctgaccagcagcaccgccgccctgagcctggagctgctgagaagactgggcctgatcgccgtgccccccttcggcctgagcctggccagaagcttcgccggcgtggccgtgctgagcaccctgcagagcagcctgaccctgtggagcctgagaggcctgagcctgcccatgtacgtggtgttcaagagatgcctgcccctggtgaccatgctgatcggcgtgctggtgctgaagaacggcgcccccagccccggcgtgctggccgccgtgctgatcaccacctgcggcgccgccctggccggcgccggcgacctgaccggcgaccccatcggctacgtgaccggcgtgctggccgtgctggtgcacgccgcctacctggtgctgatccagaaggccagcgccgacaccgagcacggccccctgaccgcccagtacgtgatcgccgtgagcgccacccccctgctggtgatctgcagcttcgccagcaccgacagcatccacgcctggaccttccccggctggaaggaccccgccatggtgtgcatcttcgtggcctgcatcctgatcggctgcgccatgaacttcaccaccctgcactgcacctacatcaacagcgccgtgaccaccagcttcgtgggcgtggtgaagagcatcgccaccatcaccgtgggcatggtggccttcagcgacgtggagcccaccagcctgttcatcgccggcgtggtggtgaacaccctgggcagcatcatctactgcgtggccaagttcatggagaccagaaagcagagcaactacgaggacctggaggcccagcccagaggcgaggaggcccagctgagcggcgaccagctgcccttcgtgatggaggagctgcccggcgagggcggcaacggcagaagcgagggcggcgaggccgccggcggccccgcccaggagagcagacaggaggtgagaggcagccccagaggcgtgcccctggtggccggcagcagcgaggagggcagcagaagaagcctgaaggacgcctacctggaggtgtggagactggtgagaggcaccagatacatgaagaaggactacctgatcgagaacgaggagctgcccagcccctag

SEQ ID NO: 99906 - DNA, 1431 bp, synthetic construct
  misc_feature 1..1431: note = Description of Artificial Sequence: Synthetic coding sequence
  source 1..1431: mol_type = other DNA
atgagcacccagagactgagaaacgaggactaccacgactacagcagcaccgacgtgagccccgaggagagccccagcgagggcctgaacaacctgagcagccccggcagctaccagagattcggccagagcaacagcaccacctggttccagaccctgatccacctgctgaagggcaacatcggcaccggcctgctgggcctgcccctggccgtgaagaacgccggcatcgtgatgggccccatcagcctgctgatcatcggcatcgtggccgtgcactgcatgggcatcctggtgaagtgcgcccaccacttctgcagaagactgaacaagagcttcgtggactacggcgacaccgtgatgtacggcctggagagcagcccctgcagctggctgagaaaccacgcccactggggcagaagagtggtggacttcttcctgatcgtgacccagctgggcttctgctgcgtgtacttcgtgttcctggccgacaacttcaagcaggtgatcgaggccgccaacggcaccaccaacaactgccacaacaacgagaccgtgatcctgacccccaccatggacagcagactgtacatgctgagcttcctgcccttcctggtgctgctggtgttcatcagaaacctgagagccctgagcatcttcagcctgctggccaacatcaccatgctggtgagcctggtgatgatctaccagttcatcgtgcagagaatccccgaccccagccacctgcccctggtggccccctggaagacctaccccctgttcttcggcaccgccatcttcagcttcgagggcatcggcatggtgctgcccctggagaacaagatgaaggaccccagaaagttccccctgatcctgtacctgggcatggtgatcgtgaccatcctgtacatcagcctgggctgcctgggctacctgcagttcggcgccaacatccagggcagcatcaccctgaacctgcccaactgctggctgtaccagagcgtgaagctgctgtacagcatcggcatcttcttcacctacgccctgcagttctacgtgcccgccgagatcatcatccccttcttcgtgagcagagcccccgagcactgcgagctggtggtggacctgttcgtgagaaccgtgctggtgtgcctgacctgcatcctggccatcctgatccccagactggacctggtgatcagcctggtgggcagcgtgagcagcagcgccctggccctgatcatcccccccctgctggaggtgaccaccttctacagcgagggcatgagccccctgaccatcttcaaggacgccctgatcagcatcctgggcttcgtgggcttcgtggtgggcacctacgaggccctgtacgagctgatccagcccagcaacgcccccatcttcatcaacagcacctgcgccttcatctag

SEQ ID NO: 99907 - DNA, 1161 bp, synthetic construct
  misc_feature 1..1161: note = Description of Artificial Sequence: Synthetic coding sequence
  source 1..1161: mol_type = other DNA
atgagcacccagagactgagaaacgaggactaccacgactacagcagcaccgacgtgagccccgaggagagccccagcgagggcctgaacaacctgagcagccccggcagctaccagagattcggccagagcaacagcaccacctggttccagaccctgatccacctgctgaagggcaacatcggcaccggcctgctgggcctgcccctggccgtgaagaacgccggcatcgtgatgggccccatcagcctgctgatcatcggcatcgtggccgtgcactgcatgggcatcctggtgaagtgcgcccaccacttctgcagaagactgaacaagagcttcgtggactacggcgacaccgtgatgtacggcctggagagcagcccctgcagctggctgagaaaccacgcccactggggcagaagagtggtggacttcttcctgatcgtgacccagctgggcttctgctgcgtgtacttcgtgttcctggccgacaacttcaagcaggtgatcgaggccgccaacggcaccaccaacaactgccacaacaacgagaccgtgatcctgacccccaccatggacagcagactgtacatgctgagcttcctgcccttcctggtgctgctggtgttcatcagaaacctgagagccctgagcatcttcagcctgctggccaacatcaccatgctggtgagcctggtgatgatctaccagttcatcgtgcagagaatccccgaccccagccacctgcccctggtggccccctggaagacctaccccctgttcttcggcaccgccatcttcagcttcgagggcatcggcatggtgctgcccctggagaacaagatgaaggaccccagaaagttccccctgatcctgtacctgggcatggtgatcgtgaccatcctgtacatcagcctgggctgcctgggctacctgcagttcggcgccaacatccagggcagcatcaccctgaacctgcccaactgctggctgtaccagagcgtgaagctgctgtacagcatcggcatcttcttcacctacgccctgcagttctacgtgcccgccgagatcatcatccccttcttcgtgagcagagcccccgagcactgcgagctggtggtggacctgttcgtgagaaccgtgctggtgtgcctgacctag

SEQ ID NO: 99908 - DNA, 213 bp, synthetic construct
  misc_feature 1..213: note = Description of Artificial Sequence: Synthetic coding sequence
  source 1..213: mol_type = other DNA
atgagcacccagagactgagaaacgaggactaccacgactacagcagcaccgacgtgagccccgaggagagccccagcgagggcctgaacaacctgagcagccccggcagctaccagagattcggccagagcaacagcaccacctggttccagaccctgatccacctgctgaagggcaacatcggcaccggcctgctgggcctgcccctgtag

SEQ ID NO: 99909 - DNA, 219 bp, synthetic construct
  misc_feature 1..219: note = Description of Artificial Sequence: Synthetic coding sequence
  source 1..219: mol_type = other DNA
atgagcacccagagactgagaaacgaggactaccacgactacagcagcaccgacgtgagccccgaggagagccccagcgagggcctgaacaacctgagcagccccggcagctaccagagattcggccagagcaacagcaccacctggttccagaccctgatccacctgctgaagggcaacatcggcaccggcctgctgggcctgcccctggccgtgtag

SEQ ID NO: 99910 - DNA, 1431 bp, synthetic construct; identical to SEQ ID NO: 99906
  misc_feature 1..1431: note = Description of Artificial Sequence: Synthetic coding sequence
  source 1..1431: mol_type = other DNA

SEQ ID NO: 99911 - DNA, 1167 bp, synthetic construct
  misc_feature 1..1167: note = Description of Artificial Sequence: Synthetic coding sequence
  source 1..1167: mol_type = other DNA
atgagcacccagagactgagaaacgaggactaccacgactacagcagcaccgacgtgagccccgaggagagccccagcgagggcctgaacaacctgagcagccccggcagctaccagagattcggccagagcaacagcaccacctggttccagaccctgatccacctgctgaagggcaacatcggcaccggcctgctgggcctgcccctggccgtgaagaacgccggcatcgtgatgggccccatcagcctgctgatcatcggcatcgtggccgtgcactgcatgggcatcctggtgaagtgcgcccaccacttctgcagaagactgaacaagagcttcgtggactacggcgacaccgtgatgtacggcctggagagcagcccctgcagctggctgagaaaccacgcccactggggcagaagagtggtggacttcttcctgatcgtgacccagctgggcttctgctgcgtgtacttcgtgttcctggccgacaacttcaagcaggtgatcgaggccgccaacggcaccaccaacaactgccacaacaacgagaccgtgatcctgacccccaccatggacagcagactgtacatgctgagcttcctgcccttcctggtgctgctggtgttcatcagaaacctgagagccctgagcatcttcagcctgctggccaacatcaccatgctggtgagcctggtgatgatctaccagttcatcgtgcagagaatccccgaccccagccacctgcccctggtggccccctggaagacctaccccctgttcttcggcaccgccatcttcagcttcgagggcatcggcatggtgctgcccctggagaacaagatgaaggaccccagaaagttccccctgatcctgtacctgggcatggtgatcgtgaccatcctgtacatcagcctgggctgcctgggctacctgcagttcggcgccaacatccagggcagcatcaccctgaacctgcccaactgctggctgtaccagagcgtgaagctgctgtacagcatcggcatcttcttcacctacgccctgcagttctacgtgcccgccgagatcatcatccccttcttcgtgagcagagcccccgagcactgcgagctggtggtggacctgttcgtgagaaccgtgctggtgtgcctgacctgcgagtag

SEQ ID NO: 99912 - DNA, 1452 bp, synthetic construct
  misc_feature 1..1452: note = Description of Artificial Sequence: Synthetic coding sequence
  source 1..1452: mol_type = other DNA
atgagcgtgaccaagagcaccgagggcccccagggcgccgtggccatcaagctggacctgatgagcccccccgagagcgccaagaagctggagaacaaggacagcaccttcctggacgagagccccagcgagagcgccggcctgaagaagaccaagggcatcaccgtgttccaggccctgatccacctggtgaagggcaacatgggcaccggcatcctgggcctgcccctggccgtgaagaacgccggcatcctgatgggccccctgagcctgctggtgatgggcttcatcgcctgccactgcatgcacatcctggtgaagtgcgcccagagattctgcaagagactgaacaagcccttcatggactacggcgacaccgtgatgcacggcctggaggccaaccccaacgcctggctgcagaaccacgcccactggggcagacacatcgtgagcttcttcctgatcatcacccagctgggcttctgctgcgtgtacatcgtgttcctggccgacaacctgaagcaggtggtggaggccgtgaacagcaccaccaacaactgctacagcaacgagaccgtgatcctgacccccaccatggacagcagactgtacatgctgagcttcctgcccttcctggtgctgctggtgctgatcagaaacctgagaatcctgaccatcttcagcatgctggccaacatcagcatgctggtgagcctggtgatcatcatccagtacatcacccaggagatccccgaccccagcagactgcccctggtggccagctggaagacctaccccctgttcttcggcaccgccatcttcagcttcgagagcatcggcgtggtgctgcccctggagaacaagatgaagaacgccagacacttccccgccatcctgagcctgggcatgagcatcgtgaccagcctgtacatcggcatggccgccctgggctacctgagattcggcgacgacatcaaggccagcatcagcctgaacctgcccaactgctggctgtaccagagcgtgaagctgctgtacatcgccggcatcctgtgcacctacgccctgcagttctacgtgcccgccgagatcatcatccccttcgccatcagcagagtgagcaccagatgggccctgcccctggacctgagcatcagactggtgatggtgtgcctgacctgcctgctggccatcctgatccccagactggacctggtgatcagcctggtgggcagcgtgagcggcaccgccctggccctgatcatcccccccctgctggaggtgaccaccttctacagcgagggcatgagccccctgaccatcttcaaggacgccctgatcagcatcctgggcttcgtgggcttcgtggtgggcacctaccaggccctggacgagctgctgaagagcgaggacagccaccccttcagcaacagcaccaccttcgtgagatag

SEQ ID NO: 99913 - DNA, 624 bp, synthetic construct
  misc_feature 1..624: note = Description of Artificial Sequence: Synthetic coding sequence
  source 1..624: mol_type = other DNA
atgaacgacaccgccgtgctgcccctggagaacaagatgaagaacgccagacacttccccgccatcctgagcctgggcatgagcatcgtgaccagcctgtacatcggcatggccgccctgggctacctgagattcggcgacgacatcaaggccagcatcagcctgaacctgcccaactgctggctgtaccagagcgtgaagctgctgtacatcgccggcatcctgtgcacctacgccctgcagttctacgtgcccgccgagatcatcatccccttcgccatcagcagagtgagcaccagatgggccctgcccctggacctgagcatcagactggtgatggtgtgcctgacctgcctgctggccatcctgatccccagactggacctggtgatcagcctggtgggcagcgtgagcggcaccgccctggccctgatcatcccccccctgctggaggtgaccaccttctacagcgagggcatgagccccctgaccatcttcaaggacgccctgatcagcatcctgggcttcgtgggcttcgtggtgggcacctaccaggccctggacgagctgctgaagagcgaggacagccaccccttcagcaacagcaccaccttcgtgagatag

SEQ ID NO: 99914 - DNA, 1413 bp, synthetic construct
  misc_feature 1..1413: note = Description of Artificial Sequence: Synthetic coding sequence
  source 1..1413: mol_type = other DNA
atgagcctgctgggcagagactacaacagcgagctgaacagcctggacaacggcccccagagccccagcgagagcagcagcagcatcaccagcgagaacgtgcaccccgccggcgaggccggcctgagcatgatgcagaccctgatccacctgctgaagtgcaacatcggcaccggcctgctgggcctgcccctggccatcaagaacgccggcctgctggtgggccccgtgagcctgctggccatcggcgtgctgaccgtgcactgcatggtgatcctgctgaactgcgcccagcacctgagccagagactgcagaagaccttcgtgaactacggcgaggccaccatgtacggcctggagacctgccccaacacctggctgagagcccacgccgtgtggggcagatacaccgtgagcttcctgctggtgatcacccagctgggcttctgcagcgtgtacttcatgttcatggccgacaacctgcagcagatggtggagaaggcccacgtgaccagcaacatctgccagcccagagagatcctgaccctgacccccatcctggacatcagattctacatgctgatcatcctgcccttcctgatcctgctggtgttcatccagaacctgaaggtgctgagcgtgttcagcaccctggccaacatcaccaccctgggcagcatggccctgatcttcgagtacatcatggagggcatcccctaccccagcaacctgcccctgatggccaactggaagaccttcctgctgttcttcggcaccgccatcttcaccttcgagggcgtgggcatggtgctgcccctgaagaaccagatgaagcacccccagcagttcagcttcgtgctgtacctgggcatgagcatcgtgatcatcctgtacatcctgctgggcaccctgggctacatgaagttcggcagcgacacccaggccagcatcaccctgaacctgcccaactgctggctgtaccagagcgtgaagctgatgtacagcatcggcatcttcttcacctacgccctgcagttccacgtgcccgccgagatcatcatccccttcgccatcagccaggtgagcgagagctgggccctgttcgtggacctgagcgtgagaagcgccctggtgtgcctgacctgcgtgagcgccatcctgatccccagactggacctggtgatcagcctggtgggcagcgtgagcagcagcgccctggccctgatcatccccgccctgctggagatcgtgatcttctacagcgaggacatgagctgcgtgaccatcgccaaggacatcatgatcagcatcgtgggcctgctgggctgcatcttcggcacctaccaggccctgtacgagctgccccagcccatcagccacagcatggccaacagcaccggcgtgcacgcctag

SEQ ID NO: 99915 - DNA, 1536 bp, synthetic construct
  misc_feature 1..1536: note = Description of Artificial Sequence: Synthetic coding sequence
  source 1..1536: mol_type = other DNA
atgagcctgctgggcagagactacaacagcgagctgaacagcctggacaacggcccccagagccccagcgagagcagcagcagcatcaccagcgagaacgtgcaccccgccggcgaggccggcctgagcatgatgcagaccctgatccacctgctgaagtgcaacatcggcaccggcctgctgggcctgcccctggccatcaagaacgccggcctgctggtgggccccgtgagcctgctggccatcggcgtgctgaccgtgcactgcatggtgatcctgctgaactgcgcccagcacctgagccagagactgcagaagaccttcgtgaactacggcgaggccaccatgtacggcctggagacctgccccaacacctggctgagagcccacgccgtgtggggcagatggaacctggccctgagccccagactggagtgcagcggcaagatcagcgcccactgcaacccccacctgcagggcagcagcaacagccccgcccaggccagcagagtggccggcatctacagatacaccgtgagcttcctgctggtgatcacccagctgggcttctgcagcgtgtacttcatgttcatggccgacaacctgcagcagatggtggagaaggcccacgtgaccagcaacatctgccagcccagagagatcctgaccctgacccccatcctggacatcagattctacatgctgatcatcctgcccttcctgatcctgctggtgttcatccagaacctgaaggtgctgagcgtgttcagcaccctggccaacatcaccaccctgggcagcatggccctgatcttcgagtacatcatggagggcatcccctaccccagcaacctgcccctgatggccaactggaagaccttcctgctgttcttcggcaccgccatcttcaccttcgagggcgtgggcatggtgctgcccctgaagaaccagatgaagcacccccagcagttcagcttcgtgctgtacctgggcatgagcatcgtgatcatcctgtacatcctgctgggcaccctgggctacatgaagttcggcagcgacacccaggccagcatcaccctgaacctgcccaactgctggctgtaccagagcgtgaagctgatgtacagcatcggcatcttcttcacctacgccctgcagttccacgtgcccgccgagatcatcatccccttcgccatcagccaggtgagcgagagctgggccctgttcgtggacctgagcgtgagaagcgccctggtgtgcctgacctgcgtgagcgccatcctgatccccagactggacctggtgatcagcctggtgggcagcgtgagcagcagcgccctggccctgatcatccccgccctgctggagatcgtgatcttctacagcgaggacatgagctgcgtgaccatcgccaaggacatcatgatcagcatcgtgggcctgctgggctgcatcttcggcacctaccaggccctgtacgagctgccccagcccatcagccacagcatggccaacagcaccggcgtgcacgcctag

SEQ ID NO: 99916 - DNA, 1515 bp, synthetic construct
  misc_feature 1..1515: note = Description of Artificial Sequence: Synthetic coding sequence
  source 1..1515: mol_type = other DNA
atggaggccgccgccacccccgccgccgccggcgccgccagaagagaggagctggacatggacgtgatgagacccctgatcaacgagcagaacttcgacggcaccagcgacgaggagcacgagcaggagctgctgcccgtgcagaagcactaccagctggacgaccaggagggcatcagcttcgtgcagaccctgatgcacctgctgaagggcaacatcggcaccggcctgctgggcctgcccctggccatcaagaacgccggcatcgtgctgggccccatcagcctggtgttcatcggcatcatcagcgtgcactgcatgcacatcctggtgagatgcagccacttcctgtgcctgagattcaagaagagcaccctgggctacagcgacaccgtgagcttcgccatggaggtgagcccctggagctgcctgcagaagcaggccgcctggggcagaagcgtggtggacttcttcctggtgatcacccagctgggcttctgcagcgtgtacatcgtgttcctggccgagaacgtgaagcaggtgcacgagggcttcctggagagcaaggtgttcatcagcaacagcaccaacagcagcaacccctgcgagagaagaagcgtggacctgagaatctacatgctgtgcttcctgcccttcatcatcctgctggtgttcatcagagagctgaagaacctgttcgtgctgagcttcctggccaacgtgagcatggccgtgagcctggtgatcatctaccagtacgtggtgagaaacatgcccgacccccacaacctgcccatcgtggccggctggaagaagtaccccctgttcttcggcaccgccgtgttcgccttcgagggcatcggcgtggtgctgcccctggagaaccagatgaaggagagcaagagattcccccaggccctgaacatcggcatgggcatcgtgaccaccctgtacgtgaccctggccaccctgggctacatgtgcttccacgacgagatcaagggcagcatcaccctgaacctgccccaggacgtgtggctgtaccagagcgtgaagatcctgtacagcttcggcatcttcgtgacctacagcatccagttctacgtgcccgccgagatcatcatccccggcatcaccagcaagttccacaccaagtggaagcagatctgcgagttcggcatcagaagcttcctggtgagcatcacctgcgccggcgccatcctgatccccagactggacatcgtgatcagcttcgtgggcgccgtgagcagcagcaccctggccctgatcctgccccccctggtggagatcctgaccttcagcaaggagcactacaacatctggatggtgctgaagaacatcagcatcgccttcaccggcgtggtgggcttcctgctgggcacctacatcaccgtggaggagatcatctaccccacccccaaggtggtggccggcaccccccagagccccttcctgaacctgaacagcacctgcctgaccagcggcctgaagtag

SEQ ID NO: 99917 - DNA, 1602 bp, synthetic construct
  misc_feature 1..1602: note = Description of Artificial Sequence: Synthetic coding sequence
  source 1..1602: mol_type = other DNA
atggccagactgcccgccggcatcagattcatcatcagcttcagcagagaccagtggtacagagccttcatcttcatcctgaccttcctgctgtacgccagcttccacctgagcagaaagcccatcagcatcgtgaagggcgagctgcacaagtactgcaccgcctgggacgaggccgacgtgagattcagcagccagaacagaaagagcggcagcgccgccccccaccagctgcccgacaacgagaccgactgcggctgggcccccttcgacaagaacaactaccagcagctgctgggcgccctggactacagcttcctgtgcgcctacgccgtgggcatgtacctgagcggcatcatcggcgagagactgcccatcagatactacctgaccttcggcatgctggccagcggcgccttcaccgccctgttcggcctgggctacttctacaacatccacagcttcggcttctacgtggtgacccaggtgatcaacggcctggtgcagaccaccggctggcccagcgtggtgacctgcctgggcaactggttcggcaagggcagaagaggcctgatcatgggcgtgtggaacagccacaccagcgtgggcaacatcctgggcagcctgatcgccggctactgggtgagcacctgctggggcctgagcttcgtggtgcccggcgccatcgtggccgccatgggcatcgtgtgcttcctgttcctgatcgagcaccccaacgacgtgagatgcagcagcaccctggtgacccacagcaagggctacgagaacggcaccaacagactgagactgcagaagcagatcctgaagagcgagaagaacaagcccctggaccccgagatgcagtgcctgctgctgagcgacggcaagggcagcatccaccccaaccacgtggtgatcctgcccggcgacggcggcagcggcaccgccgccatcagcttcaccggcgccctgaagatccccggcgtgatcgagttcagcctgtgcctgctgttcgccaagctggtgagctacaccttcctgttctggctgcccctgtacatcaccaacgtggaccacctggacgccaagaaggccggcgagctgagcaccctgttcgacgtgggcggcatcttcggcggcatcctggccggcgtgatcagcgacagactggagaagagagccagcacctgcggcctgatgctgctgctggccgcccccaccctgtacatcttcagcaccgtgagcaagatgggcctggaggccaccatcgccatgctgctgctgagcggcgccctggtgagcggcccctacaccctgatcaccaccgccgtgagcgccgacctgggcacccacaagagcctgaagggcaacgcccacgccctgagcaccgtgaccgccatcatcgacggcaccggcagcgtgggcgccgccctgggccccctgctggccggcctgctgagccccagcggctggagcaacgtgttctacatgctgatgttcgccgacgcctgcgccctgctgttcctgatcagactgatccacaaggagctgagctgccccggcagcgccaccggcgaccaggtgcccttcaaggagcagtag

SEQ ID NO: 99918 - DNA, 1602 bp, synthetic construct; identical to SEQ ID NO: 99917
  misc_feature 1..1602: note = Description of Artificial Sequence: Synthetic coding sequence
  source 1..1602: mol_type = other DNA

SEQ ID NO: 99919 - DNA, 57 bp, synthetic construct
  misc_feature 1..57: note = Description of Artificial Sequence: Synthetic coding sequence
  source 1..57: mol_type = other DNA
atggccagactgcccgccggcatcagattcatcatcagcttcagcagagaccagtag

SEQ ID NO: 99920 - DNA, 57 bp, synthetic construct; identical to SEQ ID NO: 99919
  misc_feature 1..57: note = Description of Artificial Sequence: Synthetic coding sequence
  source 1..57: mol_type = other DNA

SEQ ID NO: 99921 - DNA, 1464 bp, synthetic construct
  misc_feature 1..1464: note = Description of Artificial Sequence: Synthetic coding sequence
  source 1..1464: mol_type = other DNA
atgatgcacttcaagagcggcctggagctgaccgagctgcagaacatgaccgtgcccgaggacgacaacatcagcaacgacagcaacgacttcaccgaggtggagaacggccagatcaacagcaagttcatcagcgacagagagagcagaagaagcctgaccaacagccacctggagaagaagaagtgcgacgagtacatccccggcaccaccagcctgggcatgagcgtgttcaacctgagcaacgccatcatgggcagcggcatcctgggcctggccttcgccctggccaacaccggcatcctgctgttcctggtgctgctgaccagcgtgaccctgctgagcatctacagcatcaacctgctgctgatctgcagcaaggagaccggctgcatggtgtacgagaagctgggcgagcaggtgttcggcaccaccggcaagttcgtgatcttcggcgccaccagcctgcagaacaccggcgccatgctgagctacctgttcatcgtgaagaacgagctgcccagcgccatcaagttcctgatgggcaaggaggagaccttcagcgcctggtacgtggacggcagagtgctggtggtgatcgtgaccttcggcatcatcctgcccctgtgcctgctgaagaacctgggctacctgggctacaccagcggcttcagcctgagctgcatggtgttcttcctgatcgtggtgatctacaagaagttccagatcccctgcatcgtgcccgagctgaacagcaccatcagcgccaacagcaccaacgccgacacctgcacccccaagtacgtgaccttcaacagcaagaccgtgtacgccctgcccaccatcgccttcgccttcgtgtgccaccccagcgtgctgcccatctacagcgagctgaaggacagaagccagaagaagatgcagatggtgagcaacatcagcttcttcgccatgttcgtgatgtacttcctgaccgccatcttcggctacctgaccttctacgacaacgtgcagagcgacctgctgcacaagtaccagagcaaggacgacatcctgatcctgaccgtgagactggccgtgatcgtggccgtgatcctgaccgtgcccgtgctgttcttcaccgtgagaagcagcctgttcgagctggccaagaagaccaagttcaacctgtgcagacacaccgtggtgacctgcatcctgctggtggtgatcaacctgctggtgatcttcatccccagcatgaaggacatcttcggcgtggtgggcgtgaccagcgccaacatgctgatcttcatcctgcccagcagcctgtacctgaagatcaccgaccaggacggcgacaagggcacccagagaatctgggccgccctgttcctgggcctgggcgtgctgttcagcctggtgagcatccccctggtgatctacgactgggcctgcagcagcagcagcgacgagggccactag

SEQ ID NO: 99922 - DNA, 1464 bp, synthetic construct; identical to SEQ ID NO: 99921
  misc_feature 1..1464: note = Description of Artificial Sequence: Synthetic coding sequence
  source 1..1464: mol_type = other DNA

SEQ ID NO: 99923 - DNA, 1464 bp, synthetic construct; identical to SEQ ID NO: 99921
  misc_feature 1..1464: note = Description of Artificial Sequence: Synthetic coding sequence
  source 1..1464: mol_type = other DNA

SEQ ID NO: 99924 - DNA, 1464 bp, synthetic construct; identical to SEQ ID NO: 99921
  misc_feature 1..1464: note = Description of Artificial Sequence: Synthetic coding sequence
  source 1..1464: mol_type = other DNA

SEQ ID NO: 99925 - DNA, 1521 bp, synthetic construct
  misc_feature 1..1521: note = Description of Artificial Sequence: Synthetic coding sequence
  source 1..1521: mol_type = other DNA
atgaagaaggccgagatgggcagattcagcatcagccccgacgaggacagcagcagctacagcagcaacagcgacttcaactacagctaccccaccaagcaggccgccctgaagagccactacgccgacgtggaccccgagaaccagaacttcctgctggagagcaacctgggcaagaagaagtacgagaccgagttccaccccggcaccaccagcttcggcatgagcgtgttcaacctgagcaacgccatcgtgggcagcggcatcctgggcctgagctacgccatggccaacaccggcatcgccctgttcatcatcctgctgaccttcgtgagcatcttcagcctgtacagcgtgcacctgctgctgaagaccgccaacgagggcggcagcctgctgtacgagcagctgggctacaaggccttcggcctggtgggcaagctggccgccagcggcagcatcaccatgcagaacatcggcgccatgagcagctacctgttcatcgtgaagtacgagctgcccctggtgatccaggccctgaccaacatcgaggacaagaccggcctgtggtacctgaacggcaactacctggtgctgctggtgagcctggtggtgatcctgcccctgagcctgttcagaaacctgggctacctgggctacaccagcggcctgagcctgctgtgcatggtgttcttcctgatcgtggtgatctgcaagaagttccaggtgccctgccccgtggaggccgccctgatcatcaacgagaccatcaacaccaccctgacccagcccaccgccctggtgcccgccctgagccacaacgtgaccgagaacgacagctgcagaccccactacttcatcttcaacagccagaccgtgtacgccgtgcccatcctgatcttcagcttcgtgtgccaccccgccgtgctgcccatctacgaggagctgaaggacagaagcagaagaagaatgatgaacgtgagcaagatcagcttcttcgccatgttcctgatgtacctgctggccgccctgttcggctacctgaccttctacgagcacgtggagagcgagctgctgcacacctacagcagcatcctgggcaccgacatcctgctgctgatcgtgagactggccgtgctgatggccgtgaccctgaccgtgcccgtggtgatcttccccatcagaagcagcgtgacccacctgctgtgcgccagcaaggacttcagctggtggagacacagcctgatcaccgtgagcatcctggccttcaccaacctgctggtgatcttcgtgcccaccatcagagacatcttcggcttcatcggcgccagcgccgccagcatgctgatcttcatcctgcccagcgccttctacatcaagctggtgaagaaggagcccatgaagagcgtgcagaagatcggcgccctgttcttcctgctgagcggcgtgctggtgatgaccggcagcatggccctgatcgtgctggactgggtgcacaacgcccccggcggcggccactag

SEQ ID NO: 99926 - DNA, 1644 bp, synthetic construct
  misc_feature 1..1644: note = Description of Artificial Sequence: Synthetic coding sequence
  source 1..1644: mol_type = other DNA
atggaccccatggagctgagaaacgtgaacatcgagcccgacgacgagagcagcagcggcgagagcgcccccgacagctacatcggcatcggcaacagcgagaaggccgccatgagcagccagttcgccaacgaggacaccgagagccagaagttcctgaccaacggcttcctgggcaagaagaagctggccgactacgccgacgagcaccaccccggcaccaccagcttcggcatgagcagcttcaacctgagcaacgccatcatgggcagcggcatcctgggcctgagctacgccatggccaacaccggcatcatcctgttcatcatcatgctgctggccgtggccatcctgagcctgtacagcgtgcacctgctgctgaagaccgccaaggagggcggcagcctgatctacgagaagctgggcgagaaggccttcggctggcccggcaagatcggcgccttcgtgagcatcaccatgcagaacatcggcgccatgagcagctacctgttcatcatcaagtacgagctgcccgaggtgatcagagccttcatgggcctggaggagaacaccggcgagtggtacctgaacggcaactacctgatcatcttcgtgagcgtgggcatcatcctgcccctgagcctgctgaagaacctgggctacctgggctacaccagcggcttcagcctgacctgcatggtgttcttcgtgagcgtggtgatctacaagaagttccagatcccctgccccctgcccgtgctggaccacagcgtgggcaacctgagcttcaacaacaccctgcccatgcacgtggtgatgctgcccaacaacagcgagagcagcgacgtgaacttcatgatggactacacccacagaaaccccgccggcctggacgagaaccaggccaagggcagcctgcacgacagcggcgtggagtacgaggcccacagcgacgacaagtgcgagcccaagtacttcgtgttcaacagcagaaccgcctacgccatccccatcctggtgttcgccttcgtgtgccaccccgaggtgctgcccatctacagcgagctgaaggacagaagcagaagaaagatgcagaccgtgagcaacatcagcatcaccggcatgctggtgatgtacctgctggccgccctgttcggctacctgaccttctacggcgaggtggaggacgagctgctgcacgcctacagcaaggtgtacaccctggacatccccctgctgatggtgagactggccgtgctggtggccgtgaccctgaccgtgcccatcgtgctgttccccatcagaaccagcgtgatcaccctgctgttccccaagagacccttcagctggatcagacacttcctgatcgccgccgtgctgatcgccctgaacaacgtgctggtgatcctggtgcccaccatcaagtacatcttcggcttcatcggcgccagcagcgccaccatgctgatcttcatcctgcccgccgtgttctacctgaagctggtgaagaaggagaccttcagaagcccccagaaggtgggcgccctgatcttcctggtggtgggcatcttcttcatgatcggcagcatggccctgatcatcatcgactggatctacgacccccccaacagcaagcaccactag

SEQ ID NO: 99927 - DNA, 780 bp, synthetic construct
  misc_feature 1..780: note = Description of Artificial Sequence: Synthetic coding sequence
  source 1..780: mol_type = other DNA
atggaccccatggagctgagaaacgtgaacatcgagcccgacgacgagagcagcagcggcgagagcgcccccgacagctacatcggcatcggcaacagcgagaaggccgccatgagcagccagttcgccaacgaggacaccgagagccagaagttcctgaccaacggcttcctgggcaagaagaagctggccgactacgccgacgagcaccaccccggcaccaccagcttcggcatgagcagcttcaacctgagcaacgccatcatgggcagcggcatcctgggcctgagctacgccatggccaacaccggcatcatcctgttcatcatcatgctgctggccgtggccatcctgagcctgtacagcgtgcacctgctgctgaagaccgccaaggagggcggcagcctgatctacgagaagctgggcgagaaggccttcggctggcccggcaagatcggcgccttcgtgagcatcaccatgcagaacatcggcgccatgagcagctacctgttcatcatcaagtacgagctgcccgaggtgatcagagccttcatgggcctggaggagaacaccggcgagtggtacctgaacggcaactacctgatcatcttcgtgagcgtgggcatcatcctgcccctgagcctgctgaagaacctgggctacctgggctacaccagcggcttcagcctgacctgcatggtgttcttcgtgagcgtgatgatctacaagaagatcagcttcttcctgcagatcttcatcatcctgaagctgttcttctag

SEQ ID NO: 99928 - DNA, 1644 bp, synthetic construct; identical to SEQ ID NO: 99926
  misc_feature 1..1644: note = Description of Artificial Sequence: Synthetic coding sequence
  source 1..1644: mol_type = other DNA

SEQ ID NO: 99929 - DNA, 579 bp, synthetic construct
  misc_feature 1..579: note = Description of Artificial Sequence: Synthetic coding sequence
  source 1..579: mol_type = other DNA
atggaccccatggagctgagaaacgtgaacatcgagcccgacgacgagagcagcagcggcgagagcgcccccgacagctacatcggcatcggcaacagcgagaaggccgccatgagcagccagttcgccaacgaggacaccgagagccagaagttcctgaccaacggcttcctgggcaagaagaagctggccgactacgccgacgagcaccaccccggcaccaccagcttcggcatgagcagcttcaacctgagcaacgccatcatgggcagcggcatcctgggcctgagctacgccatggccaacaccggcatcatcctgttcatcatcatgctgctggccgtggccatcctgagcctgtacagcgtgcacctgctgctgaagaccgccaaggagggcggcagcctgatctacgagaagctgggcgagaaggccttcggctggcccggcaagatcggcgccttcgtgagcatcaccatgcagaacatcggcgccatgagcagctacctgttcatcatcaagtacgagctgcccgaggtgatcagagccttcatgggcctggaggagaacaccggctag

SEQ ID NO: 99930 - DNA, 660 bp, synthetic construct
  misc_feature 1..660: note = Description of Artificial Sequence: Synthetic coding sequence
  source 1..660: mol_type = other DNA
atggaccccatggagctgagaaacgtgaacatcgagcccgacgacgagagcagcagcggcgagagcgcccccgacagctacatcggcatcggcaacagcgagaaggccgccatgagcagccagttcgccaacgaggacaccgagagccagaagttcctgaccaacggcttcctgggcaagaagaagctggccgactacgccgacgagcaccaccccggcaccaccagcttcggcatgagcagcttcaacctgagcaacgccatcatgggcagcggcatcctgggcctgagctacgccatggccaacaccggcatcatcctgttcatcatcatgctgctggccgtggccatcctgagcctgtacagcgtgcacctgctgctgaagaccgccaaggagggcggcagcctgatctacgagaagctgggcgagaaggccttcggctggcccggcaagatcggcgccttcgtgagcatcaccatgcagaacatcggcgccatgagcagctacctgttcatcatcaagtacgagctgcccgaggtgatcagagccttcatgggcctggaggagaacaccggcgagtggtacctgaacggcaactacctgatcatcttcgtgagcgtgggcatcatcctgcccctgagcctgctgaagaacctgtag

SEQ ID NO: 99931 - DNA, 1419 bp, synthetic construct
  misc_feature 1..1419: note = Description of Artificial Sequence: Synthetic coding sequence
  source 1..1419: mol_type = other DNA
atggagctgcaggaccccaagatgaacggcgccctgcccagcgacgccgtgggctacagacaggagagagagggcttcctgcccagcagaggccccgcccccggcagcaagcccgtgcagttcatggacttcgagggcaagaccagcttcggcatgagcgtgttcaacctgagcaacgccatcatgggcagcggcatcctgggcctggcctacgccatggcccacaccggcgtgatcttcttcctggccctgctgctgtgcatcgccctgctgagcagctacagcatccacctgctgctgacctgcgccggcatcgccggcatcagagcctacgagcagctgggccagagagccttcggccccgccggcaaggtggtggtggccaccgtgatctgcctgcacaacgtgggcgccatgagcagctacctgttcatcatcaagagcgagctgcccctggtgatcggcaccttcctgtacatggaccccgagggcgactggttcctgaagggcaacctgctgatcatcatcgtgagcgtgctgatcatcctgcccctggccctgatgaagcacctgggctacctgggctacaccagcggcctgagcctgacctgcatgctgttcttcctggtgagcgtgatctacaagaagttccagctgggctgcgccatcggccacaacgagaccgccatggagagcgaggccctggtgggcctgcccagccagggcctgaacagcagctgcgaggcccagatgttcaccgtggacagccagatgagctacaccgtgcccatcatggccttcgccttcgtgtgccaccccgaggtgctgcccatctacaccgagctgtgcagacccagcaagagaagaatgcaggccgtggccaacgtgagcatcggcgccatgttctgcatgtacggcctgaccgccaccttcggctacctgaccttctacagcagcgtgaaggccgagatgctgcacatgtacagccagaaggaccccctgatcctgtgcgtgagactggccgtgctgctggccgtgaccctgaccgtgcccgtggtgctgttccccatcagaagagccctgcagcagctgctgttccccggcaaggccttcagctggcccagacacgtggccatcgccctgatcctgctggtgctggtgaacgtgctggtgatctgcgtgcccaccatcagagacatcttcggcgtgatcggcagcaccagcgcccccagcctgatcttcatcctgcccagcatcttctacctgagaatcgtgcccagcgaggtggagcccttcctgagctggcccaagatccaggccctgtgcttcggcgtgctgggcgtgctgttcatggccgtgagcctgggcttcatgttcgccaactgggccaccggccagagcagaatgagcggccactag

SEQ ID NO: 99932 - DNA, 1266 bp, synthetic construct
  misc_feature 1..1266: note = Description of Artificial Sequence: Synthetic coding sequence
  source 1..1266: mol_type = other DNA
atgagcgtgttcaacctgagcaacgccatcatgggcagcggcatcctgggcctggcctacgccatggcccacaccggcgtgatcttcttcctggccctgctgctgtgcatcgccctgctgagcagctacagcatccacctgctgctgacctgcgccggcatcgccggcatcagagcctacgagcagctgggccagagagccttcggccccgccggcaaggtggtggtggccaccgtgatctgcctgcacaacgtgggcgccatgagcagctacctgttcatcatcaagagcgagctgcccctggtgatcggcaccttcctgtacatggaccccgagggcgactggttcctgaagggcaacctgctgatcatcatcgtgagcgtgctgatcatcctgcccctggccctgatgaagcacctgggctacctgggctacaccagcggcctgagcctgacctgcatgctgttcttcctggtgagcgtgatctacaagaagttccagctgggctgcgccatcggccacaacgagaccgccatggagagcgaggccctggtgggcctgcccagccagggcctgaacagcagctgcgaggcccagatgttcaccgtggacagccagatgagctacaccgtgcccatcatggccttcgccttcgtgtgccaccccgaggtgctgcccatctacaccgagctgtgcagacccagcaagagaagaatgcaggccgtggccaacgtgagcatcggcgccatgttctgcatgtacggcctgaccgccaccttcggctacctgaccttctacagcagcgtgaaggccgagatgctgcacatgtacagccagaaggaccccctgatcctgtgcgtgagactggccgtgctgctggccgtgaccctgaccgtgcccgtggtgctgttccccatcagaagagccctgcagcagctgctgttccccggcaaggccttcagctggcccagacacgtggccatcgccctgatcctgctggtgctggtgaacgtgctggtgatctgcgtgcccaccatcagagacatcttcggcgtgatcggcagcaccagcgcccccagcctgatcttcatcctgcccagcatcttctacctgagaatcgtgcccagcgaggtggagcccttcctgagctggcccaagatccaggccctgtgcttcggcgtgctgggcgtgctgttcatggccgtgagcctgggcttcatgttcgccaactgggccaccggccagagcagaatgagcggccactag

SEQ ID NO: 99933 - DNA, 1419 bp, synthetic construct; identical to SEQ ID NO: 99931
  misc_feature 1..1419: note = Description of Artificial Sequence: Synthetic coding sequence
  source 1..1419: mol_type = other DNA

SEQ ID NO: 99934 - DNA, 660 bp, synthetic construct
  misc_feature 1..660: note = Description of Artificial Sequence: Synthetic coding sequence
  source 1..660: mol_type = other DNA
atggagctgcaggaccccaagatgaacggcgccctgcccagcgacgccgtgggctacagacaggagagagagggcttcctgcccagcagaggccccgcccccggcagcaagcccgtgcagttcatggacttcgagggcaagaccagcttcggcatgagcgtgttcaacctgagcaacgccatcatgggcagcggcatcctgggcctggcctacgccatggcccacaccggcgtgatcttcttcctggccctgctgctgtgcatcgccctgctgagcagctacagcatccacctgctgctgacctgcgccggcatcgccggcatcagagcctacgagcagctgggccagagagccttcggccccgccggcaaggtggtggtggccaccgtgatctgcctgcacaacgtgggcgccatgagcagctacctgttcatcatcaagagcgagctgcccctggtgatcggcaccttcctgtacatggaccccgagggcgactggttcctgaagggcaacctgctgatcatcatcgtgagcgtgctgatcatcctgcccctggccctgatgaagcacctgggctacctgggctacaccagcggcctgagcctgacctgcatgctgttcttcctggtgagcgtgatctacaagaagttccagctgtag

SEQ ID NO: 99935 - DNA, 576 bp, synthetic construct
  misc_feature 1..576: note = Description of Artificial Sequence: Synthetic coding sequence
  source 1..576: mol_type = other DNA
atggagctgcaggaccccaagatgaacggcgccctgcccagcgacgccgtgggctacagacaggagagagagggcttcctgcccagcagaggccccgcccccggcagcaagcccgtgcagttcatggacttcgagggcaagaccagcttcggcatgagcgtgttcaacctgagcaacgccatcatgggcagcggcatcctgggcctggcctacgccatggcccacaccggcgtgatcttcttcctggccctgctgctgtgcatcgccctgctgagcagctacagcatccacctgctgctgacctgcgccggcatcgccggcatcagagcctacgagcagctgggccagagagccttcggccccgccggcaaggtggtggtggccaccgtgatctgcctgcacaacgtgggcgccatgagcagctacctgttcatcatcaagagcgagctgcccctggtgatcggcaccttcctgtacatggaccccgagggcgactggttcctgaagggcaacctgctgatcatcatcgtgagcgtgctgatcatcctgcccctggccctgatgaagcacctgtag

SEQ ID NO: 99936 - DNA, 495 bp, synthetic construct
  misc_feature 1..495: note = Description of Artificial Sequence: Synthetic coding sequence
  source 1..495: mol_type = other DNA
atggagctgcaggaccccaagatgaacggcgccctgcccagcgacgccgtgggctacagacaggagagagagggcttcctgcccagcagaggccccgcccccggcagcaagcccgtgcagttcatggacttcgagggcaagaccagcttcggcatgagcgtgttcaacctgagcaacgccatcatgggcagcggcatcctgggcctggcctacgccatggcccacaccggcgtgatcttcttcctggccctgctgctgtgcatcgccctgctgagcagctacagcatccacctgctgctgacctgcgccggcatcgccggcatcagagcctacgagcagctgggccagagagccttcggccccgccggcaaggtggtggtggccaccgtgatctgcctgcacaacgtgggcgccatgagcagctacctgttcatcatcaagagcgagctgcccctggtgatcggcaccttcctgtacatggaccccgagggctag

SEQ ID NO: 99937 - DNA, 840 bp, synthetic construct
  misc_feature 1..840: note = Description of Artificial Sequence: Synthetic coding sequence
  source 1..840: mol_type = other DNA
atggagctgcaggaccccaagatgaacggcgccctgcccagcgacgccgtgggctacagacaggagagagagggcttcctgcccagcagaggccccgcccccggcagcaagcccgtgcagttcatggacttcgagggcaagaccagcttcggcatgagcgtgttcaacctgagcaacgccatcatgggcagcggcatcctgggcctggcctacgccatggcccacaccggcgtgatcttcttcctggccctgctgctgtgcatcgccctgctgagcagctacagcatccacctgctgctgacctgcgccggcatcgccggcatcagagcctacgagcagctgggccagagagccttcggccccgccggcaaggtggtggtggccaccgtgatctgcctgcacaacgtgggcgccatgagcagctacctgttcatcatcaagagcgagctgcccctggtgatcggcaccttcctgtacatggaccccgagggcgactggttcctgaagggcaacctgctgatcatcatcgtgagcgtgctgatcatcctgcccctggccctgatgaagcacctgggctacctgggctacaccagcggcctgagcctgacctgcatgctgttcttcctggtgagcgtgatctacaagaagttccagctgggctgcgccatcggccacaacgagaccgccatggagagcgaggccctggtgggcctgcccagccagggcctgaacagcagctgcgaggcccagatgttcaccgtggacagccagatgagctacaccgtgcccatcatggccttcgccttcgtgtgccaccccgaggtgctgcccatctactag

SEQ ID NO: 99938 - DNA, 819 bp, synthetic construct
  misc_feature 1..819: note = Description of Artificial Sequence: Synthetic coding sequence
  source 1..819: mol_type = other DNA
atggagctgcaggaccccaagatgaacggcgccctgcccagcgacgccgtgggctacagacaggagagagagggcttcctgcccagcagaggccccgcccccggcagcaagcccgtgcagttcatggacttcgagggcaagaccagcttcggcatgagcgtgttcaacctgagcaacgccatcatgggcagcggcatcctgggcctggcctacgccatggcccacaccggcgtgatcttcttcctggccctgctgctgtgcatcgccctgctgagcagctacagcatccacctgctgctgacctgcgccggcatcgccggcatcagagcctacgagcagctgggccagagagccttcggccccgccggcaaggtggtggtggccaccgtgatctgcctgcacaacgtgggcgccatgagcagctacctgttcatcatcaagagcgagctgcccctggtgatcggcaccttcctgtacatggaccccgagggcgactggttcctgaagggcaacctgctgatcatcatcgtgagcgtgctgatcatcctgcccctggccctgatgaagcacctgggctacctgggctacaccagcggcctgagcctgacctgcatgctgttcttcctggtgagcgtgatctacaagaagttccagctgggctgcgccatcggccacaacgagaccgccatggagagcgaggccctggtgggcctgcccagccagggcctgaacagcagctgcgaggcccagatgttcaccgtggacagccagatgagctacaccgtgcccatcatggccttcgccttcgtgtgccactag

SEQ ID NO: 99939 - DNA, 1422 bp, synthetic construct
  misc_feature 1..1422: note = Description of Artificial Sequence: Synthetic coding sequence
  source 1..1422: mol_type = other DNA
atggccacccaggccaagagacccagagtggccggccccgtggacggcggcgacctggaccccgtggcctgcttcctgagctggtgcagaagagtgggcctggagctgagccccaaggtgagcgagagagccggcggcagaagaaccagaggcggcgccagagccgccctgaccagcccccccgcccaggtggccgtgagcagacagggcaccgtggccggctacggcatggtggccagagagagcgtgcaggccggcgagctgctgttcgtggtgcccagagccgccctgctgagccagcacacctgcagcatcggcggcctgctggagagagagagagtggccctgcagagccagagcggctgggtgcccctgctgctggccctgctgcacgagctgcaggcccccgccagcagatggagaccctacttcgccctgtggcccgagctgggcagactggagcaccccatgttctggcccgaggaggagagaagatgcctgctgcagggcaccggcgtgcccgaggccgtggagaaggacctggccaacatcagaagcgagtaccagagcatcgtgctgcccttcatggaggcccaccccgacctgttcagcctgagagtgagaagcctggagctgtaccaccagctggtggccctggtgatggcctacagcttccaggagcccctggaggaggaggaggacgagaaggagcccaacagccccgtgatggtgcccgccgccgacatcctgaaccacctggccaaccacaacgccaacctggagtacagcgccaactgcctgagaatggtggccacccagcccatccccaagggccacgagatcttcaacacctacggccagatggccaactggcagctgatccacatgtacggcttcgtggagccctaccccgacaacaccgacgacaccgccgacatccagatggtgaccgtgagagaggccgccctgcagggcaccaagaccgaggccgagagacacctggtgtacgagagatgggacttcctgtgcaagctggagatggtgggcgaggagggcgccttcgtgatcggcagagaggaggtgctgaccgaggaggagctgaccaccaccctgaaggtgctgtgcatgcccgccgaggagttcagagagctgaaggaccaggacggcggcggcgacgacaagagagaggagggcagcctgaccatcaccaacatccccaagctgaaggccagctggagacagctgctgcagaacagcgtgctgctgaccctgcagacctacgccaccgacctgaagaccgaccagggcctgctgagcaacaaggaggtgtacgccaagctgagctggagagagcagcaggccctgcaggtgagatacggccagaagatgatcctgcaccagctgctggagctgaccagctag

SEQ ID NO: 99940 - DNA, 975 bp, synthetic construct
  misc_feature 1..975: note = Description of Artificial Sequence: Synthetic coding sequence
  source 1..975: mol_type = other DNA
atgggcccctggggcgagcccgagctgctggtgtggagacccgaggccgtggccagcgagccccccgtgcccgtgggcctggaggtgaagctgggcgccctggtgctgctgctggtgctgaccctgctgtgcagcctggtgcccatctgcgtgctgagaagacccggcgccaaccacgagggcagcgccagcagacagaaggccctgagcctggtgagctgcttcgccggcggcgtgttcctggccacctgcctgctggacctgctgcccgactacctggccgccatcgacgaggccctggccgccctgcacgtgaccctgcagttccccctgcaggagttcatcctggccatgggcttcttcctggtgctggtgatggagcagatcaccctggcctacaaggagcagagcggccccagccccctggaggagaccagagccctgctgggcaccgtgaacggcggcccccagcactggcacgacggccccggcgtgccccaggccagcggcgcccccgccacccccagcgccctgagagcctgcgtgctggtgttcagcctggccctgcacagcgtgttcgagggcctggccgtgggcctgcagagagacagagccagagccatggagctgtgcctggccctgctgctgcacaagggcatcctggccgtgagcctgagcctgagactgctgcagagccacctgagagcccaggtggtggccggctgcggcatcctgttcagctgcatgacccccctgggcatcggcctgggcgccgccctggccgagagcgccggccccctgcaccagctggcccagagcgtgctggagggcatggccgccggcaccttcctgtacatcaccttcctggagatcctgccccaggagctggccagcagcgagcagagaatcctgaaggtgatcctgctgctggccggcttcgccctgctgaccggcctgctgttcatccagatctag

SEQ ID NO: 99941 - DNA, 975 bp, synthetic construct; identical to SEQ ID NO: 99940
  misc_feature 1..975: note = Description of Artificial Sequence: Synthetic coding sequence
  source 1..975: mol_type = other DNA

SEQ ID NO: 99942 - DNA, 975 bp, synthetic construct; identical to SEQ ID NO: 99940
  misc_feature 1..975: note = Description of Artificial Sequence: Synthetic coding sequence
  source 1..975: mol_type = other DNA

SEQ ID NO: 99943 - DNA, 975 bp, synthetic construct; identical to SEQ ID NO: 99940
  misc_feature 1..975: note = Description of Artificial Sequence: Synthetic coding sequence
  source 1..975: mol_type = other DNA

SEQ ID NO: 99944 - DNA, 723 bp, synthetic construct
  misc_feature 1..723: note = Description of Artificial Sequence: Synthetic coding sequence
  source 1..723: mol_type = other DNA
atgggcccctggggcgagcccgagctgctggtgtggagacccgaggccgtggccagcgagccccccgtgcccgtgggcctggaggtgaagctgggcgccctggtgctgctgctggtgctgaccctgctgtgcagcctggtgcccatctgcgtgctgagaagacccggcgccaaccacgagggcagcgccagcagacagaaggccctgagcctggtgagctgcttcgccggcggcgtgttcctggccacctgcctgctggacctgctgcccgactacctggccgccatcgacgaggccctggccgccctgcacgtgaccctgcagttccccctgcaggagttcatcctggccatgggcttcttcctggtgctggtgatggagcagatcaccctggcctacaaggagcagagcggccccagccccctggaggagaccagagccctgctgggcaccgtgaacggcggcccccagcactggcacgacggccccggcgtgccccaggccagcggcgcccccgccacccccagcgccctgagagcctgcgtgctggtgttcagcctggccctgcacagcgtgttcgagggcctggccgtgggcctgcagagagacagagccagagccatggagctgtgcctggccctgctgctgcacaagggcatcctggccgtgagcctgagcctgagactgctgcagagccacctgagagcccaggtggtggcctag

SEQ ID NO: 99945 - DNA, 621 bp, synthetic construct
  misc_feature 1..621: note = Description of Artificial Sequence: Synthetic coding sequence
  source 1..621: mol_type = other DNA
atgggcccctggggcgagcccgagctgctggtgtggagacccgaggccgtggccagcgagccccccgtgcccgtgggcctggaggtgaagctgggcgccctggtgctgctgctggtgctgaccctgctgtgcagcctggtgcccatctgcgtgctgagaagacccggcgccaaccacgagggcagcgccagcagacagaaggccctgagcctggtgagctgcttcgccggcggcgtgttcctggccacctgcctgctggacctgctgcccgactacctggccgccatcgacgaggccctggccgccctgcacgtgaccctgcagttccccctgcaggagttcatcctggccatgggcttcttcctggtgctggtgatggagcagatcaccctggcctacaaggagcagagcggccccagccccctggaggagaccagagccctgctgggcaccgtgaacggcggcccccagcactggcacgacggccccggcgtgccccaggccagcggcgcccccgccacccccagcgccctgagagcctgcgtgctggtgttcagcctggccctgcacagcgtgttcgagggcctggccgtgggcctgcagagagacagagccagatag

SEQ ID NO: 99946 - DNA, 966 bp, synthetic construct
  misc_feature 1..966: note = Description of Artificial Sequence: Synthetic coding sequence
  source 1..966: mol_type = other DNA
atgggcccctggggcgagcccgagctgctggtgtggagacccgaggccgtggccagcgagccccccgtgcccgtgggcctggaggtgaagctgggcgccctggtgctgctgctggtgctgaccctgctgtgcagcctggtgcccatctgcgtgctgagaagacccggcgccaaccacgagggcagcgccagcagacagaaggccctgagcctggtgagctgcttcgccggcggcgtgttcctggccacctgcctgctggacctgctgcccgactacctggccgccatcgacgaggccctggccgccctgcacgtgaccctgcagttccccctgcaggagttcatcctggccatgggcttcttcctggtgctggtgatggagcagatcaccctggcctacaaggagcagagcggccccagccccctggaggagaccagagccctgctgggcaccgtgaacggcggcccccagcactggcacgacggccccggcgtgccccaggccagcggcgcccccgccacccccagcgccctgagagcctgcgtgctggtgttcagcctggccctgcacagcgtgttcgagggcctggccgtgggcctgcagagagacagagccagagccatggagctgtgcctggccctgctgctgcacaagggcatcctggccgtgagcctgagcctgagactgctgcagagccacctgagagcccaggtggtggccggctgcggcatcctgttcagctgcatgacccccctgggcatcggcctgggcgccgccctggccgagagcgccggccccctgcaccagctggcccagagcgtgctggagggcatggccgccggcaccttcctgtacatcaccttcctggagatcctgccccaggagctggccagcagcgagcagagaatcctgaaggtgatcctgctgctggccggcttcgccctgctgaccggcctgctgttctag

SEQ ID NO: 99947 - DNA, 669 bp, synthetic construct
  misc_feature 1..669: note = Description of Artificial Sequence: Synthetic coding sequence
  source 1..669: mol_type = other DNA
atgaaggcccagctgcagttccccctgcaggagttcatcctggccatgggcttcttcctggtgctggtgatggagcagatcaccctggcctacaaggagcagagcggccccagccccctggaggagaccagagccctgctgggcaccgtgaacggcggcccccagcactggcacgacggccccggcgtgccccaggccagcggcgcccccgccacccccagcgccctgagagcctgcgtgctggtgttcagcctggccctgcacagcgtgttcgagggcctggccgtgggcctgcagagagacagagccagagccatggagctgtgcctggccctgctgctgcacaagggcatcctggccgtgagcctgagcctgagactgctgcagagccacctgagagcccaggtggtggccggctgcggcatcctgttcagctgcatgacccccctgggcatcggcctgggcgccgccctggccgagagcgccggccccctgcaccagctggcccagagcgtgctggagggcatggccgccggcaccttcctgtacatcaccttcctggagatcctgccccaggagctggccagcagcgagcagagaatcctgaaggtgatcctgctgctggccggcttcgccctgctgaccggcctgctgttcatccagatctag

SEQ ID NO: 99948 - DNA, 942 bp, synthetic construct
  misc_feature 1..942: note = Description of Artificial Sequence: Synthetic coding sequence
  source 1..942: mol_type = other DNA
atgggcccctggggcgagcccgagctgctggtgtggagacccgaggccgtggccagcgagccccccgtgcccgtgggcctggtgctgaccctgctgtgcagcctggtgcccatctgcgtgctgagaagacccggcgccaaccacgagggcagcgccagcagacagaaggccctgagcctggtgagctgcttcgccggcggcgtgttcctggccacctgcctgctggacctgctgcccgactacctggccgccatcgacgaggccctggccgccctgcacgtgaccctgcagttccccctgcaggagttcatcctggccatgggcttcttcctggtgctggtgatggagcagatcaccctggcctacaaggagcagagcggccccagccccctggaggagaccagagccctgctgggcaccgtgaacggcggcccccagcactggcacgacggccccggcgtgccccaggccagcggcgcccccgccacccccagcgccctgagagcctgcgtgctggtgttcagcctggccctgcacagcgtgttcgagggcctggccgtgggcctgcagagagacagagccagagccatggagctgtgcctggccctgctgctgcacaagggcatcctggccgtgagcctgagcctgagactgctgcagagccacctgagagcccaggtggtggccggctgcggcatcctgttcagctgcatgacccccctgggcatcggcctgggcgccgccctggccgagagcgccggccccctgcaccagctggcccagagcgtgctggagggcatggccgccggcaccttcctgtacatcaccttcctggagatcctgccccaggagctggccagcagcgagcagagaatcctgaaggtgatcctgctgctggccggcttcgccctgctgaccggcctgctgttcatccagatctag

SEQ ID NO: 99949 - DNA, 1095 bp, synthetic construct
  misc_feature 1..1095: note = Description of Artificial Sequence: Synthetic coding sequence
  source 1..1095: mol_type = other DNA
atgcccggctgcccctgccccggctgcggcatggccggccccagactgctgttcctgaccgccctggccctggagctgctggagagagccggcggcagccagcccgccctgagaagcagaggcaccgccaccgcctgcagactggacaacaaggagagcgagagctggggcgccctgctgagcggcgagagactggacacctggatctgcagcctgctgggcagcctgatggtgggcctgagcggcgtgttccccctgctggtgatccccctggagatgggcaccatgctgagaagcgaggccggcgcctggagactgaagcagctgctgagcttcgccctgggcggcctgctgggcaacgtgttcctgcacctgctgcccgaggcctgggcctacacctgcagcgccagccccggcggcgagggccagagcctgcagcagcagcagcagctgggcctgtgggtgatcgccggcatcctgaccttcctggccctggagaagatgttcctggacagcaaggaggagggcaccagccaggcccccaacaaggaccccaccgccgccgccgccgccctgaacggcggccactgcctggcccagcccgccgccgagcccggcctgggcgccgtggtgagaagcatcaaggtgagcggctacctgaacctgctggccaacaccatcgacaacttcacccacggcctggccgtggccgccagcttcctggtgagcaagaagatcggcctgctgaccaccatggccatcctgctgcacgagatcccccacgaggtgggcgacttcgccatcctgctgagagccggcttcgacagatggagcgccgccaagctgcagctgagcaccgccctgggcggcctgctgggcgccggcttcgccatctgcacccagagccccaagggcgtggaggagaccgccgcctgggtgctgcccttcaccagcggcggcttcctgtacatcgccctggtgaacgtgctgcccgacctgctggaggaggaggacccctggagaagcctgcagcagctgctgctgctgtgcgccggcatcgtggtgatggtgctgttcagcctgttcgtggactag

SEQ ID NO: 99950 - DNA, 1116 bp, synthetic construct
  misc_feature 1..1116: note = Description of Artificial Sequence: Synthetic coding sequence
  source 1..1116: mol_type = other DNA
atgcccggctgcccctgccccggctgcggcatggccggccccagactgctgttcctgaccgccctggccctggagctgctggagagagccggcggcagccagcccgccctgagaagcagaggcaccgccaccgcctgcagactggacaacaaggagagcgagagctggggcgccctgctgagcggcgagagactggacacctggatctgcagcctgctgggcagcctgatggtgggcctgagcggcgtgttccccctgctggtgatccccctggagatgggcaccatgctgagaagcgaggccggcgcctggagactgaagcagctgctgagcttcgccctgggcggcctgctgggcaacgtgttcctgcacctgctgcccgaggcctgggcctacacctgcagcgccagccccggcggcgagggccagagcctgcagcagcagcagcagctgggcctgtgggtgatcgccggcatcctgaccttcctggccctggagaagatgttcctggacagcaaggaggagggcaccagccaggcccccaacaaggaccccaccgccgccgccgccgccctgaacggcggccactgcctggcccagcccgccgccgagcccggcctgggcgccgtggtgagaagcatcaaggtgagcggctacctgaacctgctggccaacaccatcgacaacttcacccacggcctggccgtggccgccagcttcctggtgagcaagaagatcggcctgctgaccaccatggccatcctgctgcacgagatcccccacgaggtgggcgacttcgccatcctgctgagagccggcttcgacagatggagcgccgccaagctgcagctgagcaccgccctgggcggcctgctgggcgccggcttcgccatctgcacccagagccccaagggcgtggtgggctgcagccccgccgccgaggagaccgccgcctgggtgctgcccttcaccagcggcggcttcctgtacatcgccctggtgaacgtgctgcccgacctgctggaggaggaggacccctggagaagcctgcagcagctgctgctgctgtgcgccggcatcgtggtgatggtgctgttcagcctgttcgtggactag

SEQ ID NO: 99951 - DNA, 930 bp, synthetic construct
  misc_feature 1..930: note = Description of Artificial Sequence: Synthetic coding sequence
  source 1..930: mol_type = other DNA
atggagcagctgctgggcatcaagctgggctgcctgttcgccctgctggccctgaccctgggctgcggcctgacccccatctgcttcaagtggttccagatcgacgccgccagaggccaccacagactggtgctgagactgctgggctgcatcagcgccggcgtgttcctgggcgccggcttcatgcacatgaccgccgaggccctggaggagatcgagagccagatccagaagttcatggtgcagaacagaagcgccagcgagagaaacagcagcggcgacgccgacagcgcccacatggagtacccctacggcgagctgatcatcagcctgggcttcttcttcgtgttcttcctggagagcctggccctgcagtgctgccccggcgccgccggcggcagcaccgtgcaggacgaggagtggggcggcgcccacatcttcgagctgcacagccacggccacctgcccagccccagcaagggccccctgagagccctggtgctgctgctgagcctgagcttccacagcgtgttcgagggcctggccgtgggcctgcagcccaccgtggccgccaccgtgcagctgtgcctggccgtgctggcccacaagggcctggtggtgttcggcgtgggcatgagactggtgcacctgggcaccagcagcagatgggccgtgttcagcatcctgctgctggccctgatgagccccctgggcctggccgtgggcctggccgtgaccggcggcgacagcgagggcggcagaggcctggcccaggccgtgctggagggcgtggccgccggcaccttcctgtacgtgaccttcctggagatcctgcccagagagctggccagccccgaggcccccctggccaagtggagctgcgtggccgccggcttcgccttcatggccttcatcgccctgtgggcctag

SEQ ID NO: 99952 - DNA, 945 bp, synthetic construct
  misc_feature 1..945: note = Description of Artificial Sequence: Synthetic coding sequence
  source 1..945: mol_type = other DNA
atggtgaagctgctggtggccaagatcctgtgcatggtgggcgtgttcttcttcatgctgctgggcagcctgctgcccgtgaagatcatcgagaccgacttcgagaaggcccacagaagcaagaagatcctgagcctgtgcaacaccttcggcggcggcgtgttcctggccacctgcttcaacgccctgctgcccgccgtgagagagaagctgcagaaggtgctgagcctgggccacatcagcaccgactaccccctggccgagaccatcctgctgctgggcttcttcatgaccgtgttcctggagcagctgatcctgaccttcagaaaggagaagcccagcttcatcgacctggagaccttcaacgccggcagcgacgtgggcagcgacagcgagtacgagagccccttcatgggcggcgccagaggccacgccctgtacgtggagccccacggccacggccccagcctgagcgtgcagggcctgagcagagccagccccgtgagactgctgagcctggccttcgccctgagcgcccacagcgtgttcgagggcctggccctgggcctgcaggaggagggcgagaaggtggtgagcctgttcgtgggcgtggccgtgcacgagaccctggtggccgtggccctgggcatcagcatggccagaagcgccatgcccctgagagacgccgccaagctggccgtgaccgtgagcgccatgatccccctgggcatcggcctgggcctgggcatcgagagcgcccagggcgtgcccggcagcgtggccagcgtgctgctgcagggcctggccggcggcaccttcctgttcatcaccttcctggagatcctggccaaggagctggaggagaagagcgacagactgctgaaggtgctgttcctggtgctgggctacaccgtgctggccggcatggtgttcctgaagtggtag

SEQ ID NO: 99953 - DNA, 318 bp, synthetic construct
  misc_feature 1..318: note = Description of Artificial Sequence: Synthetic coding sequence
  source 1..318: mol_type = other DNA
atggtgaagctgctggtggccaagatcctgtgcatggtgggcgtgttcttcttcatgctgctgggcagcctgctgcccgtgaagatcatcgagaccgacttcgagaaggcccacagaagcaagaagatcctgagcctgtgcaacaccttcggcggcggcgtgttcctggccacctgcttcaacgccctgctgcccgccgtgagagagaaggtgagagccccctgggccctggccgccgccctgggcaccctgtggcccagagacagcgacgccttcagcaccctgatgcccagcagcgtgaaggccctgatgctgtag

SEQ ID NO: 99954 - DNA, 972 bp, synthetic construct
  misc_feature 1..972: note = Description of Artificial Sequence: Synthetic coding sequence
  source 1..972: mol_type = other DNA
atggtgaagctgctggtggccaagatcctgtgcatggtgggcgtgttcttcttcatgctgctgggcagcctgctgcccgtgaagatcatcgagaccgacttcgagaaggcccacagaagcaagaagatcctgagcctgtgcaacaccttcggcggcggcgtgttcctggccacctgcttcaacgccctgctgcccgccgtgagagagaagctgcagaaggtgctgagcctgggccacatcagcaccgactaccccctggccgagaccatcctgctgctgggcttcttcatgaccgtgttcctggagcagctgatcctgaccttcagaaaggagaagcccagcttcatcgacctggagaccttcaacgccggcagcgacgtgggcagcgacagcgagtacgagagccccttcatgggcggcgccagaggccacgccctgtacgtggagccccacggccacggccccagcctgagcgtgcagggcctgagcagagccagccccgtgagactgctgagcctggccttcgccctgagcgcccacagcgtgttcgagggcctggccctgggcctgcaggaggagggcgagaaggtggtgagcctgttcgtgggcgtggccgtgcacgagaccctggtggccgtggccctgggcatcagcatggccagaagcgccatgcccctgagagacgccgccaagctggccgtgaccgtgagcgccatgatccccctgggcatcggcctgggcctgggcatcgagagcgcccagggcgtgcccggcagcgtggccagcgtgctgctgcagggcctggccggcggcaccttcctgttcatcaccttcctggagatcctggccaaggagctggaggagaagagcgacagactgctgaaggtgctgttcctggtgctgggctacaccgtgctggccggcatggtgttcctgaagtggatcagcccccccgagcccagagtgagctag

SEQ ID NO: 99955 - DNA, 1869 bp, synthetic construct
  misc_feature 1..1869: note = Description of Artificial Sequence: Synthetic coding sequence
  source 1..1869: mol_type = other DNA
atggtggacgtggtgggcctggagagagagaccggccccagaggcagcccctggcccggcctgcccctgcccagcctggtgggccccgcccccctgctgacctgcctgtgcccccagtgcctgagcgtggaggacgccctgggcctgggcgagcccgagggcagcggcctgccccccggccccgtgctggaggccagatacgtggccagactgagcgccgccgccgtgctgtacctgagcaaccccgagggcacctgcgaggacgccagagccggcctgtgggccagccacgccgaccacctgctggccctgctggagagccccaaggccctgacccccggcctgagctggctgctgcagagaatgcaggccagagccgccggccagacccccaagaccgcctgcgtggacatcccccagctgctggaggaggccgtgggcgccggcgcccccggcagcgccggcggcgtgctggccgccctgctggaccacgtgagaagcggcagctgcttccacgccctgcccagcccccagtacttcgtggacttcgtgttccagcagcacagcagcgaggtgcccatgaccctggccgagctgagcgccctgatgcagagactgggcgtgggcagagaggcccacagcgaccacagccacagacacagaggcgccagcagctgggaccccgtgcccctgatcagcagcagcaacagcagcagcgtgtgggacaccgtgtgcctgagcgccagagacgtgatggccgcctacggcctgagcgagcaggccggcgtgacccccgaggcctgggcccagctgagccccgccctgctgcagcagcagctgagcggcgcctgcaccagccagagcagaccccccgtgcaggaccagctgagccagagcgagagatacctgtacggcagcctggccaccctgctgatctgcctgtgcgccgtgttcggcctgctgctgctgacctgcaccggctgcagaggcgtgacccactacatcctgcagaccttcctgagcctggccgtgggcgccctgaccggcgacgccgtgctgcacctgacccccaaggtgctgggcctgcacacccacagcgaggagggcctgagcccccagcccacctggagactgctggccatgctggccggcctgtacgccttcttcctgttcgagaacctgttcaacctgctgctgcccagagaccccgaggacctggaggacggcccctgcggccacagcagccacagccacggcggccacagccacggcgtgagcctgcagctggcccccagcgagctgagacagcccaagcccccccacgagggcagcagagccgacctggtggccgaggagagccccgagctgctgaaccccgagcccagaagactgagccccgagctgagactgctgccctacatgatcaccctgggcgacgccgtgcacaacttcgccgacggcctggccgtgggcgccgccttcgccagcagctggaagaccggcctggccaccagcctggccgtgttctgccacgagctgccccacgagctgggcgacttcgccgccctgctgcacgccggcctgagcgtgagacaggccctgctgctgaacctggccagcgccctgaccgccttcgccggcctgtacgtggccctggccgtgggcgtgagcgaggagagcgaggcctggatcctggccgtggccaccggcctgttcctgtacgtggccctgtgcgacatgctgcccgccatgctgaaggtgagagaccccagaccctggctgctgttcctgctgcacaacgtgggcctgctgggcggctggaccgtgctgctgctgctgagcctgtacgaggacgacatcaccttctag

SEQ ID NO: 99956 - DNA, 1944 bp, synthetic construct
  misc_feature 1..1944: note = Description of Artificial Sequence: Synthetic coding sequence
  source 1..1944: mol_type = other DNA
atggccagcctggtgagcctggagctgggcctgctgctggccgtgctggtggtgaccgccaccgccagcccccccgccggcctgctgagcctgctgaccagcggccagggcgccctggaccaggaggccctgggcggcctgctgaacaccctggccgacagagtgcactgcgccaacggcccctgcggcaagtgcctgagcgtggaggacgccctgggcctgggcgagcccgagggcagcggcctgccccccggccccgtgctggaggccagatacgtggccagactgagcgccgccgccgtgctgtacctgagcaaccccgagggcacctgcgaggacgccagagccggcctgtgggccagccacgccgaccacctgctggccctgctggagagccccaaggccctgacccccggcctgagctggctgctgcagagaatgcaggccagagccgccggccagacccccaagaccgcctgcgtggacatcccccagctgctggaggaggccgtgggcgccggcgcccccggcagcgccggcggcgtgctggccgccctgctggaccacgtgagaagcggcagctgcttccacgccctgcccagcccccagtacttcgtggacttcgtgttccagcagcacagcagcgaggtgcccatgaccctggccgagctgagcgccctgatgcagagactgggcgtgggcagagaggcccacagcgaccacagccacagacacagaggcgccagcagctgggaccccgtgcccctgatcagcagcagcaacagcagcagcgtgtgggacaccgtgtgcctgagcgccagagacgtgatggccgcctacggcctgagcgagcaggccggcgtgacccccgaggcctgggcccagctgagccccgccctgctgcagcagcagctgagcggcgcctgcaccagccagagcagaccccccgtgcaggaccagctgagccagagcgagagatacctgtacggcagcctggccaccctgctgatctgcctgtgcgccgtgttcggcctgctgctgctgacctgcaccggctgcagaggcgtgacccactacatcctgcagaccttcctgagcctggccgtgggcgccctgaccggcgacgccgtgctgcacctgacccccaaggtgctgggcctgcacacccacagcgaggagggcctgagcccccagcccacctggagactgctggccatgctggccggcctgtacgccttcttcctgttcgagaacctgttcaacctgctgctgcccagagaccccgaggacctggaggacggcccctgcggccacagcagccacagccacggcggccacagccacggcgtgagcctgcagctggcccccagcgagctgagacagcccaagcccccccacgagggcagcagagccgacctggtggccgaggagagccccgagctgctgaaccccgagcccagaagactgagccccgagctgagactgctgccctacatgatcaccctgggcgacgccgtgcacaacttcgccgacggcctggccgtgggcgccgccttcgccagcagctggaagaccggcctggccaccagcctggccgtgttctgccacgagctgccccacgagctgggcgacttcgccgccctgctgcacgccggcctgagcgtgagacaggccctgctgctgaacctggccagcgccctgaccgccttcgccggcctgtacgtggccctggccgtgggcgtgagcgaggagagcgaggcctggatcctggccgtggccaccggcctgttcctgtacgtggccctgtgcgacatgctgcccgccatgctgaaggtgagagaccccagaccctggctgctgttcctgctgcacaacgtgggcctgctgggcggctggaccgtgctgctgctgctgagcctgtacgaggacgacatcaccttctag

SEQ ID NO: 99957 - DNA, 1410 bp, synthetic construct
  misc_feature 1..1410: note = Description of Artificial Sequence: Synthetic coding sequence
  source 1..1410: mol_type = other DNA
atggccagaggcctgggcgccccccactgggtggccgtgggcctgctgacctgggccaccctgggcctgctggtggccggcctgggcggccacgacgacctgcacgacgacctgcaggaggacttccacggccacagccacagacacagccacgaggacttccaccacggccacagccacgcccacggccacggccacacccacgagagcatctggcacggccacacccacgaccacgaccacggccacagccacgaggacctgcaccacggccacagccacggctacagccacgagagcctgtaccacagaggccacggccacgaccacgagcacagccacggcggctacggcgagagcggcgcccccggcatcaagcaggacctggacgccgtgaccctgtgggcctacgccctgggcgccaccgtgctgatcagcgccgcccccttcttcgtgctgttcctgatccccgtggagagcaacagccccagacacagaagcctgctgcagatcctgctgagcttcgccagcggcggcctgctgggcgacgccttcctgcacctgatcccccacgccctggagccccacagccaccacaccctggagcagcccggccacggccacagccacagcggccagggccccatcctgagcgtgggcctgtgggtgctgagcggcatcgtggccttcctggtggtggagaagttcgtgagacacgtgaagggcggccacggccacagccacggccacggccacgcccacagccacaccagaggcagccacggccacggcagacaggagagaagcaccaaggagaagcagagcagcgaggaggaggagaaggagaccagaggcgtgcagaagagaagaggcggcagcaccgtgcccaaggacggccccgtgagaccccagaacgccgaggaggagaagagaggcctggacctgagagtgagcggctacctgaacctggccgccgacctggcccacaacttcaccgacggcctggccatcggcgccagcttcagaggcggcagaggcctgggcatcctgaccaccatgaccgtgctgctgcacgaggtgccccacgaggtgggcgacttcgccatcctggtgcagagcggctgcagcaagaagcaggccatgagactgcagctgctgaccgccgtgggcgccctggccggcaccgcctgcgccctgctgaccgagggcggcgccgtgggcagcgagatcgccggcggcgccggccccggctgggtgctgcccttcaccgccggcggcttcatctacgtggccaccgtgagcgtgctgcccgagctgctgagagaggccagccccctgcagagcctgctggaggtgctgggcctgctgggcggcgtgatcatgatggtgctgatcgcccacctggagtag

SEQ ID NO: 99958 - DNA, 1410 bp, synthetic construct; identical to SEQ ID NO: 99957
  misc_feature 1..1410: note = Description of Artificial Sequence: Synthetic coding sequence
  source 1..1410: mol_type = other DNA

SEQ ID NO: 99959 - DNA, 1410 bp, synthetic construct; identical to SEQ ID NO: 99957
  misc_feature 1..1410: note = Description of Artificial Sequence: Synthetic coding sequence
  source 1..1410: mol_type = other DNA

SEQ ID NO: 99960 - DNA, 1410 bp, synthetic construct; identical to SEQ ID NO: 99957
  misc_feature 1..1410: note = Description of Artificial Sequence: Synthetic coding sequence
  source 1..1410: mol_type = other DNA

SEQ ID NO: 99961 - DNA, 663 bp, synthetic construct
  misc_feature 1..663: note = Description of Artificial Sequence: Synthetic coding sequence
  source 1..663: mol_type = other DNA
atggacagcagcctgcccgagtgcagacacatcggcaagggcatcagagccaaggtggagagaaacttcctgttcagcagagacctgaaggccggcctgcccagacccagcaagcccggcaaggagagaatccccgagcccgccctgggcgccaccgtgctgatcagcgccgcccccttcttcgtgctgttcctgatccccgtggagagcaacagccccagacacagaagcctgctgcagatcctgctgagcttcgccagcggcggcctgctgggcgacgccttcctgcacctgatcccccacgccctggagccccacagccaccacaccctggagcagcccggccacggccacagccacagcggccagggccccatcctgagcgtgggcctgtgggtgctgagcggcatcgtggccttcctggtggtggagaagttcgtgagacacgtgaagggcggccacggccacagccacggccacggccacgcccacagccacaccagaggcagccacggccacggcagacaggagagaagcaccaaggagaagcagagcagcgaggaggaggagaaggagaccagaggcgtgcagaagagaagaggcggcagcaccgtgcccaaggacggccccgtgagaccccagaacgccgaggaggagaagtag

SEQ ID NO: 99962 - DNA, 663 bp, synthetic construct; identical to SEQ ID NO: 99961
  misc_feature 1..663: note = Description of Artificial Sequence: Synthetic coding sequence
  source 1..663: mol_type = other DNA

SEQ ID NO: 99963 - DNA, 1410 bp, synthetic construct; identical to SEQ ID NO: 99957
  misc_feature 1..1410: note = Description of Artificial Sequence: Synthetic coding sequence
  source 1..1410: mol_type = other DNA

SEQ ID NO: 99964 - DNA, 1410 bp, synthetic construct; identical to SEQ ID NO: 99957
  misc_feature 1..1410: note = Description of Artificial Sequence: Synthetic coding sequence
  source 1..1410: mol_type = other DNA

SEQ ID NO: 99965 - DNA, 1410 bp, synthetic construct; identical to SEQ ID NO: 99957
  misc_feature 1..1410: note = Description of Artificial Sequence: Synthetic coding sequence
  source 1..1410: mol_type = other DNA

SEQ ID NO: 99966 - DNA, 663 bp, synthetic construct; identical to SEQ ID NO: 99961
  misc_feature 1..663: note = Description of Artificial Sequence: Synthetic coding sequence
  source 1..663: mol_type = other DNA

SEQ ID NO: 99967 - DNA, 663 bp, synthetic construct; identical to SEQ ID NO: 99961
  misc_feature 1..663: note = Description of Artificial Sequence: Synthetic coding sequence
  source 1..663: mol_type = other DNA

SEQ ID NO: 99968 - DNA, 1410 bp, synthetic construct; identical to SEQ ID NO: 99957
  misc_feature 1..1410: note = Description of Artificial Sequence: Synthetic coding sequence
  source 1..1410: mol_type = other DNA

SEQ ID NO: 99969 - DNA, 1410 bp, synthetic construct; identical to SEQ ID NO: 99957
  misc_feature 1..1410: note = Description of Artificial Sequence: Synthetic coding sequence
  source 1..1410: mol_type = other DNA

SEQ ID NO: 99970 - DNA, 1410 bp, synthetic construct; identical to SEQ ID NO: 99957
  misc_feature 1..1410: note = Description of Artificial Sequence: Synthetic coding sequence
  source 1..1410: mol_type = other DNA

SEQ ID NO: 99971 - DNA, 1410 bp, synthetic construct; identical to SEQ ID NO: 99957
  misc_feature 1..1410: note = Description of Artificial Sequence: Synthetic coding sequence
  source 1..1410: mol_type = other DNA

SEQ ID NO: 99972 - DNA, 663 bp, synthetic construct; identical to SEQ ID NO: 99961
  misc_feature 1..663: note = Description of Artificial Sequence: Synthetic coding sequence
  source 1..663: mol_type = other DNA

SEQ ID NO: 99973 - DNA, 1125 bp, synthetic construct
  misc_feature 1..1125: note = Description of Artificial Sequence: Synthetic coding sequence
  source 1..1125: mol_type = other DNA
atggccagaggcctgggcgccccccactgggtggccgtgggcctgctgacctgggccaccctgggcctgctggtggccggcctgggcggccacgacgacctgcacgacgacctgcaggaggacttccacggccacagccacagcgccgacctgagcagcagcatcttctgccccctgccctaccccagaggcgtggagctgagccccgccagcctgagcaccagcgacctggcccagttctgcttcagatgggcccccggcagatgcttcctgcacctgatcccccacgccctggagccccacagccaccacaccctggagcagcccggccacggccacagccacagcggccagggccccatcctgagcgtgggcctgtgggtgctgagcggcatcgtggccttcctggtggtggagaagttcgtgagacacgtgaagggcggccacggccacagccacggccacggccacgcccacagccacaccagaggcagccacggccacggcagacaggagagaagcaccaaggagaagcagagcagcgaggaggaggagaaggagaccagaggcgtgcagaagagaagaggcggcagcaccgtgcccaaggacggccccgtgagaccccagaacgccgaggaggagaagagaggcctggacctgagagtgagcggctacctgaacctggccgccgacctggcccacaacttcaccgacggcctggccatcggcgccagcttcagaggcggcagaggcctgggcatcctgaccaccatgaccgtgctgctgcacgaggtgccccacgaggtgggcgacttcgccatcctggtgcagagcggctgcagcaagaagcaggccatgagactgcagctgctgaccgccgtgggcgccctggccggcaccgcctgcgccctgctgaccgagggcggcgccgtgggcagcgagatcgccggcggcgccggccccggctgggtgctgcccttcaccgccggcggcttcatctacgtggccaccgtgagcgtgctgcccgagctgctgagagaggccagccccctgcagagcctgctggaggtgctgggcctgctgggcggcgtgatcatgatggtgctgatcgcccacctggagtag

SEQ ID NO: 99974 - DNA, 1353 bp, synthetic construct
  misc_feature 1..1353: note = Description of Artificial Sequence: Synthetic coding sequence
  source 1..1353: mol_type = other DNA
atggccagaggcctgggcgccccccactgggtggccgtgggcctgctgacctgggccaccctgggcctgctggtggccggcctgggcggccacgacgacctgcacgacgacctgcaggaggacttccacggccacggccacacccacgagagcatctggcacggccacacccacgaccacgaccacggccacagccacgaggacctgcaccacggccacagccacggctacagccacgagagcctgtaccacagaggccacggccacgaccacgagcacagccacggcggctacggcgagagcggcgcccccggcatcaagcaggacctggacgccgtgaccctgtgggcctacgccctgggcgccaccgtgctgatcagcgccgcccccttcttcgtgctgttcctgatccccgtggagagcaacagccccagacacagaagcctgctgcagatcctgctgagcttcgccagcggcggcctgctgggcgacgccttcctgcacctgatcccccacgccctggagccccacagccaccacaccctggagcagcccggccacggccacagccacagcggccagggccccatcctgagcgtgggcctgtgggtgctgagcggcatcgtggccttcctggtggtggagaagttcgtgagacacgtgaagggcggccacggccacagccacggccacggccacgcccacagccacaccagaggcagccacggccacggcagacaggagagaagcaccaaggagaagcagagcagcgaggaggaggagaaggagaccagaggcgtgcagaagagaagaggcggcagcaccgtgcccaaggacggccccgtgagaccccagaacgccgaggaggagaagagaggcctggacctgagagtgagcggctacctgaacctggccgccgacctggcccacaacttcaccgacggcctggccatcggcgccagcttcagaggcggcagaggcctgggcatcctgaccaccatgaccgtgctgctgcacgaggtgccccacgaggtgggcgacttcgccatcctggtgcagagcggctgcagcaagaagcaggccatgagactgcagctgctgaccgccgtgggcgccctggccggcaccgcctgcgccctgctgaccgagggcggcgccgtgggcagcgagatcgccggcggcgccggccccggctgggtgctgcccttcaccgccggcggcttcatctacgtggccaccgtgagcgtgctgcccgagctgctgagagaggccagccccctgcagagcctgctggaggtgctgggcctgctgggcggcgtgatcatgatggtgctgatcgcccacctggagtag

SEQ ID NO: 99975 - DNA, 663 bp, synthetic construct; identical to SEQ ID NO: 99961
  misc_feature 1..663: note = Description of Artificial Sequence: Synthetic coding sequence
  source 1..663: mol_type = other DNA

SEQ ID NO: 99976 - DNA, 1410 bp, synthetic construct; identical to SEQ ID NO: 99957
  misc_feature 1..1410: note = Description of Artificial Sequence: Synthetic coding sequence
  source 1..1410: mol_type = other DNA

SEQ ID NO: 99977 - DNA, 1125 bp, synthetic construct; identical to SEQ ID NO: 99973
  misc_feature 1..1125: note = Description of Artificial Sequence: Synthetic coding sequence
  source 1..1125: mol_type = other DNA

SEQ ID NO: 99978 - DNA, 1353 bp, synthetic construct; identical to SEQ ID NO: 99974
  misc_feature 1..1353: note = Description of Artificial Sequence: Synthetic coding sequence
  source 1..1353: mol_type = other DNA

SEQ ID NO: 99979 - DNA, 1125 bp, synthetic construct; identical to SEQ ID NO: 99973
  misc_feature 1..1125: note = Description of Artificial Sequence: Synthetic coding sequence
  source 1..1125: mol_type = other DNA

SEQ ID NO: 99980 - DNA, 1125 bp, synthetic construct; identical to SEQ ID NO: 99973
  misc_feature 1..1125: note = Description of Artificial Sequence: Synthetic coding sequence
  source 1..1125: mol_type = other DNA

SEQ ID NO: 99981 - DNA, 1353 bp, synthetic construct; identical to SEQ ID NO: 99974
  misc_feature 1..1353: note = Description of Artificial Sequence: Synthetic coding sequence
  source 1..1353: mol_type = other DNA

SEQ ID NO: 99982 - DNA, 1353 bp, synthetic construct; identical to SEQ ID NO: 99974
  misc_feature 1..1353: note = Description of Artificial Sequence: Synthetic coding sequence
  source 1..1353: mol_type = other DNA

SEQ ID NO: 99983 - DNA, 1125 bp, synthetic construct; identical to SEQ ID NO: 99973
  misc_feature 1..1125: note = Description of Artificial Sequence: Synthetic coding sequence
  source 1..1125: mol_type = other DNA

SEQ ID NO: 99984 - DNA, 1353 bp, synthetic construct; identical to SEQ ID NO: 99974
  misc_feature 1..1353: note = Description of Artificial Sequence: Synthetic coding sequence
  source 1..1353: mol_type = other DNA

SEQ ID NO: 99985 - DNA, 1353 bp, synthetic construct; identical to SEQ ID NO: 99974
  misc_feature 1..1353: note = Description of Artificial Sequence: Synthetic coding sequence
  source 1..1353: mol_type = other DNA

SEQ ID NO: 99986 - DNA, 1125 bp, synthetic construct; identical to SEQ ID NO: 99973
  misc_feature 1..1125: note = Description of Artificial Sequence: Synthetic coding sequence
  source 1..1125: mol_type = other DNA

SEQ ID NO: 99987 - DNA, 2391 bp, synthetic construct
  misc_feature 1..2391: note = Description of Artificial Sequence: Synthetic coding sequence
  source 1..2391: mol_type = other DNA
atgctggcccccctgagaaacgcccccggcagagagggcgccaccagccccagcccccccaccgacgccaccggcagcctgggcgagtgggacgtggacagaaacgtgaagaccgagggctgggtgagcaaggagagaatcagcaagctgcacagactgagaatggccgacatcctgagccagagcgagaccctggccagccaggacctgagcggcgacttcaagaagcccgccctgcccgtgagccccgccgccagaagcaaggcccccgccagcagcagcagcaaccccgaggaggtgcagaaggagggccccaccgccctgcaggacagcaacagcggcgagcccgacatcccccccccccagcccgactgcggcgacttcagaagcctgcaggaggagcagagcagaccccccaccgccgtgagcagccccggcggccccgccagagcccccccctaccaggagcccccctggggcggccccgccaccgccccctacagcctggagaccctgaagggcggcaccatcctgggcaccagaagcctgaagggcaccagctactgcctgttcggcagactgagcggctgcgacgtgtgcctggagcaccccagcgtgagcagataccacgccgtgctgcagcacagagccagcggccccgacggcgagtgcgacagcaacggccccggcttctacctgtacgacctgggcagcacccacggcaccttcctgaacaagaccagaatcccccccagaacctactgcagagtgcacgtgggccacgtggtgagattcggcggcagcaccagactgttcatcctgcagggccccgaggaggacagagaggccgagagcgagctgaccgtgacccagctgaaggagctgagaaagcagcagcagatcctgctggagaagaagatgctgggcgaggacagcgacgaggaggaggagatggacaccagcgagagaaagatcaacgccggcagccaggacgacgagatgggctgcacctggggcatgggcgaggacgccgtggaggacgacgccgaggagaaccccatcgtgctggagttccagcaggagagagaggccttctacatcaaggaccccaagaaggccctgcagggcttcttcgacagagagggcgaggagctggagtacgagttcgacgagcagggccacagcacctggctgtgcagagtgagactgcccgtggacgacagcaccggcaagcagctggtggccgaggccatccacagcggcaagaagaaggaggccatgatccagtgcagcctggaggcctgcagaatcctggacaccctgggcctgctgagacaggaggccgtgagcagaaagagaaaggccaagaactgggaggacgaggacttctacgacagcgacgacgacaccttcctggacagaaccggcctgatcgagaagaagagactgaacagaatgaagaaggccggcaagatcgacgagaagcccgagaccttcgagagcctggtggccaagctgaacgacgccgagagagagctgagcgagatcagcgagagactgaaggccagcagccaggtgctgagcgagagccccagccaggacagcctggacgccttcatgagcgagatgaagagcggcagcaccctggacggcgtgagcagaaagaagctgcacctgagaaccttcgagctgagaaaggagcagcagagactgaagggcctgatcaagatcgtgaagcccgccgagatccccgagctgaagaagaccgagacccagaccaccggcgccgagaacaaggccaagaagctgaccctgcccctgttcggcgccatgaagggcggcagcaagttcaagctgaagaccggcaccgtgggcaagctgccccccaagagacccgagctgccccccaccctgatgagaatgaaggacgagcccgaggtggaggaggaggaggaggaggaggaggaggaggagaaggagaaggaggagcacgagaagaagaagctggaggacggcagcctgagcagaccccagcccgagatcgagcccgaggccgccgtgcaggagatgagaccccccaccgacctgacccacttcaaggagacccagacccacgagaacatgagccagctgagcgaggaggagcagaacaaggactaccaggactgcagcaagaccaccagcctgtgcgccggccccagcgccagcaagaacgagtacgagaagagcagaggcgagctgaagaagaagaagacccccggccccggcaagctgccccccaccctgagcagcaagtaccccgaggacgaccccgactactgcgtgtgggtgccccccgagggccagagcggcgacggcagaacccacctgaacgacaagtacggctactag

SEQ ID NO: 99988 - DNA, 3699 bp, synthetic construct
  misc_feature 1..3699: note = Description of Artificial Sequence: Synthetic coding sequence
  source 1..3699: mol_type = other DNA
atggacttcctgctgagaccccagcccgagcccgagagcctgggccccggcacccccggcttccccgagcaggaggaggacgagctgcacagaaccctgggcgtggagagattcgaggagatcctgcaggaggccggcagcagaggcggcgaggagcccggcagaagctacggcgaggaggacttcgagtaccacagacagagcagccaccacatccaccaccccctgagcacccacctgccccccgacgccagaagaagaaagaccccccagggccccggcagaaagcccagaagaagacccggcgccagccccaccggcgagacccccaccatcgaggagggcgaggaggacgaggacgaggccagcgaggccgagggcgccagagccctgacccagcccagccccgtgagcacccccagcagcgtgcagttcttcctgcaggaggacgacagcgccgacagaaaggccgagagaaccagccccagcagccccgcccccctgccccaccaggaggccacccccagagccagcaagggcgcccaggccggcacccaggtggaggaggccgaggccgaggccgtggccgtggccagcggcaccgccggcggcgacgacggcggcgccagcggcagacccctgcccaaggcccagcccggccacagaagctacaacctgcaggagagaagaagaatcggcagcatgaccggcgccgagcaggccctgctgcccagagtgcccaccgacgagatcgaggcccagaccctggccaccgccgacctggacctgatgaagagccacagattcgaggacgtgcccggcgtgagaagacacctggtgagaaagaacgccaagggcagcacccagagcggcagagagggcagagagcccggccccacccccagagccagacccagagccccccacaagccccacgaggtgttcgtggagctgaacgagctgctgctggacaagaaccaggagccccagtggagagagaccgccagatggatcaagttcgaggaggacgtggaggaggagaccgagagatggggcaagccccacgtggccagcctgagcttcagaagcctgctggagctgagaagaaccctggcccacggcgccgtgctgctggacctggaccagcagaccctgcccggcgtggcccaccaggtggtggagcagatggtgatcagcgaccagatcaaggccgaggacagagccaacgtgctgagagccctgctgctgaagcacagccaccccagcgacgagaaggacttcagcttccccagaaacatcagcgccggcagcctgggcagcctgctgggccaccaccacggccagggcgccgagagcgacccccacgtgaccgagcccctgatgggcggcgtgcccgagaccagactggaggtggagagagagagagagctgcccccccccgccccccccgccggcatcaccagaagcaagagcaagcacgagctgaagctgctggagaagatccccgagaacgccgaggccaccgtggtgctggtgggctgcgtggagttcctgagcagacccaccatggccttcgtgagactgagagaggccgtggagctggacgccgtgctggaggtgcccgtgcccgtgagattcctgttcctgctgctgggccccagcagcgccaacatggactaccacgagatcggcagaagcatcagcaccctgatgagcgacaagcagttccacgaggccgcctacctggccgacgagagagaggacctgctgaccgccatcaacgccttcctggactgcagcgtggtgctgccccccagcgaggtgcagggcgaggagctgctgagaagcgtggcccacttccagagacagatgctgaagaagagagaggagcagggcagactgctgcccaccggcgccggcctggagcccaagagcgcccaggacaaggccctgctgcagatggtggaggccgccggcgccgccgaggacgaccccctgagaagaaccggcagacccttcggcggcctgatcagagacgtgagaagaagatacccccactacctgagcgacttcagagacgccctggacccccagtgcctggccgccgtgatcttcatctacttcgccgccctgagccccgccatcaccttcggcggcctgctgggcgagaagacccaggacctgatcggcgtgagcgagctgatcatgagcaccgccctgcagggcgtggtgttctgcctgctgggcgcccagcccctgctggtgatcggcttcagcggccccctgctggtgttcgaggaggccttcttcagcttctgcagcagcaaccacctggagtacctggtgggcagagtgtggatcggcttctggctggtgttcctggccctgctgatggtggccctggagggcagcttcctggtgagattcgtgagcagattcacccaggagatcttcgccttcctgatcagcctgatcttcatctacgagaccttctacaagctggtgaagatcttccaggagcaccccctgcacggctgcagcgccagcaacagcagcgaggtggacggcggcgagaacatgacctgggccggcgccagacccaccctgggccccggcaacagaagcctggccggccagagcggccagggcaagcccagaggccagcccaacaccgccctgctgagcctggtgctgatggccggcaccttcttcatcgccttcttcctgagaaagttcaagaacagcagattcttccccggcagaatcagaagagtgatcggcgacttcggcgtgcccatcgccatcctgatcatggtgctggtggactacagcatcgaggacacctacacccagaagctgagcgtgcccagcggcttcagcgtgaccgcccccgagaagagaggctgggtgatcaaccccctgggcgagaagagccccttccccgtgtggatgatggtggccagcctgctgcccgccatcctggtgttcatcctgatcttcatggagacccagatcaccaccctgatcatcagcaagaaggagagaatgctgcagaagggcagcggcttccacctggacctgctgctgatcgtggccatgggcggcatctgcgccctgttcggcctgccctggctggccgccgccaccgtgagaagcgtgacccacgccaacgccctgaccgtgatgagcaaggccgtggcccccggcgacaagcccaagatccaggaggtgaaggagcagagagtgaccggcctgctggtggccctgctggtgggcctgagcatcgtgatcggcgacctgctgagacagatccccctggccgtgctgttcggcatcttcctgtacatgggcgtgaccagcctgaacggcatccagttctacgagagactgcacctgctgctgatgccccccaagcaccaccccgacgtgacctacgtgaagaaggtgagaaccctgagaatgcacctgttcaccgccctgcagctgctgtgcctggccctgctgtgggccgtgatgagcaccgccgccagcctggccttccccttcatcctgatcctgaccgtgcccctgagaatggtggtgctgaccagaatcttcaccgacagagagatgaagtgcctggacgccaacgaggccgagcccgtgttcgacgagagagagggcgtggacgagtacaacgagatgcccatgcccgtgtag

SEQ ID NO: 99989 - DNA, 3684 bp, synthetic construct
  misc_feature 1..3684: note = Description of Artificial Sequence: Synthetic coding sequence
  source 1..3684: mol_type = other DNA
atgacccagcccgagcccgagagcctgggccccggcacccccggcttccccgagcaggaggaggacgagctgcacagaaccctgggcgtggagagattcgaggagatcctgcaggaggccggcagcagaggcggcgaggagcccggcagaagctacggcgaggaggacttcgagtaccacagacagagcagccaccacatccaccaccccctgagcacccacctgccccccgacgccagaagaagaaagaccccccagggccccggcagaaagcccagaagaagacccggcgccagccccaccggcgagacccccaccatcgaggagggcgaggaggacgaggacgaggccagcgaggccgagggcgccagagccctgacccagcccagccccgtgagcacccccagcagcgtgcagttcttcctgcaggaggacgacagcgccgacagaaaggccgagagaaccagccccagcagccccgcccccctgccccaccaggaggccacccccagagccagcaagggcgcccaggccggcacccaggtggaggaggccgaggccgaggccgtggccgtggccagcggcaccgccggcggcgacgacggcggcgccagcggcagacccctgcccaaggcccagcccggccacagaagctacaacctgcaggagagaagaagaatcggcagcatgaccggcgccgagcaggccctgctgcccagagtgcccaccgacgagatcgaggcccagaccctggccaccgccgacctggacctgatgaagagccacagattcgaggacgtgcccggcgtgagaagacacctggtgagaaagaacgccaagggcagcacccagagcggcagagagggcagagagcccggccccacccccagagccagacccagagccccccacaagccccacgaggtgttcgtggagctgaacgagctgctgctggacaagaaccaggagccccagtggagagagaccgccagatggatcaagttcgaggaggacgtggaggaggagaccgagagatggggcaagccccacgtggccagcctgagcttcagaagcctgctggagctgagaagaaccctggcccacggcgccgtgctgctggacctggaccagcagaccctgcccggcgtggcccaccaggtggtggagcagatggtgatcagcgaccagatcaaggccgaggacagagccaacgtgctgagagccctgctgctgaagcacagccaccccagcgacgagaaggacttcagcttccccagaaacatcagcgccggcagcctgggcagcctgctgggccaccaccacggccagggcgccgagagcgacccccacgtgaccgagcccctgatgggcggcgtgcccgagaccagactggaggtggagagagagagagagctgcccccccccgccccccccgccggcatcaccagaagcaagagcaagcacgagctgaagctgctggagaagatccccgagaacgccgaggccaccgtggtgctggtgggctgcgtggagttcctgagcagacccaccatggccttcgtgagactgagagaggccgtggagctggacgccgtgctggaggtgcccgtgcccgtgagattcctgttcctgctgctgggccccagcagcgccaacatggactaccacgagatcggcagaagcatcagcaccctgatgagcgacaagcagttccacgaggccgcctacctggccgacgagagagaggacctgctgaccgccatcaacgccttcctggactgcagcgtggtgctgccccccagcgaggtgcagggcgaggagctgctgagaagcgtggcccacttccagagacagatgctgaagaagagagaggagcagggcagactgctgcccaccggcgccggcctggagcccaagagcgcccaggacaaggccctgctgcagatggtggaggccgccggcgccgccgaggacgaccccctgagaagaaccggcagacccttcggcggcctgatcagagacgtgagaagaagatacccccactacctgagcgacttcagagacgccctggacccccagtgcctggccgccgtgatcttcatctacttcgccgccctgagccccgccatcaccttcggcggcctgctgggcgagaagacccaggacctgatcggcgtgagcgagctgatcatgagcaccgccctgcagggcgtggtgttctgcctgctgggcgcccagcccctgctggtgatcggcttcagcggccccctgctggtgttcgaggaggccttcttcagcttctgcagcagcaaccacctggagtacctggtgggcagagtgtggatcggcttctggctggtgttcctggccctgctgatggtggccctggagggcagcttcctggtgagattcgtgagcagattcacccaggagatcttcgccttcctgatcagcctgatcttcatctacgagaccttctacaagctggtgaagatcttccaggagcaccccctgcacggctgcagcgccagcaacagcagcgaggtggacggcggcgagaacatgacctgggccggcgccagacccaccctgggccccggcaacagaagcctggccggccagagcggccagggcaagcccagaggccagcccaacaccgccctgctgagcctggtgctgatggccggcaccttcttcatcgccttcttcctgagaaagttcaagaacagcagattcttccccggcagaatcagaagagtgatcggcgacttcggcgtgcccatcgccatcctgatcatggtgctggtggactacagcatcgaggacacctacacccagaagctgagcgtgcccagcggcttcagcgtgaccgcccccgagaagagaggctgggtgatcaaccccctgggcgagaagagccccttccccgtgtggatgatggtggccagcctgctgcccgccatcctggtgttcatcctgatcttcatggagacccagatcaccaccctgatcatcagcaagaaggagagaatgctgcagaagggcagcggcttccacctggacctgctgctgatcgtggccatgggcggcatctgcgccctgttcggcctgccctggctggccgccgccaccgtgagaagcgtgacccacgccaacgccctgaccgtgatgagcaaggccgtggcccccggcgacaagcccaagatccaggaggtgaaggagcagagagtgaccggcctgctggtggccctgctggtgggcctgagcatcgtgatcggcgacctgctgagacagatccccctggccgtgctgttcggcatcttcctgtacatgggcgtgaccagcctgaacggcatccagttctacgagagactgcacctgctgctgatgccccccaagcaccaccccgacgtgacctacgtgaagaaggtgagaaccctgagaatgcacctgttcaccgccctgcagctgctgtgcctggccctgctgtgggccgtgatgagcaccgccgccagcctggccttccccttcatcctgatcctgaccgtgcccctgagaatggtggtgctgaccagaatcttcaccgacagagagatgaagtgcctggacgccaacgaggccgagcccgtgttcgacgagagagagggcgtggacgagtacaacgagatgcccatgcccgtgtag

SEQ ID NO: 99990 - DNA, 2406 bp, synthetic construct
  misc_feature 1..2406: note = Description of Artificial Sequence: Synthetic coding sequence
  source 1..2406: mol_type = other DNA
gtgatggaggtggtggaggccgagaagatcgtgctgctgaccagcgccagattcctgttcctgctgctgggccccgccggcaaggccccccagtaccacgagatcggcagaagcatcgccaccctgatgaccgacgagatcttccacgacgtggcctacaaggccaaggacagaaacgacctgctgagcggcatcgacgagttcctggaccaggtgaccgtgctgccccccggcgagtgggaccccagcatcagaatcgagccccccaagagcgtgcccagccaggagaagagaaagatccccgtgttccacaacggcagcacccccaccctgggcgagacccccaaggaggccgcccaccacgccggccccgagctgcagagaaccggcagactgttcggcggcctgatcctggacatcaagagaaaggcccccttcttcctgagcgacttcaaggacgccctgagcctgcagtgcctggccagcatcctgttcctgtactgcgcctgcatgagccccgtgatcaccttcggcggcctgctgggcgaggccaccgagggcagaatcagcgccatcgagagcctgttcggcgccagcctgaccggcatcgcctacagcctgttcgccggccagcccctgaccatcctgggcagcaccggccccgtgctggtgttcgagaagatcctgtacaagttctgcagagactaccagctgagctacctgagcctgagaaccagcatcggcctgtggaccagcttcctgtgcatcgtgctggtggccaccgacgccagcagcctggtgtgctacatcaccagattcaccgaggaggccttcgccgccctgatctgcatcatcttcatctacgaggccctggagaagctgttcgacctgggcgagacctacgccttcaacatgcacaacaacctggacaagctgaccagctacagctgcgtgtgcaccgagccccccaaccccagcaacgagaccctggcccagtggaagaaggacaacatcaccgcccacaacatcagctggagaaacctgaccgtgagcgagtgcaagaagctgagaggcgtgttcctgggcagcgcctgcggccaccacggcccctacatccccgacgtgctgttctggtgcgtgatcctgttcttcaccaccttcttcctgagcagcttcctgaagcagttcaagaccaagagatacttccccaccaaggtgagaagcaccatcagcgacttcgccgtgttcctgaccatcgtgatcatggtgaccatcgactacctggtgggcgtgcccagccccaagctgcacgtgcccgagaagttcgagcccacccaccccgagagaggctggatcatcagccccctgggcgacaacccctggtggaccctgctgatcgccgccatccccgccctgctgtgcaccatcctgatcttcatggaccagcagatcaccgccgtgatcatcaacagaaaggagcacaagctgaagaagggcgccggctaccacctggacctgctgatggtgggcgtgatgctgggcgtgtgcagcgtgatgggcctgccctggttcgtggccgccaccgtgctgagcatcagccacgtgaacagcctgaaggtggagagcgagtgcagcgcccccggcgagcagcccaagttcctgggcatcagagagcagagagtgaccggcctgatgatcttcatcctgatgggcctgagcgtgttcatgaccagcgtgctgaagttcatccccatgcccgtgctgtacggcgtgttcctgtacatgggcgtgagcagcctgaagggcatccagctgttcgacagaatcaagctgttcggcatgcccgccaagcaccagcccgacctgatctacctgagatacgtgcccctgtggaaggtgcacatcttcaccgtgatccagctgacctgcctggtgctgctgtgggtgatcaaggtgagcgccgccgccgtggtgttccccatgatggtgctggccctggtgttcgtgagaaagctgatggacctgtgcttcaccaagagagagctgagctggctggacgacctgatgcccgagagcaagaagaagaaggaggacgacaagaagaagaaggagaaggaggaggccgagagaatgctgcaggacgacgacgacaccgtgcacctgcccttcgagggcggcagcctgctgcagatccccgtgaaggccctgaagtacagcgtggaccccagcatcgtgaacatcagcgacgagatggccaagaccgcccagtggaaggccctgagcatgaacaccgagaacgccaaggtgaccagaagcaacatgagccccgacaagcccgtgagcgtgaagatcagcttcgaggacgagcccagaaagaagtacgtggacgccgagaccagcctgtag

SEQ ID NO: 99991 - DNA, 2244 bp, synthetic construct
  misc_feature 1..2244: note = Description of Artificial Sequence: Synthetic coding sequence
  source 1..2244: mol_type = other DNA
atgcccctgggcagacagagccacagacaccacagaacccacggccagaagcacagaagaagaggcagaggcaagggcgccagccagggcgaggagggcctggaggccctggcccacgacacccccagccagagagtgcagttcatcctgggcaccgaggaggacgaggagcacgtgccccacgagctgttcaccgagctggacgagatctgcatgaaggagggcgaggacgccgagtggaaggagaccgccagatggctgaagttcgaggaggacgtggaggacggcggcgagagatggagcaagccctacgtggccaccctgagcctgcacagcctgttcgagctgagaagctgcctgatcaacggcaccgtgctgctggacatgcacgccaacagcatcgaggagatcagcgacctgatcctggaccagcaggagctgagcagcgacctgaacgacagcatgagagtgaaggtgagagaggccctgctgaagaagcaccaccaccagaacgagaagaagagaaacaacctgatccccatcgtgagaagcttcgccgaggtgggcaagaagcagagcgacccccacctgatggacaagcacggccagaccgtgagcccccagagcgtgcccaccaccaacctggaggtgaagaacggcgtgaactgcgagcacagccccgtggacctgagcaaggtggacctgcacttcatgaagaagatccccaccggcgccgaggccagcaacgtgctggtgggcgaggtggacatcctggacagacccatcgtggccttcgtgagactgagccccgccgtgctgctgagcggcctgaccgaggtgcccatccccaccagattcctgttcatcctgctgggccccgtgggcaagggccagcagtaccacgagatcggcagaagcatggccaccatcatgaccgacgagatcttccacgacgtggcctacaaggccaaggagagagacgacctgctggccggcatcgacgagttcctggaccaggtgaccgtgctgccccccggcgagtgggaccccagcatcagaatcgagccccccaagaacgtgcccagccaggagaagagaaagatgcccggcgtgcccaacggcaacgtgtgccacatcgagcaggagccccacggcggccacagcggccccgagctgcagagaaccggcagactgttcggcggcctggtgctggacatcaagagaaaggccccctggtactggagcgactacagagacgccctgagcctgcagtgcctggccagcttcctgttcctgtactgcgcctgcatgagccccgtgatcaccttcggcggcctgctgggcgaggccaccgagggcagaatcagcgccatcgagagcctgttcggcgccagcatgaccggcatcgcctacagcctgttcgccggccaggccctgaccatcctgggcagcaccggccccgtgctggtgttcgagaagatcctgttcaagttctgcaaggactacgccctgagctacctgagcctgagagcctgcatcggcctgtggaccgccttcctgtgcatcgtgctggtggccaccgacgccagcagcctggtgtgctacatcaccagattcaccgaggaggccttcgccagcctgatctgcatcatcttcatctacgaggccatcgagaagctgatccacctggccgagacctaccccatccacatgcacagccagctggaccacctgagcctgtactactgcagatgcaccctgcccgagaaccccaacaaccacaccctgcagtactggaaggaccacaacatcgtgaccgccgaggtgcactgggccaacctgaccgtgagcgagtgccaggagatgcacggcgagttcatgggcagcgcctgcggccaccacggcccctacacccccgacgtgctgttctggagctgcatcctgttcttcaccaccttcatcctgagcagcaccctgaagaccttcaagaccagcagatacttccccaccagaatggagagctgcagcgtggcctggctggagtgcggcggcgtgatcctggcccactgcaacctgagactgctgcccagcagctgggactacagacacgcccccccccagcccgccaacttctgcatcttcagcagagacggcgtgagcccctgctggcccggctggagccagagcctggacctggtgatctgcctgcccagaccccccaagatgctgggcctgcaggcctag

SEQ ID NO: 99992 - DNA, 3135 bp, synthetic construct
  misc_feature 1..3135: note = Description of Artificial Sequence: Synthetic coding sequence
  source 1..3135: mol_type = other DNA
atgcccgccgccggcagcaacgagcccgacggcgtgctgagctaccagagacccgacgaggaggccgtggtggaccagggcggcaccagcaccatcctgaacatccactacgagaaggaggagctggagggccacagaaccctgtacgtgggcgtgagaatgcccctgggcagacagagccacagacaccacagaacccacggccagaagcacagaagaagaggcagaggcaagggcgccagccagggcgaggagggcctggaggccctggcccacgacacccccagccagagagtgcagttcatcctgggcaccgaggaggacgaggagcacgtgccccacgagctgttcaccgagctggacgagatctgcatgaaggagggcgaggacgccgagtggaaggagaccgccagatggctgaagttcgaggaggacgtggaggacggcggcgagagatggagcaagccctacgtggccaccctgagcctgcacagcctgttcgagctgagaagctgcctgatcaacggcaccgtgctgctggacatgcacgccaacagcatcgaggagatcagcgacctgatcctggaccagcaggagctgagcagcgacctgaacgacagcatgagagtgaaggtgagagaggccctgctgaagaagcaccaccaccagaacgagaagaagagaaacaacctgatccccatcgtgagaagcttcgccgaggtgggcaagaagcagagcgacccccacctgatggacaagcacggccagaccgtgagcccccagagcgtgcccaccaccaacctggaggtgaagaacggcgtgaactgcgagcacagccccgtggacctgagcaaggtggacctgcacttcatgaagaagatccccaccggcgccgaggccagcaacgtgctggtgggcgaggtggacatcctggacagacccatcgtggccttcgtgagactgagccccgccgtgctgctgagcggcctgaccgaggtgcccatccccaccagattcctgttcatcctgctgggccccgtgggcaagggccagcagtaccacgagatcggcagaagcatggccaccatcatgaccgacgagatcttccacgacgtggcctacaaggccaaggagagagacgacctgctggccggcatcgacgagttcctggaccaggtgaccgtgctgccccccggcgagtgggaccccagcatcagaatcgagccccccaagaacgtgcccagccaggagaagagaaagatgcccggcgtgcccaacggcaacgtgtgccacatcgagcaggagccccacggcggccacagcggccccgagctgcagagaaccggcagactgttcggcggcctggtgctggacatcaagagaaaggccccctggtactggagcgactacagagacgccctgagcctgcagtgcctggccagcttcctgttcctgtactgcgcctgcatgagccccgtgatcaccttcggcggcctgctgggcgaggccaccgagggcagaatcagcgccatcgagagcctgttcggcgccagcatgaccggcatcgcctacagcctgttcgccggccaggccctgaccatcctgggcagcaccggccccgtgctggtgttcgagaagatcctgttcaagttctgcaaggactacgccctgagctacctgagcctgagagcctgcatcggcctgtggaccgccttcctgtgcatcgtgctggtggccaccgacgccagcagcctggtgtgctacatcaccagattcaccgaggaggccttcgccagcctgatctgcatcatcttcatctacgaggccatcgagaagctgatccacctggccgagacctaccccatccacatgcacagccagctggaccacctgagcctgtactactgcagatgcaccctgcccgagaaccccaacaaccacaccctgcagtactggaaggaccacaacatcgtgaccgccgaggtgcactgggccaacctgaccgtgagcgagtgccaggagatgcacggcgagttcatgggcagcgcctgcggccaccacggcccctacacccccgacgtgctgttctggagctgcatcctgttcttcaccaccttcatcctgagcagcaccctgaagaccttcaagaccagcagatacttccccaccagagtgagaagcatggtgagcgacttcgccgtgttcctgaccatcttcaccatggtgatcatcgacttcctgatcggcgtgcccagccccaagctgcaggtgcccagcgtgttcaagcccaccagagacgacagaggctggatcatcaaccccatcggccccaacccctggtggaccgtgatcgccgccatcatccccgccctgctgtgcaccatcctgatcttcatggaccagcagatcaccgccgtgatcatcaacagaaaggagcacaagctgaagaagggctgcggctaccacctggacctgctgatggtggccatcatgctgggcgtgtgcagcatcatgggcctgccctggttcgtggccgccaccgtgctgagcatcacccacgtgaacagcctgaagctggagagcgagtgcagcgcccccggcgagcagcccaagttcctgggcatcagagagcagagagtgaccggcctgatgatcttcgtgctgatgggctgcagcgtgttcatgaccgccatcctgaagttcatccccatgcccgtgctgtacggcgtgttcctgtacatgggcgtgagcagcctgcagggcatccagttcttcgacagactgaagctgttcggcatgcccgccaagcaccagcccgacttcatctacctgagacacgtgcccctgagaaaggtgcacctgttcaccctgatccagctgacctgcctggtgctgctgtgggtgatcaaggccagccccgccgccatcgtgttccccatgatggtgctggccctggtgttcgtgagaaaggtgatggacctgtgcttcagcaagagagagctgagctggctggacgacctgatgcccgagagcaagaagaagaagctggacgacgccaagaagaaggccaaggaggaggaggtgatcgtgctggcccccaccgtgtacctgggcgccagcaactacagaacctag

SEQ ID NO: 99993 - DNA, 2736 bp, synthetic construct
  misc_feature 1..2736: note = Description of Artificial Sequence: Synthetic coding sequence
  source 1..2736: mol_type = other DNA
atggaggagctgcaggacgactacgaggacatgatggaggagaacctggagcaggaggagtacgaggaccccgacatccccgagagccagatggaggagcccgccgcccacgacaccgaggccaccgccaccgactaccacaccaccagccaccccggcacccacaaggtgtacgtggagctgcaggagctggtgatggacgagaagaaccaggagctgagatggatggaggccgccagatgggtgcagctggaggagaacctgggcgagaacggcgcctggggcagaccccacctgagccacctgaccttctggagcctgctggagctgagaagagtgttcaccaagggcaccgtgctgctggacctgcaggagaccagcctggccggcgtggccaaccagctgctggacagattcatcttcgaggaccagatcagaccccaggacagagaggagctgctgagagccctgctgctgaagcacagccacgccggcgagctggaggccctgggcggcgtgaagcccgccgtgctgaccagaagcggcgaccccagccagcccctgctgccccagcacagcagcctggagacccagctgttctgcgagcagggcgacggcggcaccgagggccacagccccagcggcatcctggagaagatcccccccgacagcgaggccaccctggtgctggtgggcagagccgacttcctggagcagcccgtgctgggcttcgtgagactgcaggaggccgccgagctggaggccgtggagctgcccgtgcccatcagattcctgttcgtgctgctgggccccgaggccccccacatcgactacacccagctgggcagagccgccgccaccctgatgagcgagagagtgttcagaatcgacgcctacatggcccagagcagaggcgagctgctgcacagcctggagggcttcctggactgcagcctggtgctgccccccaccgacgcccccagcgagcaggccctgctgagcctggtgcccgtgcagagagagctgctgagaagaagataccagagcagccccgccaagcccgacagcagcttctacaagggcctggacctgaacggcggccccgacgaccccctgcagcagaccggccagctgttcggcggcctggtgagagacatcagaagaagatacccctactacctgagcgacatcaccgacgccttcagcccccaggtgctggccgccgtgatcttcatctacttcgccgccctgagccccgccatcaccttcggcggcctgctgggcgagaagaccagaaaccagatgggcgtgagcgagctgctgatcagcaccgccgtgcagggcatcctgttcgccctgctgggcgcccagcccctgctggtggtgggcttcagcggccccctgctggtgttcgaggaggccttcttcagcttctgcgagaccaacggcctggagtacatcgtgggcagagtgtggatcggcttctggctgatcctgctggtggtgctggtggtggccttcgagggcagcttcctggtgagattcatcagcagatacacccaggagatcttcagcttcctgatcagcctgatcttcatctacgagaccttcagcaagctgatcaagatcttccaggaccaccccctgcagaagacctacaactacaacgtgctgatggtgcccaagccccagggccccctgcccaacaccgccctgctgagcctggtgctgatggccggcaccttcttcttcgccatgatgctgagaaagttcaagaacagcagctacttccccggcaagctgagaagagtgatcggcgacttcggcgtgcccatcagcatcctgatcatggtgctggtggacttcttcatccaggacacctacacccagaagctgagcgtgcccgacggcttcaaggtgagcaacagcagcgccagaggctgggtgatccaccccctgggcctgagaagcgagttccccatctggatgatgttcgccagcgccctgcccgccctgctggtgttcatcctgatcttcctggagagccagatcaccaccctgatcgtgagcaagcccgagagaaagatggtgaagggcagcggcttccacctggacctgctgctggtggtgggcatgggcggcgtggccgccctgttcggcatgccctggctgagcgccaccaccgtgagaagcgtgacccacgccaacgccctgaccgtgatgggcaaggccagcacccccggcgccgccgcccagatccaggaggtgaaggagcagagaatcagcggcctgctggtggccgtgctggtgggcctgagcatcctgatggagcccatcctgagcagaatccccctggccgtgctgttcggcatcttcctgtacatgggcgtgaccagcctgagcggcatccagctgttcgacagaatcctgctgctgttcaagccccccaagtaccaccccgacgtgccctacgtgaagagagtgaagacctggagaatgcacctgttcaccggcatccagatcatctgcctggccgtgctgtgggtggtgaagagcacccccgccagcctggccctgcccttcgtgctgatcctgaccgtgcccctgagaagagtgctgctgcccctgatcttcagaaacgtggagctgcagtgcctggacgccgacgacgccaaggccaccttcgacgaggaggagggcagagacgagtacgacgaggtggccatgcccgtgtag

SEQ ID NO: 99994 - DNA, 3480 bp, synthetic construct
  misc_feature 1..3480: note = Description of Artificial Sequence: Synthetic coding sequence
  source 1..3480: mol_type = other DNA
atgagcagcgcccccagaagacccgccaagggcgccgacagcttctgcacccccggccccggcagaaagcccagaagaagacccggcgccagccccaccggcgagacccccaccatcgaggagggcgaggaggacgaggacgaggccagcgaggccgagggcgccagagccctgacccagcccagccccgtgagcacccccagcagcgtgcagttcttcctgcaggaggacgacagcgccgacagaaaggccgagagaaccagccccagcagccccgcccccctgccccaccaggaggccacccccagagccagcaagggcgcccaggccggcacccaggtggaggaggccgaggccgaggccgtggccgtggccagcggcaccgccggcggcgacgacggcggcgccagcggcagacccctgcccaaggcccagcccggccacagaagctacaacctgcaggagagaagaagaatcggcagcatgaccggcgccgagcaggccctgctgcccagagtgcccaccgacgagatcgaggcccagaccctggccaccgccgacctggacctgatgaagagccacagattcgaggacgtgcccggcgtgagaagacacctggtgagaaagaacgccaagggcagcacccagagcggcagagagggcagagagcccggccccacccccagagccagacccagagccccccacaagccccacgaggtgttcgtggagctgaacgagctgctgctggacaagaaccaggagccccagtggagagagaccgccagatggatcaagttcgaggaggacgtggaggaggagaccgagagatggggcaagccccacgtggccagcctgagcttcagaagcctgctggagctgagaagaaccctggcccacggcgccgtgctgctggacctggaccagcagaccctgcccggcgtggcccaccaggtggtggagcagatggtgatcagcgaccagatcaaggccgaggacagagccaacgtgctgagagccctgctgctgaagcacagccaccccagcgacgagaaggacttcagcttccccagaaacatcagcgccggcagcctgggcagcctgctgggccaccaccacggccagggcgccgagagcgacccccacgtgaccgagcccctgatgggcggcgtgcccgagaccagactggaggtggagagagagagagagctgcccccccccgccccccccgccggcatcaccagaagcaagagcaagcacgagctgaagctgctggagaagatccccgagaacgccgaggccaccgtggtgctggtgggctgcgtggagttcctgagcagacccaccatggccttcgtgagactgagagaggccgtggagctggacgccgtgctggaggtgcccgtgcccgtgagattcctgttcctgctgctgggccccagcagcgccaacatggactaccacgagatcggcagaagcatcagcaccctgatgagcgacaagcagttccacgaggccgcctacctggccgacgagagagaggacctgctgaccgccatcaacgccttcctggactgcagcgtggtgctgccccccagcgaggtgcagggcgaggagctgctgagaagcgtggcccacttccagagacagatgctgaagaagagagaggagcagggcagactgctgcccaccggcgccggcctggagcccaagagcgcccaggacaaggccctgctgcagatggtggaggccgccggcgccgccgaggacgaccccctgagaagaaccggcagacccttcggcggcctgatcagagacgtgagaagaagatacccccactacctgagcgacttcagagacgccctggacccccagtgcctggccgccgtgatcttcatctacttcgccgccctgagccccgccatcaccttcggcggcctgctgggcgagaagacccaggacctgatcggcgtgagcgagctgatcatgagcaccgccctgcagggcgtggtgttctgcctgctgggcgcccagcccctgctggtgatcggcttcagcggccccctgctggtgttcgaggaggccttcttcagcttctgcagcagcaaccacctggagtacctggtgggcagagtgtggatcggcttctggctggtgttcctggccctgctgatggtggccctggagggcagcttcctggtgagattcgtgagcagattcacccaggagatcttcgccttcctgatcagcctgatcttcatctacgagaccttctacaagctggtgaagatcttccaggagcaccccctgcacggctgcagcgccagcaacagcagcgaggtggacggcggcgagaacatgacctgggccggcgccagacccaccctgggccccggcaacagaagcctggccggccagagcggccagggcaagcccagaggccagcccaacaccgccctgctgagcctggtgctgatggccggcaccttcttcatcgccttcttcctgagaaagttcaagaacagcagattcttccccggcagaatcagaagagtgatcggcgacttcggcgtgcccatcgccatcctgatcatggtgctggtggactacagcatcgaggacacctacacccagaagctgagcgtgcccagcggcttcagcgtgaccgcccccgagaagagaggctgggtgatcaaccccctgggcgagaagagccccttccccgtgtggatgatggtggccagcctgctgcccgccatcctggtgttcatcctgatcttcatggagacccagatcaccaccctgatcatcagcaagaaggagagaatgctgcagaagggcagcggcttccacctggacctgctgctgatcgtggccatgggcggcatctgcgccctgttcggcctgccctggctggccgccgccaccgtgagaagcgtgacccacgccaacgccctgaccgtgatgagcaaggccgtggcccccggcgacaagcccaagatccaggaggtgaaggagcagagagtgaccggcctgctggtggccctgctggtgggcctgagcatcgtgatcggcgacctgctgagacagatccccctggccgtgctgttcggcatcttcctgtacatgggcgtgaccagcctgaacggcatccagttctacgagagactgcacctgctgctgatgccccccaagcaccaccccgacgtgacctacgtgaagaaggtgagaaccctgagaatgcacctgttcaccgccctgcagctgctgtgcctggccctgctgtgggccgtgatgagcaccgccgccagcctggccttccccttcatcctgatcctgaccgtgcccctgagaatggtggtgctgaccagaatcttcaccgacagagagatgaagtgcctggacgccaacgaggccgagcccgtgttcgacgagagagagggcgtggacgagtacaacgagatgcccatgcccgtgtag

SEQ ID NO: 99995 - DNA, 3726 bp, synthetic construct
  misc_feature 1..3726: note = Description of Artificial Sequence: Synthetic coding sequence
  source 1..3726: mol_type = other DNA
atgagcagcgcccccagaagacccgccaagggcgccgacagcttctgcacccccgagcccgagagcctgggccccggcacccccggcttccccgagcaggaggaggacgagctgcacagaaccctgggcgtggagagattcgaggagatcctgcaggaggccggcagcagaggcggcgaggagcccggcagaagctacggcgaggaggacttcgagtaccacagacagagcagccaccacatccaccaccccctgagcacccacctgccccccgacgccagaagaagaaagaccccccagggccccggcagaaagcccagaagaagacccggcgccagccccaccggcgagacccccaccatcgaggagggcgaggaggacgaggacgaggccagcgaggccgagggcgccagagccctgacccagcccagccccgtgagcacccccagcagcgtgcagttcttcctgcaggaggacgacagcgccgacagaaaggccgagagaaccagccccagcagccccgcccccctgccccaccaggaggccacccccagagccagcaagggcgcccaggccggcacccaggtggaggaggccgaggccgaggccgtggccgtggccagcggcaccgccggcggcgacgacggcggcgccagcggcagacccctgcccaaggcccagcccggccacagaagctacaacctgcaggagagaagaagaatcggcagcatgaccggcgccgagcaggccctgctgcccagagtgcccaccgacgagatcgaggcccagaccctggccaccgccgacctggacctgatgaagagccacagattcgaggacgtgcccggcgtgagaagacacctggtgagaaagaacgccaagggcagcacccagagcggcagagagggcagagagcccggccccacccccagagccagacccagagccccccacaagccccacgaggtgttcgtggagctgaacgagctgctgctggacaagaaccaggagccccagtggagagagaccgccagatggatcaagttcgaggaggacgtggaggaggagaccgagagatggggcaagccccacgtggccagcctgagcttcagaagcctgctggagctgagaagaaccctggcccacggcgccgtgctgctggacctggaccagcagaccctgcccggcgtggcccaccaggtggtggagcagatggtgatcagcgaccagatcaaggccgaggacagagccaacgtgctgagagccctgctgctgaagcacagccaccccagcgacgagaaggacttcagcttccccagaaacatcagcgccggcagcctgggcagcctgctgggccaccaccacggccagggcgccgagagcgacccccacgtgaccgagcccctgatgggcggcgtgcccgagaccagactggaggtggagagagagagagagctgcccccccccgccccccccgccggcatcaccagaagcaagagcaagcacgagctgaagctgctggagaagatccccgagaacgccgaggccaccgtggtgctggtgggctgcgtggagttcctgagcagacccaccatggccttcgtgagactgagagaggccgtggagctggacgccgtgctggaggtgcccgtgcccgtgagattcctgttcctgctgctgggccccagcagcgccaacatggactaccacgagatcggcagaagcatcagcaccctgatgagcgacaagcagttccacgaggccgcctacctggccgacgagagagaggacctgctgaccgccatcaacgccttcctggactgcagcgtggtgctgccccccagcgaggtgcagggcgaggagctgctgagaagcgtggcccacttccagagacagatgctgaagaagagagaggagcagggcagactgctgcccaccggcgccggcctggagcccaagagcgcccaggacaaggccctgctgcagatggtggaggccgccggcgccgccgaggacgaccccctgagaagaaccggcagacccttcggcggcctgatcagagacgtgagaagaagatacccccactacctgagcgacttcagagacgccctggacccccagtgcctggccgccgtgatcttcatctacttcgccgccctgagccccgccatcaccttcggcggcctgctgggcgagaagacccaggacctgatcggcgtgagcgagctgatcatgagcaccgccctgcagggcgtggtgttctgcctgctgggcgcccagcccctgctggtgatcggcttcagcggccccctgctggtgttcgaggaggccttcttcagcttctgcagcagcaaccacctggagtacctggtgggcagagtgtggatcggcttctggctggtgttcctggccctgctgatggtggccctggagggcagcttcctggtgagattcgtgagcagattcacccaggagatcttcgccttcctgatcagcctgatcttcatctacgagaccttctacaagctggtgaagatcttccaggagcaccccctgcacggctgcagcgccagcaacagcagcgaggtggacggcggcgagaacatgacctgggccggcgccagacccaccctgggccccggcaacagaagcctggccggccagagcggccagggcaagcccagaggccagcccaacaccgccctgctgagcctggtgctgatggccggcaccttcttcatcgccttcttcctgagaaagttcaagaacagcagattcttccccggcagaatcagaagagtgatcggcgacttcggcgtgcccatcgccatcctgatcatggtgctggtggactacagcatcgaggacacctacacccagaagctgagcgtgcccagcggcttcagcgtgaccgcccccgagaagagaggctgggtgatcaaccccctgggcgagaagagccccttccccgtgtggatgatggtggccagcctgctgcccgccatcctggtgttcatcctgatcttcatggagacccagatcaccaccctgatcatcagcaagaaggagagaatgctgcagaagggcagcggcttccacctggacctgctgctgatcgtggccatgggcggcatctgcgccctgttcggcctgccctggctggccgccgccaccgtgagaagcgtgacccacgccaacgccctgaccgtgatgagcaaggccgtggcccccggcgacaagcccaagatccaggaggtgaaggagcagagagtgaccggcctgctggtggccctgctggtgggcctgagcatcgtgatcggcgacctgctgagacagatccccctggccgtgctgttcggcatcttcctgtacatgggcgtgaccagcctgaacggcatccagttctacgagagactgcacctgctgctgatgccccccaagcaccaccccgacgtgacctacgtgaagaaggtgagaaccctgagaatgcacctgttcaccgccctgcagctgctgtgcctggccctgctgtgggccgtgatgagcaccgccgccagcctggccttccccttcatcctgatcctgaccgtgcccctgagaatggtggtgctgaccagaatcttcaccgacagagagatgaagtgcctggacgccaacgaggccgagcccgtgttcgacgagagagagggcgtggacgagtacaacgagatgcccatgcccgtgtag

SEQ ID NO: 99996 - DNA, 456 bp, synthetic construct
  misc_feature 1..456: note = Description of Artificial Sequence: Synthetic coding sequence
  source 1..456: mol_type = other DNA
atgagcagcgcccccagaagacccgccaagggcgccgacagcttctgcacccccgagcccgagagcctgggccccggcacccccggcttccccgagcaggaggaggacgagctgcacagaaccctgggcgtggagagattcgaggagatcctgcaggaggccggcagcagaggcggcgaggagcccggcagaagctacggcgaggaggacttcgagtaccacagacagagcagccaccacatccaccaccccctgagcacccacctgccccccgacgccagaagaagaaagaccccccagggccccggcagaaagcccagaagaagacccggcgccagccccaccggcgagacccccaccatcgaggagggcgaggaggacgaggacgaggccagcgaggccgagggcgccagagccctgacccagcccagccccgtgagcacccccagcagctag

SEQ ID NO: 99997 - DNA, 384 bp, synthetic construct
  misc_feature 1..384: note = Description of Artificial Sequence: Synthetic coding sequence
  source 1..384: mol_type = other DNA
atgagcagcgcccccagaagacccgccaagggcgccgacagcttctgcacccccgagcccgagagcctgggccccggcacccccggcttccccgagcaggaggaggacgagctgcacagaaccctgggcgtggagagattcgaggagatcctgcaggaggccggcagcagaggcggcgaggagcccggcagaagctacggcgaggaggacttcgagtaccacagacagagcagccaccacatccaccaccccctgagcacccacctgccccccgacgccagaagaagaaagaccccccagggccccggcagaaagcccagaagaagacccggcgccagccccaccggcgagacccccaccatcgaggagggcgaggaggactag

SEQ ID NO: 99998 - DNA, 438 bp, synthetic construct
  misc_feature 1..438: note = Description of Artificial Sequence: Synthetic coding sequence
  source 1..438: mol_type = other DNA
atgagcagcgcccccagaagacccgccaagggcgccgacagcttctgcacccccgagcccgagagcctgggccccggcacccccggcttccccgagcaggaggaggacgagctgcacagaaccctgggcgtggagagattcgaggagatcctgcaggaggccggcagcagaggcggcgaggagcccggcagaagctacggcgaggaggacttcgagtaccacagacagagcagccaccacatccaccaccccctgagcacccacctgccccccgacgccagaagaagaaagaccccccagggccccggcagaaagcccagaagaagacccggcgccagccccaccggcgagacccccaccatcgaggagggcgaggaggacgaggacgaggccagcgaggccgagggcgccagagccctgacccagcccagcccctag

SEQ ID NO: 99999 - DNA, 3726 bp, synthetic construct; identical to SEQ ID NO: 99995
  misc_feature 1..3726: note = Description of Artificial Sequence: Synthetic coding sequence
  source 1..3726: mol_type = other DNA

SEQ ID NO: 100000 - DNA, 213 bp, synthetic construct
  misc_feature 1..213: note = Description of Artificial Sequence: Synthetic coding sequence
  source 1..213: mol_type = other DNA
atgagcagcgcccccagaagacccgccaagggcgccgacagcttctgcacccccgagcccgagagcctgggccccggcacccccggcttccccgagcaggaggaggacgagctgcacagaaccctgggcgtggagagattcgaggagatcctgcaggaggccggcagcagaggcggcgaggagcccggcagaagctacggcgaggaggactag

SEQ ID NO: 100001 - DNA, 510 bp, synthetic construct
  misc_feature 1..510: note = Description of Artificial Sequence: Synthetic coding sequence
  source 1..510: mol_type = other DNA
atgagcagcgcccccagaagacccgccaagggcgccgacagcttctgcacccccgagcccgagagcctgggccccggcacccccggcttccccgagcaggaggaggacgagctgcacagaaccctgggcgtggagagattcgaggagatcctgcaggaggccggcagcagaggcggcgaggagcccggcagaagctacggcgaggaggacttcgagtaccacagacagagcagccaccacatccaccaccccctgagcacccacctgccccccgacgccagaagaagaaagaccccccagggccccggcagaaagcccagaagaagacccggcgccagccccaccggcgagacccccaccatcgaggagggcgaggaggacgaggacgaggccagcgaggccgagggcgccagagccctgacccagcccagccccgtgagcacccccagcagcgtgcagttcttcctgcaggaggacgacagcgccgacagaaaggccgagagaacctag

SEQ ID NO: 100002 - DNA, 3240 bp, synthetic construct
  misc_feature 1..3240: note = Description of Artificial Sequence: Synthetic coding sequence
  source 1..3240: mol_type = other DNA
atggaggacgaggccgtgctggacagaggcgccagcttcctgaagcacgtgtgcgacgaggaggaggtggagggccaccacaccatctacatcggcgtgcacgtgcccaagagctacagaagaagaagaagacacaagagaaagaccggccacaaggagaagaaggagaaggagagaatcagcgagaactacagcgacaagagcgacatcgagaacgccgacgagagcagcagcagcatcctgaagcccctgatcagccccgccgccgagagaatcagattcatcctgggcgaggaggacgacagccccgcccccccccagctgttcaccgagctggacgagctgctggccgtggacggccaggagatggagtggaaggagaccgccagatggatcaagttcgaggagaaggtggagcagggcggcgagagatggagcaagccccacgtggccaccctgagcctgcacagcctgttcgagctgagaacctgcatggagaagggcagcatcatgctggacagagaggccagcagcctgccccagctggtggagatgatcgtggaccaccagatcgagaccggcctgctgaagcccgagctgaaggacaaggtgacctacaccctgctgagaaagcacagacaccagaccaagaagagcaacctgagaagcctggccgacatcggcaagaccgtgagcagcgccagcagaatgttcaccaaccccgacaacggcagccccgccatgacccacagaaacctgaccagcagcagcctgaacgacatcagcgacaagcccgagaaggaccagctgaagaacaagttcatgaagaagctgcccagagacgccgaggccagcaacgtgctggtgggcgaggtggacttcctggacacccccttcatcgccttcgtgagactgcagcaggccgtgatgctgggcgccctgaccgaggtgcccgtgcccaccagattcctgttcatcctgctgggccccaagggcaaggccaagagctaccacgagatcggcagagccatcgccaccctgatgagcgacgaggtgttccacgacatcgcctacaaggccaaggacagacacgacctgatcgccggcatcgacgagttcctggacgaggtgatcgtgctgccccccggcgagtgggaccccgccatcagaatcgagccccccaagagcctgcccagcagcgacaagagaaagaacatgtacagcggcggcgagaacgtgcagatgaacggcgacaccccccacgacggcggccacggcggcggcggccacggcgactgcgaggagctgcagagaaccggcagattctgcggcggcctgatcaaggacatcaagagaaaggcccccttcttcgccagcgacttctacgacgccctgaacatccaggccctgagcgccatcctgttcatctacctggccaccgtgaccaacgccatcaccttcggcggcctgctgggcgacgccaccgacaacatgcagggcgtgctggagagcttcctgggcaccgccgtgagcggcgccatcttctgcctgttcgccggccagcccctgaccatcctgagcagcaccggccccgtgctggtgttcgagagactgctgttcaacttcagcaaggacaacaacttcgactacctggagttcagactgtggatcggcctgtggagcgccttcctgtgcctgatcctggtggccaccgacgccagcttcctggtgcagtacttcaccagattcaccgaggagggcttcagcagcctgatcagcttcatcttcatctacgacgccttcaagaagatgatcaagctggccgactactaccccatcaacagcaacttcaaggtgggctacaacaccctgttcagctgcacctgcgtgccccccgaccccgccaacatcagcatcagcaacgacaccaccctggcccccgagtacctgcccaccatgagcagcaccgacatgtaccacaacaccaccttcgactgggccttcctgagcaagaaggagtgcagcaagtacggcggcaacctggtgggcaacaactgcaacttcgtgcccgacatcaccctgatgagcttcatcctgttcctgggcacctacaccagcagcatggccctgaagaagttcaagaccagcccctacttccccaccaccgccagaaagctgatcagcgacttcgccatcatcctgagcatcctgatcttctgcgtgatcgacgccctggtgggcgtggacacccccaagctgatcgtgcccagcgagttcaagcccaccagccccaacagaggctggttcgtgccccccttcggcgagaacccctggtgggtgtgcctggccgccgccatccccgccctgctggtgaccatcctgatcttcatggaccagcagatcaccgccgtgatcgtgaacagaaaggagcacaagctgaagaagggcgccggctaccacctggacctgttctgggtggccatcctgatggtgatctgcagcctgatggccctgccctggtacgtggccgccaccgtgatcagcatcgcccacatcgacagcctgaagatggagaccgagaccagcgcccccggcgagcagcccaagttcctgggcgtgagagagcagagagtgaccggcaccctggtgttcatcctgaccggcctgagcgtgttcatggcccccatcctgaagttcatccccatgcccgtgctgtacggcgtgttcctgtacatgggcgtggccagcctgaacggcgtgcagttcatggacagactgaagctgctgctgatgcccctgaagcaccagcccgacttcatctacctgagacacgtgcccctgagaagagtgcacctgttcaccttcctgcaggtgctgtgcctggccctgctgtggatcctgaagagcaccgtggccgccatcatcttccccgtgatgatcctggccctggtggccgtgagaaagggcatggactacctgttcagccagcacgacctgagcttcctggacgacgtgatccccgagaaggacaagaagaagaaggaggacgagaagaagaagaagaagaagaagggcagcctggacagcgacaacgacgacagcgactgcccctacagcgagaaggtgcccagcatcaagatccccatggacatcatggagcagcagcccttcctgagcgacagcaagcccagcgacagagagagaagccccaccttcctggagagacacaccagctgctag

SEQ ID NO: 100003 - DNA, 3108 bp, synthetic construct
  misc_feature 1..3108: note = Description of Artificial Sequence: Synthetic coding sequence
  source 1..3108: mol_type = other DNA
atgagcaccgagaacgtggagggcaagcccagcaacctgggcgagagaggcagagccagaagcagcaccttcctgagagtggtgcagcccatgttcaaccacagcatcttcaccagcgccgtgagccccgccgccgagagaatcagattcatcctgggcgaggaggacgacagccccgcccccccccagctgttcaccgagctggacgagctgctggccgtggacggccaggagatggagtggaaggagaccgccagatggatcaagttcgaggagaaggtggagcagggcggcgagagatggagcaagccccacgtggccaccctgagcctgcacagcctgttcgagctgagaacctgcatggagaagggcagcatcatgctggacagagaggccagcagcctgccccagctggtggagatgatcgtggaccaccagatcgagaccggcctgctgaagcccgagctgaaggacaaggtgacctacaccctgctgagaaagcacagacaccagaccaagaagagcaacctgagaagcctggccgacatcggcaagaccgtgagcagcgccagcagaatgttcaccaaccccgacaacggcagccccgccatgacccacagaaacctgaccagcagcagcctgaacgacatcagcgacaagcccgagaaggaccagctgaagaacaagttcatgaagaagctgcccagagacgccgaggccagcaacgtgctggtgggcgaggtggacttcctggacacccccttcatcgccttcgtgagactgcagcaggccgtgatgctgggcgccctgaccgaggtgcccgtgcccaccagattcctgttcatcctgctgggccccaagggcaaggccaagagctaccacgagatcggcagagccatcgccaccctgatgagcgacgaggtgttccacgacatcgcctacaaggccaaggacagacacgacctgatcgccggcatcgacgagttcctggacgaggtgatcgtgctgccccccggcgagtgggaccccgccatcagaatcgagccccccaagagcctgcccagcagcgacaagagaaagaacatgtacagcggcggcgagaacgtgcagatgaacggcgacaccccccacgacggcggccacggcggcggcggccacggcgactgcgaggagctgcagagaaccggcagattctgcggcggcctgatcaaggacatcaagagaaaggcccccttcttcgccagcgacttctacgacgccctgaacatccaggccctgagcgccatcctgttcatctacctggccaccgtgaccaacgccatcaccttcggcggcctgctgggcgacgccaccgacaacatgcagggcgtgctggagagcttcctgggcaccgccgtgagcggcgccatcttctgcctgttcgccggccagcccctgaccatcctgagcagcaccggccccgtgctggtgttcgagagactgctgttcaacttcagcaaggacaacaacttcgactacctggagttcagactgtggatcggcctgtggagcgccttcctgtgcctgatcctggtggccaccgacgccagcttcctggtgcagtacttcaccagattcaccgaggagggcttcagcagcctgatcagcttcatcttcatctacgacgccttcaagaagatgatcaagctggccgactactaccccatcaacagcaacttcaaggtgggctacaacaccctgttcagctgcacctgcgtgccccccgaccccgccaacatcagcatcagcaacgacaccaccctggcccccgagtacctgcccaccatgagcagcaccgacatgtaccacaacaccaccttcgactgggccttcctgagcaagaaggagtgcagcaagtacggcggcaacctggtgggcaacaactgcaacttcgtgcccgacatcaccctgatgagcttcatcctgttcctgggcacctacaccagcagcatggccctgaagaagttcaagaccagcccctacttccccaccaccgccagaaagctgatcagcgacttcgccatcatcctgagcatcctgatcttctgcgtgatcgacgccctggtgggcgtggacacccccaagctgatcgtgcccagcgagttcaagcccaccagccccaacagaggctggttcgtgccccccttcggcgagaacccctggtgggtgtgcctggccgccgccatccccgccctgctggtgaccatcctgatcttcatggaccagcagatcaccgccgtgatcgtgaacagaaaggagcacaagctgaagaagggcgccggctaccacctggacctgttctgggtggccatcctgatggtgatctgcagcctgatggccctgccctggtacgtggccgccaccgtgatcagcatcgcccacatcgacagcctgaagatggagaccgagaccagcgcccccggcgagcagcccaagttcctgggcgtgagagagcagagagtgaccggcaccctggtgttcatcctgaccggcctgagcgtgttcatggcccccatcctgaagttcatccccatgcccgtgctgtacggcgtgttcctgtacatgggcgtggccagcctgaacggcgtgcagttcatggacagactgaagctgctgctgatgcccctgaagcaccagcccgacttcatctacctgagacacgtgcccctgagaagagtgcacctgttcaccttcctgcaggtgctgtgcctggccctgctgtggatcctgaagagcaccgtggccgccatcatcttccccgtgatgatcctggccctggtggccgtgagaaagggcatggactacctgttcagccagcacgacctgagcttcctggacgacgtgatccccgagaaggacaagaagaagaaggaggacgagaagaagaagaagaagaagaagggcagcctggacagcgacaacgacgacagcgactgcccctacagcgagaaggtgcccagcatcaagatccccatggacatcatggagcagcagcccttcctgagcgacagcaagcccagcgacagagagagaagccccaccttcctggagagacacaccagctgctag

SEQ ID NO: 100004 - DNA, 2988 bp, synthetic construct
  misc_feature 1..2988: note = Description of Artificial Sequence: Synthetic coding sequence
  source 1..2988: mol_type = other DNA
atggaggacgaggccgtgctggacagaggcgccagcttcctgaagcacgtgtgcgacgaggaggaggtggagggccaccacaccatctacatcggcgtgcacgtgcccaagagctacagaagaagaagaagacacaagagaaagaccggccacaaggagaagaaggagaaggagagaatcagcgagaactacagcgacaagagcgacatcgagaacgccgacgagagcagcagcagcatcctgaagcccctgatcagccccgccgccgagagaatcagattcatcctgggcgaggaggacgacagccccgcccccccccagctgttcaccgagctggacgagctgctggccgtggacggccaggagatggagtggaaggagaccgccagatggatcaagttcgaggagaaggtggagcagggcggcgagagatggagcaagccccacgtggccaccctgagcctgcacagcctgttcgagctgagaacctgcatggagaagggcagcatcatgctggacagagaggccagcagcctgccccagctggtggagatgatcgtggaccaccagatcgagaccggcctgctgaagcccgagctgaaggacaaggtgacctacaccctgctgagaaagcacagacaccagaccaagaagagcaacctgagaagcctggccgacatcggcaagaccgtgagcagcgccagcagaatgttcaccaaccccgacaacggcagccccgccatgacccacagaaacctgaccagcagcagcctgaacgacatcagcgacaagcccgagaaggaccagctgaagaacaagttcatgaagaagctgcccagagacgccgaggccagcaacgtgctggtgggcgaggtggacttcctggacacccccttcatcgccttcgtgagactgcagcaggccgtgatgctgggcgccctgaccgaggtgcccgtgcccaccagattcctgttcatcctgctgggccccaagggcaaggccaagagctaccacgagatcggcagagccatcgccaccctgatgagcgacgaggtgttccacgacatcgcctacaaggccaaggacagacacgacctgatcgccggcatcgacgagttcctggacgaggtgatcgtgctgccccccggcgagtgggaccccgccatcagaatcgagccccccaagagcctgcccagcagcgacaagagaaagaacatgtacagcggcggcgagaacgtgcagatgaacggcgacaccccccacgacggcggccacggcggcggcggccacggcgactgcgaggagctgcagagaaccggcagattctgcggcggcctgatcaaggacatcaagagaaaggcccccttcttcgccagcgacttctacgacgccctgaacatccaggccctgagcgccatcctgttcatctacctggccaccgtgaccaacgccatcaccttcggcggcctgctgggcgacgccaccgacaacatgcagggcgtgctggagagcttcctgggcaccgccgtgagcggcgccatcttctgcctgttcgccggccagcccctgaccatcctgagcagcaccggccccgtgctggtgttcgagagactgctgttcaacttcagcaaggacaacaacttcgactacctggagttcagactgtggatcggcctgtggagcgccttcctgtgcctgatcctggtggccaccgacgccagcttcctggtgcagtacttcaccagattcaccgaggagggcttcagcagcctgatcagcttcatcttcatctacgacgccttcaagaagatgatcaagctggccgactactaccccatcaacagcaacttcaaggtgggctacaacaccctgttcagctgcacctgcgtgccccccgaccccgccaacatcagcatcagcaacgacaccaccctggcccccgagtacctgcccaccatgagcagcaccgacatgtaccacaacaccaccttcgactgggccttcctgagcaagaaggagtgcagcaagtacggcggcaacctggtgggcaacaactgcaacttcgtgcccgacatcaccctgatgagcttcatcctgttcctgggcacctacaccagcagcatggccctgaagaagttcaagaccagcccctacttccccaccaccgccagaaagctgatcagcgacttcgccatcatcctgagcatcctgatcttctgcgtgatcgacgccctggtgggcgtggacacccccaagctgatcgtgcccagcgagttcaagcccaccagccccaacagaggctggttcgtgccccccttcggcgagaacccctggtgggtgtgcctggccgccgccatccccgccctgctggtgaccatcctgatcttcatggaccagcagatcaccgccgtgatcgtgaacagaaaggagcacaagctgaagttcatccccatgcccgtgctgtacggcgtgttcctgtacatgggcgtggccagcctgaacggcgtgcagttcatggacagactgaagctgctgctgatgcccctgaagcaccagcccgacttcatctacctgagacacgtgcccctgagaagagtgcacctgttcaccttcctgcaggtgctgtgcctggccctgctgtggatcctgaagagcaccgtggccgccatcatcttccccgtgatgatcctggccctggtggccgtgagaaagggcatggactacctgttcagccagcacgacctgagcttcctggacgacgtgatccccgagaaggacaagaagaagaaggaggacgagaagaagaagaagaagaagaagggcagcctggacagcgacaacgacgacagcgactgcccctacagcgagaaggtgcccagcatcaagatccccatggacatcatggagcagcagcccttcctgagcgacagcaagcccagcgacagagagagaagccccaccttcctggagagacacaccagctgctag

SEQ ID NO: 100005 - DNA, 3285 bp, synthetic construct
  misc_feature 1..3285: note = Description of Artificial Sequence: Synthetic coding sequence
  source 1..3285: mol_type = other DNA
atggaggacgaggccgtgctggacagaggcgccagcttcctgaagcacgtgtgcgacgaggaggaggtggagggccaccacaccatctacatcggcgtgcacgtgcccaagagctacagaagaagaagaagacacaagagaaagaccggccacaaggagaagaaggagaaggagagaatcagcgagaactacagcgacaagagcgacatcgagaacgccgacgagagcagcagcagcatcctgaagcccctgatcagccccgccgccgagagaatcagattcatcctgggcgaggaggacgacagccccgcccccccccagctgttcaccgagctggacgagctgctggccgtggacggccaggagatggagtggaaggagaccgccagatggatcaagttcgaggagaaggtggagcagggcggcgagagatggagcaagccccacgtggccaccctgagcctgcacagcctgttcgagctgagaacctgcatggagaagggcagcatcatgctggacagagaggccagcagcctgccccagctggtggagatgatcgtggaccaccagatcgagaccggcctgctgaagcccgagctgaaggacaaggtgacctacaccctgctgagaaagcacagacaccagaccaagaagagcaacctgagaagcctggccgacatcggcaagaccgtgagcagcgccagcagaatgttcaccaaccccgacaacggcagccccgccatgacccacagaaacctgaccagcagcagcctgaacgacatcagcgacaagcccgagaaggaccagctgaagaacaagttcatgaagaagctgcccagagacgccgaggccagcaacgtgctggtgggcgaggtggacttcctggacacccccttcatcgccttcgtgagactgcagcaggccgtgatgctgggcgccctgaccgaggtgcccgtgcccaccagattcctgttcatcctgctgggccccaagggcaaggccaagagctaccacgagatcggcagagccatcgccaccctgatgagcgacgaggtgttccacgacatcgcctacaaggccaaggacagacacgacctgatcgccggcatcgacgagttcctggacgaggtgatcgtgctgccccccggcgagtgggaccccgccatcagaatcgagccccccaagagcctgcccagcagcgacaagagaaagaacatgtacagcggcggcgagaacgtgcagatgaacggcgacaccccccacgacggcggccacggcggcggcggccacggcgactgcgaggagctgcagagaaccggcagattctgcggcggcctgatcaaggacatcaagagaaaggcccccttcttcgccagcgacttctacgacgccctgaacatccaggccctgagcgccatcctgttcatctacctggccaccgtgaccaacgccatcaccttcggcggcctgctgggcgacgccaccgacaacatgcagggcgtgctggagagcttcctgggcaccgccgtgagcggcgccatcttctgcctgttcgccggccagcccctgaccatcctgagcagcaccggccccgtgctggtgttcgagagactgctgttcaacttcagcaaggacaacaacttcgactacctggagttcagactgtggatcggcctgtggagcgccttcctgtgcctgatcctggtggccaccgacgccagcttcctggtgcagtacttcaccagattcaccgaggagggcttcagcagcctgatcagcttcatcttcatctacgacgccttcaagaagatgatcaagctggccgactactaccccatcaacagcaacttcaaggtgggctacaacaccctgttcagctgcacctgcgtgccccccgaccccgccaacatcagcatcagcaacgacaccaccctggcccccgagtacctgcccaccatgagcagcaccgacatgtaccacaacaccaccttcgactgggccttcctgagcaagaaggagtgcagcaagtacggcggcaacctggtgggcaacaactgcaacttcgtgcccgacatcaccctgatgagcttcatcctgttcctgggcacctacaccagcagcatggccctgaagaagttcaagaccagcccctacttccccaccaccgccagaaagctgatcagcgacttcgccatcatcctgagcatcctgatcttctgcgtgatcgacgccctggtgggcgtggacacccccaagctgatcgtgcccagcgagttcaagcccaccagccccaacagaggctggttcgtgccccccttcggcgagaacccctggtgggtgtgcctggccgccgccatccccgccctgctggtgaccatcctgatcttcatggaccagcagatcaccgccgtgatcgtgaacagaaaggagcacaagctgaagaagggcgccggctaccacctggacctgttctgggtggccatcctgatggtgatctgcagcctgatggccctgccctggtacgtggccgccaccgtgatcagcatcgcccacatcgacagcctgaagatggagaccgagaccagcgcccccggcgagcagcccaagttcctgggcgtgagagagcagagagtgaccggcaccctggtgttcatcctgaccggcctgagcgtgttcatggcccccatcctgaagttcatccccatgcccgtgctgtacggcgtgttcctgtacatgggcgtggccagcctgaacggcgtgcagttcatggacagactgaagctgctgctgatgcccctgaagcaccagcccgacttcatctacctgagacacgtgcccctgagaagagtgcacctgttcaccttcctgcaggtgctgtgcctggccctgctgtggatcctgaagagcaccgtggccgccatcatcttccccgtgatgatcctggccctggtggccgtgagaaagggcatggactacctgttcagccagcacgacctgagcttcctggacgacgtgatccccgagaaggacaagaagaagaaggaggacgagaagaagaagaagaagaagaagggcagcctggacagcgacaacgacgacgagaaggaccaccagcacagcctgaacgccacccaccacgccgacaagatccccttcctgcagagcctgggcatgcccagcccccccagaacccccgtgaaggtggtgccccagatcagaatcgagctggagcccgaggacaacgactacttctggagaagcaagggcaccgagaccaccctgtag

SEQ ID NO: 100006 - DNA, 3123 bp, synthetic construct
  misc_feature 1..3123: note = Description of Artificial Sequence: Synthetic coding sequence
  source 1..3123: mol_type = other DNA
atgaaggtgaaggaggagaaggccggcgtgggcaagctggaccacaccaaccacagaagaagattccccgaccagaaggagtgcccccccatccacatcggcctgcccgtgcccacctacccccagagaaagaccgaccagaagggccacctgagcggcctgcagaaggtgcactggggcctgagacccgaccagccccagcaggagctgaccggccccggcagcggcgccagcagccaggacagcagcatggacctgatcagcagaaccagaagccccgccgccgagcagctgcaggacatcctgggcgaggaggacgaggcccccaaccccaccctgttcaccgagatggacaccctgcagcacgacggcgaccagatggagtggaaggagagcgccagatggatcaagttcgaggagaaggtggaggagggcggcgagagatggagcaagccccacgtgagcaccctgagcctgcacagcctgttcgagctgagaacctgcctgcagaccggcaccgtgctgctggacctggacagcggcagcctgccccagatcatcgacgacgtgatcgagaagcagatcgaggacggcctgctgagacccgagctgagagagagagtgagctacgtgctgctgagaagacacagacaccagaccaagaagcccatccacagaagcctggccgacatcggcaagagcgtgagcaccaccaacagaagccccgccagaagccccggcgccggccccagcctgcaccacagcaccgaggacctgagaatgagacagagcgccaactacggcagactgtgccacgcccagagcagaagcatgaacgacatcagcctgacccccaacaccgaccagagaaagaacaagttcatgaagaagatccccaaggacagcgaggccagcaacgtgctggtgggcgaggtggacttcctggaccagcccttcatcgccttcgtgagactgatccagagcgccatgctgggcggcgtgaccgaggtgcccgtgcccaccagattcctgttcatcctgctgggccccagcggcagagccaagagctacaacgagatcggcagagccatcgccaccctgatggtggacgacctgttcagcgacgtggcctacaaggccagaaacagagaggacctgatcgccggcatcgacgagttcctggacgaggtgatcgtgctgccccccggcgagtgggaccccaacatcagaatcgagccccccaagaaggtgcccagcgccgacaagagaaagagcgtgttcagcctggccgagctgggccagatgaacggcagcgtgggcggcggcggcggcgcccccggcggcggcaacggcggcggcggcggcggcggcagcggcggcggcgccggcagcggcggcgccggcggcaccagcagcggcgacgacggcgagatgcccgccatgcacgagatcggcgaggagctgatctggaccggcagattcttcggcggcctgtgcctggacatcaagagaaagctgccctggttccccagcgacttctacgacggcttccacatccagagcatcagcgccatcctgttcatctacctgggctgcatcaccaacgccatcaccttcggcggcctgctgggcgacgccaccgacaactaccagggcgtgatggagagcttcctgggcaccgccatggccggcagcctgttctgcctgttcagcggccagcccctgatcatcctgagcagcaccggccccatcctgatcttcgagaagctgctgttcgacttcagcaagggcaacggcctggactacatggagttcagactgtggatcggcctgcacagcgccgtgcagtgcctgatcctggtggccaccgacgccagcttcatcatcaagtacatcaccagattcaccgaggagggcttcagcaccctgatcagcttcatcttcatctacgacgccatcaagaagatgatcggcgccttcaagtactaccccatcaacatggacttcaagcccaacttcatcaccacctacaagtgcgagtgcgtggcccccgacaccgtgaacaccaccgtgttcaacgccagcgcccccctggcccccgacaccaacgccagcctgtacaacctgctgaacctgaccgccctggactggagcctgctgagcaagaaggagtgcctgagctacggcggcagactgctgggcaacagctgcaagttcatccccgacctggccctgatgagcttcatcctgttcttcggcacctacagcatgaccctgaccctgaagaagttcaagttcagcagatacttccccaccaaggtgagagccctggtggccgacttcagcatcgtgttcagcatcctgatgttctgcggcatcgacgcctgcttcggcctggagacccccaagctgcacgtgcccagcgtgatcaagcccaccagacccgacagaggctggttcgtggcccccttcggcaagaacccctggtgggtgtaccccgccagcatcctgcccgccctgctggtgaccatcctgatcttcatggaccagcagatcaccgccgtgatcgtgaacagaaaggagaacaagctgaagaaggccgccggctaccacctggacctgttctgggtgggcatcctgatggccctgtgcagcttcatgggcctgccctggtacgtggccgccaccgtgatcagcatcgcccacatcgacagcctgaagatggagaccgagaccagcgcccccggcgagcagccccagttcctgggcgtgagagagcagagagtgaccggcatcatcgtgttcatcctgaccggcatcagcgtgttcctggcccccatcctgaagatcctgggcctgatcatcgtgagaagactgctggacttcatcttcagccagcacgacctggcctggatcgacaacatcctgcccgagaaggagaagaaggagaccgacaagaagagaaagagaaagaagggcgcccacgaggactgcgacgaggagccccagttccccccccccagcgtgatcaagatccccatggagagcgtgcagagcgacccccagaacggcatccactgcatcgccagaaagagaagcagcagctggagctacagcctgtag

SEQ ID NO: 100007 - DNA, 3414 bp, synthetic construct
  misc_feature 1..3414: note = Description of Artificial Sequence: Synthetic coding sequence
  source 1..3414: mol_type = other DNA
atgaaggtgaaggaggagaaggccggcgtgggcaagctggaccacaccaaccacagaagaagattccccgaccagaaggagtgcccccccatccacatcggcctgcccgtgcccacctacccccagagaaagaccgaccagaagggccacctgagcggcctgcagaaggtgcactggggcctgagacccgaccagccccagcaggagctgaccggccccggcagcggcgccagcagccaggacagcagcatggacctgatcagcagaaccagaagccccgccgccgagcagctgcaggacatcctgggcgaggaggacgaggcccccaaccccaccctgttcaccgagatggacaccctgcagcacgacggcgaccagatggagtggaaggagagcgccagatggatcaagttcgaggagaaggtggaggagggcggcgagagatggagcaagccccacgtgagcaccctgagcctgcacagcctgttcgagctgagaacctgcctgcagaccggcaccgtgctgctggacctggacagcggcagcctgccccagatcatcgacgacgtgatcgagaagcagatcgaggacggcctgctgagacccgagctgagagagagagtgagctacgtgctgctgagaagacacagacaccagaccaagaagcccatccacagaagcctggccgacatcggcaagagcgtgagcaccaccaacagaagccccgccagaagccccggcgccggccccagcctgcaccacagcaccgaggacctgagaatgagacagagcgccaactacggcagactgtgccacgcccagagcagaagcatgaacgacatcagcctgacccccaacaccgaccagagaaagaacaagttcatgaagaagatccccaaggacagcgaggccagcaacgtgctggtgggcgaggtggacttcctggaccagcccttcatcgccttcgtgagactgatccagagcgccatgctgggcggcgtgaccgaggtgcccgtgcccaccagattcctgttcatcctgctgggccccagcggcagagccaagagctacaacgagatcggcagagccatcgccaccctgatggtggacgacctgttcagcgacgtggcctacaaggccagaaacagagaggacctgatcgccggcatcgacgagttcctggacgaggtgatcgtgctgccccccggcgagtgggaccccaacatcagaatcgagccccccaagaaggtgcccagcgccgacaagagaaagagcgtgttcagcctggccgagctgggccagatgaacggcagcgtgggcggcggcggcggcgcccccggcggcggcaacggcggcggcggcggcggcggcagcggcggcggcgccggcagcggcggcgccggcggcaccagcagcggcgacgacggcgagatgcccgccatgcacgagatcggcgaggagctgatctggaccggcagattcttcggcggcctgtgcctggacatcaagagaaagctgccctggttccccagcgacttctacgacggcttccacatccagagcatcagcgccatcctgttcatctacctgggctgcatcaccaacgccatcaccttcggcggcctgctgggcgacgccaccgacaactaccagggcgtgatggagagcttcctgggcaccgccatggccggcagcctgttctgcctgttcagcggccagcccctgatcatcctgagcagcaccggccccatcctgatcttcgagaagctgctgttcgacttcagcaagggcaacggcctggactacatggagttcagactgtggatcggcctgcacagcgccgtgcagtgcctgatcctggtggccaccgacgccagcttcatcatcaagtacatcaccagattcaccgaggagggcttcagcaccctgatcagcttcatcttcatctacgacgccatcaagaagatgatcggcgccttcaagtactaccccatcaacatggacttcaagcccaacttcatcaccacctacaagtgcgagtgcgtggcccccgacaccgtgaacaccaccgtgttcaacgccagcgcccccctggcccccgacaccaacgccagcctgtacaacctgctgaacctgaccgccctggactggagcctgctgagcaagaaggagtgcctgagctacggcggcagactgctgggcaacagctgcaagttcatccccgacctggccctgatgagcttcatcctgttcttcggcacctacagcatgaccctgaccctgaagaagttcaagttcagcagatacttccccaccaaggtgagagccctggtggccgacttcagcatcgtgttcagcatcctgatgttctgcggcatcgacgcctgcttcggcctggagacccccaagctgcacgtgcccagcgtgatcaagcccaccagacccgacagaggctggttcgtggcccccttcggcaagaacccctggtgggtgtaccccgccagcatcctgcccgccctgctggtgaccatcctgatcttcatggaccagcagatcaccgccgtgatcgtgaacagaaaggagaacaagctgaagaaggccgccggctaccacctggacctgttctgggtgggcatcctgatggccctgtgcagcttcatgggcctgccctggtacgtggccgccaccgtgatcagcatcgcccacatcgacagcctgaagatggagaccgagaccagcgcccccggcgagcagccccagttcctgggcgtgagagagcagagagtgaccggcatcatcgtgttcatcctgaccggcatcagcgtgttcctggcccccatcctgaagtgcatccccctgcccgtgctgtacggcgtgttcctgtacatgggcgtggccagcctgaacggcatccagatgggcaccggcggcagcgagttcaagatccagaagaagctgacccccttctgggagagatgcaagctgttcctgatgcccgccaagcaccagcccgaccacgccttcctgagacacgtgcccctgagaagaatccacctgttcaccctggtgcagatcctgtgcctggccgtgctgtggatcctgaagagcaccgtggccgccatcatcttccccgtgatgatcctgggcctgatcatcgtgagaagactgctggacttcatcttcagccagcacgacctggcctggatcgacaacatcctgcccgagaaggagaagaaggagaccgacaagaagagaaagagaaagaagggcgcccacgaggactgcgacgaggagccccagttccccccccccagcgtgatcaagatccccatggagagcgtgcagagcgacccccagaacggcatccactgcatcgccagaaagagaagcagcagctggagctacagcctgtag

SEQ ID NO: 100008 - DNA, 3060 bp, synthetic construct
  misc_feature 1..3060: note = Description of Artificial Sequence: Synthetic coding sequence
  source 1..3060: mol_type = other DNA
atgaaggtgaaggaggagaaggccggcgtgggcaagctggaccacaccaaccacagaagaagattccccgaccagaagggcagccccgccgccgagcagctgcaggacatcctgggcgaggaggacgaggcccccaaccccaccctgttcaccgagatggacaccctgcagcacgacggcgaccagatggagtggaaggagagcgccagatggatcaagttcgaggagaaggtggaggagggcggcgagagatggagcaagccccacgtgagcaccctgagcctgcacagcctgttcgagctgagaacctgcctgcagaccggcaccgtgctgctggacctggacagcggcagcctgccccagatcatcgacgacgtgatcgagaagcagatcgaggacggcctgctgagacccgagctgagagagagagtgagctacgtgctgctgagaagacacagacaccagaccaagaagcccatccacagaagcctggccgacatcggcaagagcgtgagcaccaccaacagaagccccgccagaagccccggcgccggccccagcctgcaccacagcaccgaggacctgagaatgagacagagcgccaactacggcagactgtgccacgcccagagcagaagcatgaacgacatcagcctgacccccaacaccgaccagagaaagaacaagttcatgaagaagatccccaaggacagcgaggccagcaacgtgctggtgggcgaggtggacttcctggaccagcccttcatcgccttcgtgagactgatccagagcgccatgctgggcggcgtgaccgaggtgcccgtgcccaccagattcctgttcatcctgctgggccccagcggcagagccaagagctacaacgagatcggcagagccatcgccaccctgatggtggacgacctgttcagcgacgtggcctacaaggccagaaacagagaggacctgatcgccggcatcgacgagttcctggacgaggtgatcgtgctgccccccggcgagtgggaccccaacatcagaatcgagccccccaagaaggtgcccagcgccgacaagagaaagagcgtgttcagcctggccgagctgggccagatgaacggcagcgtgggcggcggcggcggcgcccccggcggcggcaacggcggcggcggcggcggcggcagcggcggcggcgccggcagcggcggcgccggcggcaccagcagcggcgacgacggcgagatgcccgccatgcacgagatcggcgaggagctgatctggaccggcagattcttcggcggcctgtgcctggacatcaagagaaagctgccctggttccccagcgacttctacgacggcttccacatccagagcatcagcgccatcctgttcatctacctgggctgcatcaccaacgccatcaccttcggcggcctgctgggcgacgccaccgacaactaccagggcgtgatggagagcttcctgggcaccgccatggccggcagcctgttctgcctgttcagcggccagcccctgatcatcctgagcagcaccggccccatcctgatcttcgagaagctgctgttcgacttcagcaagggcaacggcctggactacatggagttcagactgtggatcggcctgcacagcgccgtgcagtgcctgatcctggtggccaccgacgccagcttcatcatcaagtacatcaccagattcaccgaggagggcttcagcaccctgatcagcttcatcttcatctacgacgccatcaagaagatgatcggcgccttcaagtactaccccatcaacatggacttcaagcccaacttcatcaccacctacaagtgcgagtgcgtggcccccgacaccgtgaacaccaccgtgttcaacgccagcgcccccctggcccccgacaccaacgccagcctgtacaacctgctgaacctgaccgccctggactggagcctgctgagcaagaaggagtgcctgagctacggcggcagactgctgggcaacagctgcaagttcatccccgacctggccctgatgagcttcatcctgttcttcggcacctacagcatgaccctgaccctgaagaagttcaagttcagcagatacttccccaccaagcccaccagacccgacagaggctggttcgtggcccccttcggcaagaacccctggtgggtgtaccccgccagcatcctgcccgccctgctggtgaccatcctgatcttcatggaccagcagatcaccgccgtgatcgtgaacagaaaggagaacaagctgaagaaggccgccggctaccacctggacctgttctgggtgggcatcctgatggccctgtgcagcttcatgggcctgccctggtacgtggccgccaccgtgatcagcatcgcccacatcgacagcctgaagatggagaccgagaccagcgcccccggcgagcagccccagttcctgggcgtgagagagcagagagtgaccggcatcatcgtgttcatcctgaccggcatcagcgtgttcctggcccccatcctgaagtgcatccccctgcccgtgctgtacggcgtgttcctgtacatgggcgtggccagcctgaacggcatccagttctgggagagatgcaagctgttcctgatgcccgccaagcaccagcccgaccacgccttcctgagacacgtgcccctgagaagaatccacctgttcaccctggtgcagatcctgtgcctggccgtgctgtggatcctgaagagcaccgtggccgccatcatcttccccgtgatgatcctgggcctgatcatcgtgagaagactgctggacttcatcttcagccagcacgacctggcctggatcgacaacatcctgcccgagaaggagaagaaggagaccgacaagaagagaaagagaaagaagggcgcccacgaggactgcgacgaggagccccagttccccccccccagcgtgatcaagatccccatggagagcgtgcagagcgacccccagaacggcatccactgcatcgccagaaagagaagcagcagctggagctacagcctgtag

SEQ ID NO: 100009 - DNA, 3060 bp, synthetic construct; identical to SEQ ID NO: 100008
  misc_feature 1..3060: note = Description of Artificial Sequence: Synthetic coding sequence
  source 1..3060: mol_type = other DNA

SEQ ID NO: 100010 - DNA, 3123 bp, synthetic construct; identical to SEQ ID NO: 100006
  misc_feature 1..3123: note = Description of Artificial Sequence: Synthetic coding sequence
  source 1..3123: mol_type = other DNA

SEQ ID NO: 100011 - DNA, 3414 bp, synthetic construct; identical to SEQ ID NO: 100007
  misc_feature 1..3414: note = Description of Artificial Sequence: Synthetic coding sequence
  source 1..3414: mol_type = other DNA

SEQ ID NO: 100012 - DNA, 3366 bp, synthetic construct
  misc_feature 1..3366: note = Description of Artificial Sequence: Synthetic coding sequence
  source 1..3366: mol_type = other DNA
atgaaggtgaaggaggagaaggccggcgtgggcaagctggaccacaccaaccacagaagaagattccccgaccagaaggagtgcccccccatccacatcggcctgcccgtgcccacctacccccagagaaagaccgaccagaagggccacctgagcggcctgcagaaggtgcactggggcctgagacccgaccagccccagcaggagctgaccggccccggcagcggcgccagcagccaggacagcagcatggacctgatcagcagaaccagaagccccgccgccgagcagctgcaggacatcctgggcgaggaggacgaggcccccaaccccaccctgttcaccgagatggacaccctgcagcacgacggcgaccagatggagtggaaggagagcgccagatggatcaagttcgaggagaaggtggaggagggcggcgagagatggagcaagccccacgtgagcaccctgagcctgcacagcctgttcgagctgagaacctgcctgcagaccggcaccgtgctgctggacctggacagcggcagcctgccccagatcatcgacgacgtgatcgagaagcagatcgaggacggcctgctgagacccgagctgagagagagagtgagctacgtgctgctgagaagacacagacaccagaccaagaagcccatccacagaagcctggccgacatcggcaagagcgtgagcaccaccaacagaagccccgccagaagccccggcgccggccccagcctgcaccacagcaccgaggacctgagaatgagacagagcgccaactacggcagactgtgccacgcccagagcagaagcatgaacgacatcagcctgacccccaacaccgaccagagaaagaacaagttcatgaagaagatccccaaggacagcgaggccagcaacgtgctggtgggcgaggtggacttcctggaccagcccttcatcgccttcgtgagactgatccagagcgccatgctgggcggcgtgaccgaggtgcccgtgcccaccagattcctgttcatcctgctgggccccagcggcagagccaagagctacaacgagatcggcagagccatcgccaccctgatggtggacgacctgttcagcgacgtggcctacaaggccagaaacagagaggacctgatcgccggcatcgacgagttcctggacgaggtgatcgtgctgccccccggcgagtgggaccccaacatcagaatcgagccccccaagaaggtgcccagcgccgacaagagaaagagcgtgttcagcctggccgagctgggccagatgaacggcagcgtgggcggcggcggcggcgcccccggcggcggcaacggcggcggcggcggcggcggcagcggcggcggcgccggcagcggcggcgccggcggcaccagcagcggcgacgacggcgagatgcccgccatgcacgagatcggcgaggagctgatctggaccggcagattcttcggcggcctgtgcctggacatcaagagaaagctgccctggttccccagcgacttctacgacggcttccacatccagagcatcagcgccatcctgttcatctacctgggctgcatcaccaacgccatcaccttcggcggcctgctgggcgacgccaccgacaactaccagggcgtgatggagagcttcctgggcaccgccatggccggcagcctgttctgcctgttcagcggccagcccctgatcatcctgagcagcaccggccccatcctgatcttcgagaagctgctgttcgacttcagcaagggcaacggcctggactacatggagttcagactgtggatcggcctgcacagcgccgtgcagtgcctgatcctggtggccaccgacgccagcttcatcatcaagtacatcaccagattcaccgaggagggcttcagcaccctgatcagcttcatcttcatctacgacgccatcaagaagatgatcggcgccttcaagtactaccccatcaacatggacttcaagcccaacttcatcaccacctacaagtgcgagtgcgtggcccccgacaccgtgaacaccaccgtgttcaacgccagcgcccccctggcccccgacaccaacgccagcctgtacaacctgctgaacctgaccgccctggactggagcctgctgagcaagaaggagtgcctgagctacggcggcagactgctgggcaacagctgcaagttcatccccgacctggccctgatgagcttcatcctgttcttcggcacctacagcatgaccctgaccctgaagaagttcaagttcagcagatacttccccaccaaggtgagagccctggtggccgacttcagcatcgtgttcagcatcctgatgttctgcggcatcgacgcctgcttcggcctggagacccccaagctgcacgtgcccagcgtgatcaagcccaccagacccgacagaggctggttcgtggcccccttcggcaagaacccctggtgggtgtaccccgccagcatcctgcccgccctgctggtgaccatcctgatcttcatggaccagcagatcaccgccgtgatcgtgaacagaaaggagaacaagctgaagaaggccgccggctaccacctggacctgttctgggtgggcatcctgatggccctgtgcagcttcatgggcctgccctggtacgtggccgccaccgtgatcagcatcgcccacatcgacagcctgaagatggagaccgagaccagcgcccccggcgagcagccccagttcctgggcgtgagagagcagagagtgaccggcatcatcgtgttcatcctgaccggcatcagcgtgttcctggcccccatcctgaagtgcatccccctgcccgtgctgtacggcgtgttcctgtacatgggcgtggccagcctgaacggcatccagttctgggagagatgcaagctgttcctgatgcccgccaagcaccagcccgaccacgccttcctgagacacgtgcccctgagaagaatccacctgttcaccctggtgcagatcctgtgcctggccgtgctgtggatcctgaagagcaccgtggccgccatcatcttccccgtgatgatcctgggcctgatcatcgtgagaagactgctggacttcatcttcagccagcacgacctggcctggatcgacaacatcctgcccgagaaggagaagaaggagaccgacaagaagagaaagagaaagaagggcgcccacgaggactgcgacgaggagccccagttccccccccccagcgtgatcaagatccccatggagagcgtgcagagcgacccccagaacggcatccactgcatcgccagaaagagaagcagcagctggagctacagcctgtag

SEQ ID NO: 100013 - DNA, 2982 bp, synthetic construct
  misc_feature 1..2982: note = Description of Artificial Sequence: Synthetic coding sequence
  source 1..2982: mol_type = other DNA
atgaaggtgaaggaggagaaggccggcgtgggcaagctggaccacaccaaccacagaagaagattccccgaccagaaggagtgcccccccatccacatcggcctgcccgtgcccacctacccccagagaaagaccgaccagaagggccacctgagcggcctgcagaaggtgcactggggcctgagacccgaccagccccagcaggagctgaccggccccggcagcggcgccagcagccaggacagcagcatggacctgatcagcagaaccagaagccccgccgccgagcagctgcaggacatcctgggcgaggaggacgaggcccccaaccccaccctgttcaccgagatggacaccctgcagcacgacggcgaccagatggagtggaaggagagcgccagatggatcaagttcgaggagaaggtggaggagggcggcgagagatggagcaagccccacgtgagcaccctgagcctgcacagcctgttcgagctgagaacctgcctgcagaccggcaccgtgctgctggacctggacagcggcagcctgccccagatcatcgacgacgtgatcgagaagcagatcgaggacggcctgctgagacccgagctgagagagagagtgagctacgtgctgctgagaagacacagacaccagaccaagaagcccatccacagaagcctggccgacatcggcaagagcgtgagcaccaccaacagaagccccgccagaagccccggcgccggccccagcctgcaccacagcaccgaggacctgagaatgagacagagcgccaactacggcagactgtgccacgcccagagcagaagcatgaacgacatcagcctgacccccaacaccgaccagagaaagaacaagttcatgaagaagatccccaaggacagcgaggccagcaacgtgctggtgggcgaggtggacttcctggaccagcccttcatcgccttcgtgagactgatccagagcgccatgctgggcggcgtgaccgaggtgcccgtgcccaccagattcctgttcatcctgctgggccccagcggcagagccaagagctacaacgagatcggcagagccatcgccaccctgatggtggacgacctgttcagcgacgtggcctacaaggccagaaacagagaggacctgatcgccggcatcgacgagttcctggacgaggtgatcgtgctgccccccggcgagtgggaccccaacatcagaatcgagccccccaagaaggtgcccagcgccgacaagagaaagagcgtgttcagcctggccgagctgggccagatgaacggcagcgtgggcggcggcggcggcgcccccggcggcggcaacggcggcggcggcggcggcggcagcggcggcggcgccggcagcggcggcgccggcggcaccagcagcggcgacgacggcgagatgcccgccatgcacgagatcggcgaggagctgatctggaccggcagattcttcggcggcctgtgcctggacatcaagagaaagctgccctggttccccagcgacttctacgacggcttccacatccagagcatcagcgccatcctgttcatctacctgggctgcatcaccaacgccatcaccttcggcggcctgctgggcgacgccaccgacaactaccagggcgtgatggagagcttcctgggcaccgccatggccggcagcctgttctgcctgttcagcggccagcccctgatcatcctgagcagcaccggccccatcctgatcttcgagaagctgctgttcgacttcagcaagggcaacggcctggactacatggagttcagactgtggatcggcctgcacagcgccgtgcagtgcctgatcctggtggccaccgacgccagcttcatcatcaagtacatcaccagattcaccgaggagggcttcagcaccctgatcagcttcatcttcatctacgacgccatcaagaagatgatcggcgccttcaagtactaccccatcaacatggacttcaagcccaacttcatcaccacctacaagtgcgagtgcgtggcccccgacaccgtgaacaccaccgtgttcaacgccagcgcccccctggcccccgacaccaacgccagcctgtacaacctgctgaacctgaccgccctggactggagcctgctgagcaagaaggagtgcctgagctacggcggcagactgctgggcaacagctgcaagttcatccccgacctggccctgatgagcttcatcctgttcttcggcacctacagcatgaccctgaccctgaagaagttcaagttcagcagatacttccccaccaaggtgagagccctggtggccgacttcagcatcgtgttcagcatcctgatgttctgcggcatcgacgcctgcttcggcctggagacccccaagctgcacgtgcccagcgtgatcaagcccaccagacccgacagaggctggttcgtggcccccttcggcaagaacccctggtgggtgtaccccgccagcatcctgcccgccctgctggtgaccatcctgatcttcatggaccagcagatcaccgccgtgatcgtgaacagaaaggagaacaagctgaagggcaccgagagcaacagacaccacagactgcaccccgacggcaacctgtgcctgcccggcagccaccccaaggtgtacccccccgccggcgccgtgagaagcctgcccctgcacggcagaggcctgcccgagtggcaccccgtgctgggcaccctgcaggccctgcccgacgccagccaggcccccgccggcccctgcctgcccgccgccagagccgccgcccccgacccccccctgcaccccggcgccgaccccctgcccggcggcgccctggacccccagatccacggcggctgccaccacctgcccggccacgaccccggcccccaccacagaagcaaggccagcggcttccacctgttccccgccagacccggcctggactag

SEQ ID NO: 100014 - DNA, 2895 bp, synthetic construct
  misc_feature 1..2895: note = Description of Artificial Sequence: Synthetic coding sequence
  source 1..2895: mol_type = other DNA
atgaaggtgaaggaggagaaggccggcgtgggcaagctggaccacaccaaccacagaagaagattccccgaccagaaggagtgcccccccatccacatcggcctgcccgtgcccacctacccccagagaaagaccgaccagaagggccacctgagcggcctgcagaaggtgcactggggcctgagacccgaccagccccagcaggagctgaccggccccggcagcggcgccagcagccaggacagcagcatggacctgatcagcagaaccagaagccccgccgccgagcagctgcaggacatcctgggcgaggaggacgaggcccccaaccccaccctgttcaccgagatggacaccctgcagcacgacggcgaccagatggagtggaaggagagcgccagatggatcaagttcgaggagaaggtggaggagggcggcgagagatggagcaagccccacgtgagcaccctgagcctgcacagcctgttcgagctgagaacctgcctgcagaccggcaccgtgctgctggacctggacagcggcagcctgccccagatcatcgacgacgtgatcgagaagcagatcgaggacggcctgctgagacccgagctgagagagagagtgagctacgtgctgctgagaagacacagacaccagaccaagaagcccatccacagaagcctggccgacatcggcaagagcgtgagcaccaccaacagaagccccgccagaagccccggcgccggccccagcctgcaccacagcaccgaggacctgagaatgagacagagcgccaactacggcagactgtgccacgcccagagcagaagcatgaacgacatcagcctgacccccaacaccgaccagagaaagaacaagttcatgaagaagatccccaaggacagcgaggccagcaacgtgctggtgggcgaggtggacttcctggaccagcccttcatcgccttcgtgagactgatccagagcgccatgctgggcggcgtgaccgaggtgcccgtgcccaccagattcctgttcatcctgctgggccccagcggcagagccaagagctacaacgagatcggcagagccatcgccaccctgatggtggacgacctgttcagcgacgtggcctacaaggccagaaacagagaggacctgatcgccggcatcgacgagttcctggacgaggtgatcgtgctgccccccggcgagtgggaccccaacatcagaatcgagccccccaagaaggtgcccagcgccgacaagagaaagagcgtgttcagcctggccgagctgggccagatgaacggcagcgtgggcggcggcggcggcgcccccggcggcggcaacggcggcggcggcggcggcggcagcggcggcggcgccggcagcggcggcgccggcggcaccagcagcggcgacgacggcgagatgcccgccatgcacgagatcggcgaggagctgatctggaccggcagattcttcggcggcctgtgcctggacatcaagagaaagctgccctggttccccagcgacttctacgacggcttccacatccagagcatcagcgccatcctgttcatctacctgggctgcatcaccaacgccatcaccttcggcggcctgctgggcgacgccaccgacaactaccagggcgtgatggagagcttcctgggcaccgccatggccggcagcctgttctgcctgttcagcggccagcccctgatcatcctgagcagcaccggccccatcctgatcttcgagaagctgctgttcgacttcagcaagggcaacggcctggactacatggagttcagactgtggatcggcctgcacagcgccgtgcagtgcctgatcctggtggccaccgacgccagcttcatcatcaagtacatcaccagattcaccgaggagggcttcagcaccctgatcagcttcatcttcatctacgacgccatcaagaagatgatcggcgccttcaagtactaccccatcaacatggacttcaagcccaacttcatcaccacctacaagtgcgagtgcgtggcccccgacaccgtgaacaccaccgtgttcaacgccagcgcccccctggcccccgacaccaacgccagcctgtacaacctgctgaacctgaccgccctggactggagcctgctgagcaagaaggagtgcctgagctacggcggcagactgctgggcaacagctgcaagttcatccccgacctggccctgatgagcttcatcctgttcttcggcacctacagcatgaccctgaccctgaagaagttcaagttcagcagatacttccccaccaagcccaccagacccgacagaggctggttcgtggcccccttcggcaagaacccctggtgggtgtaccccgccagcatcctgcccgccctgctggtgaccatcctgatcttcatggaccagcagatcaccgccgtgatcgtgaacagaaaggagaacaagctgaagggcaccgagagcaacagacaccacagactgcaccccgacggcaacctgtgcctgcccggcagccaccccaaggtgtacccccccgccggcgccgtgagaagcctgcccctgcacggcagaggcctgcccgagtggcaccccgtgctgggcaccctgcaggccctgcccgacgccagccaggcccccgccggcccctgcctgcccgccgccagagccgccgcccccgacccccccctgcaccccggcgccgaccccctgcccggcggcgccctggacccccagatccacggcggctgccaccacctgcccggccacgtgagcctgcaccacagaagctgggccagcagcagcttcgagggcttctggatcagcagcttccccagcaccacctggcccggcctgaccaccagctag

SEQ ID NO: 100015 - DNA, 390 bp, synthetic construct
  misc_feature 1..390: note = Description of Artificial Sequence: Synthetic coding sequence
  source 1..390: mol_type = other DNA
atgaaggtgaaggaggagaaggccggcgtgggcaagctggaccacaccaaccacagaagaagattccccgaccagaaggagtgcccccccatccacatcggcctgcccgtgcccacctacccccagagaaagaccgaccagaagggccacctgagcggcctgcagaaggtgcactggggcctgagacccgaccagccccagcaggagctgaccggccccggcagcggcgccagcagccaggacagcagcatggacctgatcagcagaaccagaagccccgccgccgagcagctgcaggacatcctgggcgaggaggacgaggcccccaaccccaccctgttcaccgagatggacaccctgcagcacgacggcgaccagatggagtggtag

SEQ ID NO: 100016 - DNA, 438 bp, synthetic construct
  misc_feature 1..438: note = Description of Artificial Sequence: Synthetic coding sequence
  source 1..438: mol_type = other DNA
atgaaggtgaaggaggagaaggccggcgtgggcaagctggaccacaccaaccacagaagaagattccccgaccagaaggagtgcccccccatccacatcggcctgcccgtgcccacctacccccagagaaagaccgaccagaagggccacctgagcggcctgcagaaggtgcactggggcctgagacccgaccagccccagcaggagctgaccggccccggcagcggcgccagcagccaggacagcagcatggacctgatcagcagaaccagaagccccgccgccgagcagctgcaggacatcctgggcgaggaggacgaggcccccaaccccaccctgttcaccgagatggacaccctgcagcacgacggcgaccagatggagtggaaggagagcgccagatggatcaagttcgaggagaaggtggaggagggctag

SEQ ID NO: 100017 - DNA, 3429 bp, synthetic construct
  misc_feature 1..3429: note = Description of Artificial Sequence: Synthetic coding sequence
  source 1..3429: mol_type = other DNA
atgaaggtgaaggaggagaaggccggcgtgggcaagctggaccacaccaaccacagaagaagattccccgaccagaaggagtgcccccccatccacatcggcctgcccgtgcccacctacccccagagaaagaccgaccagaagggccacctgagcggcctgcagaaggtgcactggggcctgagacccgaccagccccagcaggagctgaccggccccggcagcggcgccagcagccaggacagcagcatggacctgatcagcagaaccagaagccccgccgccgagcagctgcaggacatcctgggcgaggaggacgaggcccccaaccccaccctgttcaccgagatggacaccctgcagcacgacggcgaccagatggagtggaaggagagcgccagatggatcaagttcgaggagaaggtggaggagggcggcgagagatggagcaagccccacgtgagcaccctgagcctgcacagcctgttcgagctgagaacctgcctgcagaccggcaccgtgctgctggacctggacagcggcagcctgccccagatcatcgacgacgtgatcgagaagcagatcgaggacggcctgctgagacccgagctgagagagagagtgagctacgtgctgctgagaagacacagacaccagaccaagaagcccatccacagaagcctggccgacatcggcaagagcgtgagcaccaccaacagaagccccgccagaagccccggcgccggccccagcctgcaccacagcaccgaggacctgagaatgagacagagcgccaactacggcagactgtgccacgcccagagcagaagcatgaacgacatcagcctgacccccaacaccgaccagagaaagaacaagttcatgaagaagatccccaaggacagcgaggccagcaacgtgctggtgggcgaggtggacttcctggaccagcccttcatcgccttcgtgagactgatccagagcgccatgctgggcggcgtgaccgaggtgcccgtgcccaccagattcctgttcatcctgctgggccccagcggcagagccaagagctacaacgagatcggcagagccatcgccaccctgatggtggacgacctgttcagcgacgtggcctacaaggccagaaacagagaggacctgatcgccggcatcgacgagttcctggacgaggtgatcgtgctgccccccggcgagtgggaccccaacatcagaatcgagccccccaagaaggtgcccagcgccgacaagagaaagagcgtgttcagcctggccgagctgggccagatgaacggcagcgtgggcggcggcggcggcgcccccggcggcggcaacggcggcggcggcggcggcggcagcggcggcggcgccggcagcggcggcgccggcggcaccagcagcggcgacgacggcgagatgcccgccatgcacgagatcggcgaggagctgatctggaccggcagattcttcggcggcctgtgcctggacatcaagagaaagctgccctggttccccagcgacttctacgacggcttccacatccagagcatcagcgccatcctgttcatctacctgggctgcatcaccaacgccatcaccttcggcggcctgctgggcgacgccaccgacaactaccagggcgtgatggagagcttcctgggcaccgccatggccggcagcctgttctgcctgttcagcggccagcccctgatcatcctgagcagcaccggccccatcctgatcttcgagaagctgctgttcgacttcagcaagggcaacggcctggactacatggagttcagactgtggatcggcctgcacagcgccgtgcagtgcctgatcctggtggccaccgacgccagcttcatcatcaagtacatcaccagattcaccgaggagggcttcagcaccctgatcagcttcatcttcatctacgacgccatcaagaagatgatcggcgccttcaagtactaccccatcaacatggacttcaagcccaacttcatcaccacctacaagtgcgagtgcgtggcccccgacaccgtgaacaccaccgtgttcaacgccagcgcccccctggcccccgacaccaacgccagcctgtacaacctgctgaacctgaccgccctggactggagcctgctgagcaagaaggagtgcctgagctacggcggcagactgctgggcaacagctgcaagttcatccccgacctggccctgatgagcttcatcctgttcttcggcacctacagcatgaccctgaccctgaagaagttcaagttcagcagatacttccccaccaaggtgagagccctggtggccgacttcagcatcgtgttcagcatcctgatgttctgcggcatcgacgcctgcttcggcctggagacccccaagctgcacgtgcccagcgtgatcaagcccaccagacccgacagaggctggttcgtggcccccttcggcaagaacccctggtgggtgtaccccgccagcatcctgcccgccctgctggtgaccatcctgatcttcatggaccagcagatcaccgccgtgatcgtgaacagaaaggagaacaagctgaagaaggccgccggctaccacctggacctgttctgggtgggcatcctgatggccctgtgcagcttcatgggcctgccctggtacgtggccgccaccgtgatcagcatcgcccacatcgacagcctgaagatggagaccgagaccagcgcccccggcgagcagccccagttcctgggcgtgagagagcagagagtgaccggcatcatcgtgttcatcctgaccggcatcagcgtgttcctggcccccatcctgaagtgcatccccctgcccgtgctgtacggcgtgttcctgtacatgggcgtggccagcctgaacggcatccagatgggcaccggcggcagcgagttcaagatccagaagaagctgacccccttctgggagagatgcaagctgttcctgatgcccgccaagcaccagcccgaccacgccttcctgagacacgtgcccctgagaagaatccacctgttcaccctggtgcagatcctgtgcctggccgtgctgtggatcctgaagagcaccgtggccgccatcatcttccccgtgatgagcctgagcaccaccgacctgggcctgatcatcgtgagaagactgctggacttcatcttcagccagcacgacctggcctggatcgacaacatcctgcccgagaaggagaagaaggagaccgacaagaagagaaagagaaagaagggcgcccacgaggactgcgacgaggagccccagttccccccccccagcgtgatcaagatccccatggagagcgtgcagagcgacccccagaacggcatccactgcatcgccagaaagagaagcagcagctggagctacagcctgtag

SEQ ID NO: 100018 - DNA, 3645 bp, synthetic construct
  misc_feature 1..3645: note = Description of Artificial Sequence: Synthetic coding sequence
  source 1..3645: mol_type = other DNA
atggagagattcagactggagaagaagctgcccggccccgacgaggaggccgtggtggacctgggcaagaccagcagcaccgtgaacaccaagttcgagaaggaggagctggagagccacagagccgtgtacatcggcgtgcacgtgcccttcagcaaggagagcagaagaagacacagacacagaggccacaagcaccaccacagaagaagaaaggacaaggagagcgacaaggaggacggcagagagagccccagctacgacacccccagccagagagtgcagttcatcctgggcaccgaggacgacgacgaggagcacatcccccacgacctgttcaccgagatggacgagctgtgctacagagacggcgaggagtacgagtggaaggagaccgccagatggctgaagttcgaggaggacgtggaggacggcggcgacagatggagcaagccctacgtggccaccctgagcctgcacagcctgttcgagctgagaagctgcatcctgaacggcaccgtgatgctggacatgagagccagcaccctggacgagatcgccgacatggtgctggacaacatgatcgccagcggccagctggacgagagcatcagagagaacgtgagagaggccctgctgaagagacaccaccaccagaacgagaagagattcaccagcagaatccccctggtgagaagcttcgccgacatcggcaagaagcacagcgacccccacctgctggagagaaacggcgagggcctgagcgccagcagacacagcctgagaaccggcctgagcgccagcaacctgagcctgagaggcgagagccccctgagcctgctgctgggccacctgctgcccagcagcagagccggcacccccgccggcagcagatgcaccacccccgtgcccaccccccagaacagcccccccagcagccccagcatcagcagactgaccagcagaagcagccaggagagccagagacaggcccccgagctgctggtgagccccgccagcgacgacatccccaccgtggtgatccacccccccgaggaggacctggaggccgccctgaagggcgaggagcagaagaacgaggagaacgtggacctgacccccggcatcctggccagcccccagagcgcccccggcaacctggacaacagcaagagcggcgagatcaagggcaacggcagcggcggcagcagagagaacagcaccgtggacttcagcaaggtggacatgaacttcatgagaaagatccccaccggcgccgaggccagcaacgtgctggtgggcgaggtggacttcctggagagacccatcatcgccttcgtgagactggcccccgccgtgctgctgaccggcctgaccgaggtgcccgtgcccaccagattcctgttcctgctgctgggccccgccggcaaggccccccagtaccacgagatcggcagaagcatcgccaccctgatgaccgacgagatcttccacgacgtggcctacaaggccaaggacagaaacgacctgctgagcggcatcgacgagttcctggaccaggtgaccgtgctgccccccggcgagtgggaccccagcatcagaatcgagccccccaagagcgtgcccagccaggagaagagaaagatccccgtgttccacaacggcagcacccccaccctgggcgagacccccaaggaggccgcccaccacgccggccccgagctgcagagaaccggcagactgttcggcggcctgatcctggacatcaagagaaaggcccccttcttcctgagcgacttcaaggacgccctgagcctgcagtgcctggccagcatcctgttcctgtactgcgcctgcatgagccccgtgatcaccttcggcggcctgctgggcgaggccaccgagggcagaatcagcgccatcgagagcctgttcggcgccagcctgaccggcatcgcctacagcctgttcgccggccagcccctgaccatcctgggcagcaccggccccgtgctggtgttcgagaagatcctgtacaagttctgcagagactaccagctgagctacctgagcctgagaaccagcatcggcctgtggaccagcttcctgtgcatcgtgctggtggccaccgacgccagcagcctggtgtgctacatcaccagattcaccgaggaggccttcgccgccctgatctgcatcatcttcatctacgaggccctggagaagctgttcgacctgggcgagacctacgccttcaacatgcacaacaacctggacaagctgaccagctacagctgcgtgtgcaccgagccccccaaccccagcaacgagaccctggcccagtggaagaaggacaacatcaccgcccacaacatcagctggagaaacctgaccgtgagcgagtgcaagaagctgagaggcgtgttcctgggcagcgcctgcggccaccacggcccctacatccccgacgtgctgttctggtgcgtgatcctgttcttcaccaccttcttcctgagcagcttcctgaagcagttcaagaccaagagatacttccccaccaaggtgagaagcaccatcagcgacttcgccgtgttcctgaccatcgtgatcatggtgaccatcgactacctggtgggcgtgcccagccccaagctgcacgtgcccgagaagttcgagcccacccaccccgagagaggctggatcatcagccccctgggcgacaacccctggtggaccctgctgatcgccgccatccccgccctgctgtgcaccatcctgatcttcatggaccagcagatcaccgccgtgatcatcaacagaaaggagcacaagctgaagaagggcgccggctaccacctggacctgctgatggtgggcgtgatgctgggcgtgtgcagcgtgatgggcctgccctggttcgtggccgccaccgtgctgagcatcagccacgtgaacagcctgaaggtggagagcgagtgcagcgcccccggcgagcagcccaagttcctgggcatcagagagcagagagtgaccggcctgatgatcttcatcctgatgggcctgagcgtgttcatgaccagcgtgctgaagttcatccccatgcccgtgctgtacggcgtgttcctgtacatgggcgtgagcagcctgaagggcatccagctgttcgacagaatcaagctgttcggcatgcccgccaagcaccagcccgacctgatctacctgagatacgtgcccctgtggaaggtgcacatcttcaccgtgatccagctgacctgcctggtgctgctgtgggtgatcaaggtgagcgccgccgccgtggtgttccccatgatggtgctggccctggtgttcgtgagaaagctgatggacctgtgcttcaccaagagagagctgagctggctggacgacctgatgcccgagagcaagaagaagaaggaggacgacaagaagaagaaggagaaggaggaggccgagagaatgctgcaggacgacgacgacaccgtgcacctgcccttcgagggcggcagcctgctgcagatccccgtgaaggccctgaagtacagccccgacaagcccgtgagcgtgaagatcagcttcgaggacgagcccagaaagaagtacgtggacgccgagaccagcctgtag

SEQ ID NO: 100019 - DNA, 2403 bp, synthetic construct
  misc_feature 1..2403: note = Description of Artificial Sequence: Synthetic coding sequence
  source 1..2403: mol_type = other DNA
atggaggtggtggaggccgagaagatcgtgctgctgaccagcgccagattcctgttcctgctgctgggccccgccggcaaggccccccagtaccacgagatcggcagaagcatcgccaccctgatgaccgacgagatcttccacgacgtggcctacaaggccaaggacagaaacgacctgctgagcggcatcgacgagttcctggaccaggtgaccgtgctgccccccggcgagtgggaccccagcatcagaatcgagccccccaagagcgtgcccagccaggagaagagaaagatccccgtgttccacaacggcagcacccccaccctgggcgagacccccaaggaggccgcccaccacgccggccccgagctgcagagaaccggcagactgttcggcggcctgatcctggacatcaagagaaaggcccccttcttcctgagcgacttcaaggacgccctgagcctgcagtgcctggccagcatcctgttcctgtactgcgcctgcatgagccccgtgatcaccttcggcggcctgctgggcgaggccaccgagggcagaatcagcgccatcgagagcctgttcggcgccagcctgaccggcatcgcctacagcctgttcgccggccagcccctgaccatcctgggcagcaccggccccgtgctggtgttcgagaagatcctgtacaagttctgcagagactaccagctgagctacctgagcctgagaaccagcatcggcctgtggaccagcttcctgtgcatcgtgctggtggccaccgacgccagcagcctggtgtgctacatcaccagattcaccgaggaggccttcgccgccctgatctgcatcatcttcatctacgaggccctggagaagctgttcgacctgggcgagacctacgccttcaacatgcacaacaacctggacaagctgaccagctacagctgcgtgtgcaccgagccccccaaccccagcaacgagaccctggcccagtggaagaaggacaacatcaccgcccacaacatcagctggagaaacctgaccgtgagcgagtgcaagaagctgagaggcgtgttcctgggcagcgcctgcggccaccacggcccctacatccccgacgtgctgttctggtgcgtgatcctgttcttcaccaccttcttcctgagcagcttcctgaagcagttcaagaccaagagatacttccccaccaaggtgagaagcaccatcagcgacttcgccgtgttcctgaccatcgtgatcatggtgaccatcgactacctggtgggcgtgcccagccccaagctgcacgtgcccgagaagttcgagcccacccaccccgagagaggctggatcatcagccccctgggcgacaacccctggtggaccctgctgatcgccgccatccccgccctgctgtgcaccatcctgatcttcatggaccagcagatcaccgccgtgatcatcaacagaaaggagcacaagctgaagaagggcgccggctaccacctggacctgctgatggtgggcgtgatgctgggcgtgtgcagcgtgatgggcctgccctggttcgtggccgccaccgtgctgagcatcagccacgtgaacagcctgaaggtggagagcgagtgcagcgcccccggcgagcagcccaagttcctgggcatcagagagcagagagtgaccggcctgatgatcttcatcctgatgggcctgagcgtgttcatgaccagcgtgctgaagttcatccccatgcccgtgctgtacggcgtgttcctgtacatgggcgtgagcagcctgaagggcatccagctgttcgacagaatcaagctgttcggcatgcccgccaagcaccagcccgacctgatctacctgagatacgtgcccctgtggaaggtgcacatcttcaccgtgatccagctgacctgcctggtgctgctgtgggtgatcaaggtgagcgccgccgccgtggtgttccccatgatggtgctggccctggtgttcgtgagaaagctgatggacctgtgcttcaccaagagagagctgagctggctggacgacctgatgcccgagagcaagaagaagaaggaggacgacaagaagaagaaggagaaggaggaggccgagagaatgctgcaggacgacgacgacaccgtgcacctgcccttcgagggcggcagcctgctgcagatccccgtgaaggccctgaagtacagcgtggaccccagcatcgtgaacatcagcgacgagatggccaagaccgcccagtggaaggccctgagcatgaacaccgagaacgccaaggtgaccagaagcaacatgagccccgacaagcccgtgagcgtgaagatcagcttcgaggacgagcccagaaagaagtacgtggacgccgagaccagcctgtag

SEQ ID NO: 100020 - DNA, 1725 bp, synthetic construct
  misc_feature 1..1725: note = Description of Artificial Sequence: Synthetic coding sequence
  source 1..1725: mol_type = other DNA
atggaggccgacggcgccggcgagcagatgagacccctgctgaccagaggccccgacgaggaggccgtggtggacctgggcaagaccagcagcaccgtgaacaccaagttcgagaaggaggagctggagagccacagagccgtgtacatcggcgtgcacgtgcccttcagcaaggagagcagaagaagacacagacacagaggccacaagcaccaccacagaagaagaaaggacaaggagagcgacaaggaggacggcagagagagccccagctacgacacccccagccagagagtgcagttcatcctgggcaccgaggacgacgacgaggagcacatcccccacgacctgttcaccgagatggacgagctgtgctacagagacggcgaggagtacgagtggaaggagaccgccagatggctgaagttcgaggaggacgtggaggacggcggcgacagatggagcaagccctacgtggccaccctgagcctgcacagcctgttcgagctgagaagctgcatcctgaacggcaccgtgatgctggacatgagagccagcaccctggacgagatcgccgacatggtgctggacaacatgatcgccagcggccagctggacgagagcatcagagagaacgtgagagaggccctgctgaagagacaccaccaccagaacgagaagagattcaccagcagaatccccctggtgagaagcttcgccgacatcggcgagggcctgagcgccagcagacacagcctgagaaccggcctgagcgccagcaacctgagcctgagaggcgagagccccctgagcctgctgctgggccacctgctgcccagcagcagagccggcacccccgccggcagcagatgcaccacccccgtgcccaccccccagaacagcccccccagcagccccagcatcagcagactgaccagcagaagcagccaggagagccagagacaggcccccgagctgctggtgagccccgccagcgacgacatccccaccgtggtgatccacccccccgaggaggacctggaggccgccctgaagggcgaggagcagaagaacgaggagaacgtggacctgacccccggcatcctggccagcccccagagcgcccccggcaacctggacaacagcaagagcggcgagatcaagggcaacggcagcggcggcagcagagagaacagcaccgtggacttcagcaaggtggacatgaacttcatgagaaagatccccaccggcgccgaggccagcaacgtgctggtgggcgaggtggacttcctggagagacccatcatcgccttcgtgagactggcccccgccgtgctgctgaccggcctgaccgaggtgcccgtgcccaccagattcctgttcctgctgctgggccccgccggcaaggccccccagtaccacgagatcggcagaagcatcgccaccctgatgaccgacgagatcttccacgacgtggcctacaaggccaaggacagaaacgacctgctgagcggcatcgacgagttcctggaccaggtgaccgtgctgccccccggcgagtgggaccccagcatcagaatcgagccccccaagagcgtgcccagccaggagaagagaaagatccccgtgttccacaacggcagcacccccaccctgggcgagacccccaaggaggccgcccaccacgccggccccgagctgcagagaaccggcagagtgcagtag

SEQ ID NO: 100021 - DNA, 3273 bp, synthetic construct
  misc_feature 1..3273: note = Description of Artificial Sequence: Synthetic coding sequence
  source 1..3273: mol_type = other DNA
atggagagattcagactggagaagaagctgcccggccccgacgaggaggccgtggtggacctgggcaagaccagcagcaccgtgaacaccaagttcgagaaggaggagctggagagccacagagccgtgtacatcggcgtgcacgtgcccttcagcaaggagagcagaagaagacacagacacagaggccacaagcaccaccacagaagaagaaaggacaaggagagcgacaaggaggacggcagagagagccccagctacgacacccccagccagagagtgcagttcatcctgggcaccgaggacgacgacgaggagcacatcccccacgacctgttcaccgagatggacgagctgtgctacagagacggcgaggagtacgagtggaaggagaccgccagatggctgaagttcgaggaggacgtggaggacggcggcgacagatggagcaagccctacgtggccaccctgagcctgcacagcctgttcgagctgagaagctgcatcctgaacggcaccgtgatgctggacatgagagccagcaccctggacgagatcgccgacatggtgctggacaacatgatcgccagcggccagctggacgagagcatcagagagaacgtgagagaggccctgctgaagagacaccaccaccagaacgagaagagattcaccagcagaatccccctggtgagaagcttcgccgacatcggcaagaagcacagcgacccccacctgctggagagaaacggcatcctggccagcccccagagcgcccccggcaacctggacaacagcaagagcggcgagatcaagggcaacggcagcggcggcagcagagagaacagcaccgtggacttcagcaaggtggacatgaacttcatgagaaagatccccaccggcgccgaggccagcaacgtgctggtgggcgaggtggacttcctggagagacccatcatcgccttcgtgagactggcccccgccgtgctgctgaccggcctgaccgaggtgcccgtgcccaccagattcctgttcctgctgctgggccccgccggcaaggccccccagtaccacgagatcggcagaagcatcgccaccctgatgaccgacgagatcttccacgacgtggcctacaaggccaaggacagaaacgacctgctgagcggcatcgacgagttcctggaccaggtgaccgtgctgccccccggcgagtgggaccccagcatcagaatcgagccccccaagagcgtgcccagccaggagaagagaaagatccccgtgttccacaacggcagcacccccaccctgggcgagacccccaaggaggccgcccaccacgccggccccgagctgcagagaaccggcagactgttcggcggcctgatcctggacatcaagagaaaggcccccttcttcctgagcgacttcaaggacgccctgagcctgcagtgcctggccagcatcctgttcctgtactgcgcctgcatgagccccgtgatcaccttcggcggcctgctgggcgaggccaccgagggcagaatcagcgccatcgagagcctgttcggcgccagcctgaccggcatcgcctacagcctgttcgccggccagcccctgaccatcctgggcagcaccggccccgtgctggtgttcgagaagatcctgtacaagttctgcagagactaccagctgagctacctgagcctgagaaccagcatcggcctgtggaccagcttcctgtgcatcgtgctggtggccaccgacgccagcagcctggtgtgctacatcaccagattcaccgaggaggccttcgccgccctgatctgcatcatcttcatctacgaggccctggagaagctgttcgacctgggcgagacctacgccttcaacatgcacaacaacctggacaagctgaccagctacagctgcgtgtgcaccgagccccccaaccccagcaacgagaccctggcccagtggaagaaggacaacatcaccgcccacaacatcagctggagaaacctgaccgtgagcgagtgcaagaagctgagaggcgtgttcctgggcagcgcctgcggccaccacggcccctacatccccgacgtgctgttctggtgcgtgatcctgttcttcaccaccttcttcctgagcagcttcctgaagcagttcaagaccaagagatacttccccaccaaggtgagaagcaccatcagcgacttcgccgtgttcctgaccatcgtgatcatggtgaccatcgactacctggtgggcgtgcccagccccaagctgcacgtgcccgagaagttcgagcccacccaccccgagagaggctggatcatcagccccctgggcgacaacccctggtggaccctgctgatcgccgccatccccgccctgctgtgcaccatcctgatcttcatggaccagcagatcaccgccgtgatcatcaacagaaaggagcacaagctgaagaagggcgccggctaccacctggacctgctgatggtgggcgtgatgctgggcgtgtgcagcgtgatgggcctgccctggttcgtggccgccaccgtgctgagcatcagccacgtgaacagcctgaaggtggagagcgagtgcagcgcccccggcgagcagcccaagttcctgggcatcagagagcagagagtgaccggcctgatgatcttcatcctgatgggcctgagcgtgttcatgaccagcgtgctgaagttcatccccatgcccgtgctgtacggcgtgttcctgtacatgggcgtgagcagcctgaagggcatccagctgttcgacagaatcaagctgttcggcatgcccgccaagcaccagcccgacctgatctacctgagatacgtgcccctgtggaaggtgcacatcttcaccgtgatccagctgacctgcctggtgctgctgtgggtgatcaaggtgagcgccgccgccgtggtgttccccatgatggtgctggccctggtgttcgtgagaaagctgatggacctgtgcttcaccaagagagagctgagctggctggacgacctgatgcccgagagcaagaagaagaaggaggacgacaagaagaagaaggagaaggaggaggccgagagaatgctgcaggacgacgacgacaccgtgcacctgcccttcgagggcggcagcctgctgcagatccccgtgaaggccctgaagtacagccccgacaagcccgtgagcgtgaagatcagcttcgaggacgagcccagaaagaagtacgtggacgccgagaccagcctgtag

SEQ ID NO: 100022 - DNA, 3408 bp, synthetic construct
  misc_feature 1..3408: note = Description of Artificial Sequence: Synthetic coding sequence
  source 1..3408: mol_type = other DNA
atggaggccgacggcgccggcgagcagatgagacccctgctgaccagagtgaccagcagaggccccgacgaggaggccgtggtggacctgggcaagaccagcagcaccgtgaacaccaagttcgagaaggaggagctggagagccacagagccgtgtacatcggcgtgcacgtgcccttcagcaaggagagcagaagaagacacagacacagaggccacaagcaccaccacagaagaagaaaggacaaggagagcgacaaggaggacggcagagagagccccagctacgacacccccagccagagagtgcagttcatcctgggcaccgaggacgacgacgaggagcacatcccccacgacctgttcaccgagatggacgagctgtgctacagagacggcgaggagtacgagtggaaggagaccgccagatggctgaagttcgaggaggacgtggaggacggcggcgacagatggagcaagccctacgtggccaccctgagcctgcacagcctgttcgagctgagaagctgcatcctgaacggcaccgtgatgctggacatgagagccagcaccctggacgagatcgccgacatggtgctggacaacatgatcgccagcggccagctggacgagagcatcagagagaacgtgagagaggccctgctgaagagacaccaccaccagaacgagaagagattcaccagcagaatccccctggtgagaagcttcgccgacatcggcaagaagcacagcgacccccacctgctggagagaaacggcatcctggccagcccccagagcgcccccggcaacctggacaacagcaagagcggcgagatcaagggcaacggcagcggcggcagcagagagaacagcaccgtggacttcagcaaggtggacatgaacttcatgagaaagatccccaccggcgccgaggccagcaacgtgctggtgggcgaggtggacttcctggagagacccatcatcgccttcgtgagactggcccccgccgtgctgctgaccggcctgaccgaggtgcccgtgcccaccagattcctgttcctgctgctgggccccgccggcaaggccccccagtaccacgagatcggcagaagcatcgccaccctgatgaccgacgagatcttccacgacgtggcctacaaggccaaggacagaaacgacctgctgagcggcatcgacgagttcctggaccaggtgaccgtgctgccccccggcgagtgggaccccagcatcagaatcgagccccccaagagcgtgcccagccaggagaagagaaagatccccgtgttccacaacggcagcacccccaccctgggcgagacccccaaggaggccgcccaccacgccggccccgagctgcagagaaccggcagactgttcggcggcctgatcctggacatcaagagaaaggcccccttcttcctgagcgacttcaaggacgccctgagcctgcagtgcctggccagcatcctgttcctgtactgcgcctgcatgagccccgtgatcaccttcggcggcctgctgggcgaggccaccgagggcagaatcagcgccatcgagagcctgttcggcgccagcctgaccggcatcgcctacagcctgttcgccggccagcccctgaccatcctgggcagcaccggccccgtgctggtgttcgagaagatcctgtacaagttctgcagagactaccagctgagctacctgagcctgagaaccagcatcggcctgtggaccagcttcctgtgcatcgtgctggtggccaccgacgccagcagcctggtgtgctacatcaccagattcaccgaggaggccttcgccgccctgatctgcatcatcttcatctacgaggccctggagaagctgttcgacctgggcgagacctacgccttcaacatgcacaacaacctggacaagctgaccagctacagctgcgtgtgcaccgagccccccaaccccagcaacgagaccctggcccagtggaagaaggacaacatcaccgcccacaacatcagctggagaaacctgaccgtgagcgagtgcaagaagctgagaggcgtgttcctgggcagcgcctgcggccaccacggcccctacatccccgacgtgctgttctggtgcgtgatcctgttcttcaccaccttcttcctgagcagcttcctgaagcagttcaagaccaagagatacttccccaccaaggtgagaagcaccatcagcgacttcgccgtgttcctgaccatcgtgatcatggtgaccatcgactacctggtgggcgtgcccagccccaagctgcacgtgcccgagaagttcgagcccacccaccccgagagaggctggatcatcagccccctgggcgacaacccctggtggaccctgctgatcgccgccatccccgccctgctgtgcaccatcctgatcttcatggaccagcagatcaccgccgtgatcatcaacagaaaggagcacaagctgaagaagggcgccggctaccacctggacctgctgatggtgggcgtgatgctgggcgtgtgcagcgtgatgggcctgccctggttcgtggccgccaccgtgctgagcatcagccacgtgaacagcctgaaggtggagagcgagtgcagcgcccccggcgagcagcccaagttcctgggcatcagagagcagagagtgaccggcctgatgatcttcatcctgatgggcctgagcgtgttcatgaccagcgtgctgaagttcatccccatgcccgtgctgtacggcgtgttcctgtacatgggcgtgagcagcctgaagggcatccagctgttcgacagaatcaagctgttcggcatgcccgccaagcaccagcccgacctgatctacctgagatacgtgcccctgtggaaggtgcacatcttcaccgtgatccagctgacctgcctggtgctgctgtgggtgatcaaggtgagcgccgccgccgtggtgttccccatgatggtgctggccctggtgttcgtgagaaagctgatggacctgtgcttcaccaagagagagctgagctggctggacgacctgatgcccgagagcaagaagaagaaggaggacgacaagaagaagaaggagaaggaggaggccgagagaatgctgcaggacgacgacgacaccgtgcacctgcccttcgagggcggcagcctgctgcagatccccgtgaaggccctgaagtacagcgtggaccccagcatcgtgaacatcagcgacgagatggccaagaccgcccagtggaaggccctgagcatgaacaccgagaacgccaaggtgaccagaagcaacatgagccccgacaagcccgtgagcgtgaagatcagcttcgaggacgagcccagaaagaagtacgtggacgccgagaccagcctgtag

SEQ ID NO: 100023 - DNA, 3288 bp, synthetic construct
  misc_feature 1..3288: note = Description of Artificial Sequence: Synthetic coding sequence
  source 1..3288: mol_type = other DNA
atggaggccgacggcgccggcgagcagatgagacccctgctgaccagaggccccgacgaggaggccgtggtggacctgggcaagaccagcagcaccgtgaacaccaagttcgagaaggaggagctggagagccacagagccgtgtacatcggcgtgcacgtgcccttcagcaaggagagcagaagaagacacagacacagaggccacaagcaccaccacagaagaagaaaggacaaggagagcgacaaggaggacggcagagagagccccagctacgacacccccagccagagagtgcagttcatcctgggcaccgaggacgacgacgaggagcacatcccccacgacctgttcaccgagatggacgagctgtgctacagagacggcgaggagtacgagtggaaggagaccgccagatggctgaagttcgaggaggacgtggaggacggcggcgacagatggagcaagccctacgtggccaccctgagcctgcacagcctgttcgagctgagaagctgcatcctgaacggcaccgtgatgctggacatgagagccagcaccctggacgagatcgccgacatggtgctggacaacatgatcgccagcggccagctggacgagagcatcagagagaacgtgagagaggccctgctgaagagacaccaccaccagaacgagaagagattcaccagcagaatccccctggtgagaagcttcgccgacatcggcaagaagcacagcgacccccacctgctggagagaaacggcatcctggccagcccccagagcgcccccggcaacctggacaacagcaagagcggcgagatcaagggcaacggcagcggcggcagcagagagaacagcaccgtggacttcagcaaggtggacatgaacttcatgagaaagatccccaccggcgccgaggccagcaacgtgctggtgggcgaggtggacttcctggagagacccatcatcgccttcgtgagactggcccccgccgtgctgctgaccggcctgaccgaggtgcccgtgcccaccagattcctgttcctgctgctgggccccgccggcaaggccccccagtaccacgagatcggcagaagcatcgccaccctgatgaccgacgagatcttccacgacgtggcctacaaggccaaggacagaaacgacctgctgagcggcatcgacgagttcctggaccaggtgaccgtgctgccccccggcgagtgggaccccagcatcagaatcgagccccccaagagcgtgcccagccaggagaagagaaagatccccgtgttccacaacggcagcacccccaccctgggcgagacccccaaggaggccgcccaccacgccggccccgagctgcagagaaccggcagactgttcggcggcctgatcctggacatcaagagaaaggcccccttcttcctgagcgacttcaaggacgccctgagcctgcagtgcctggccagcatcctgttcctgtactgcgcctgcatgagccccgtgatcaccttcggcggcctgctgggcgaggccaccgagggcagaatcagcgccatcgagagcctgttcggcgccagcctgaccggcatcgcctacagcctgttcgccggccagcccctgaccatcctgggcagcaccggccccgtgctggtgttcgagaagatcctgtacaagttctgcagagactaccagctgagctacctgagcctgagaaccagcatcggcctgtggaccagcttcctgtgcatcgtgctggtggccaccgacgccagcagcctggtgtgctacatcaccagattcaccgaggaggccttcgccgccctgatctgcatcatcttcatctacgaggccctggagaagctgttcgacctgggcgagacctacgccttcaacatgcacaacaacctggacaagctgaccagctacagctgcgtgtgcaccgagccccccaaccccagcaacgagaccctggcccagtggaagaaggacaacatcaccgcccacaacatcagctggagaaacctgaccgtgagcgagtgcaagaagctgagaggcgtgttcctgggcagcgcctgcggccaccacggcccctacatccccgacgtgctgttctggtgcgtgatcctgttcttcaccaccttcttcctgagcagcttcctgaagcagttcaagaccaagagatacttccccaccaaggtgagaagcaccatcagcgacttcgccgtgttcctgaccatcgtgatcatggtgaccatcgactacctggtgggcgtgcccagccccaagctgcacgtgcccgagaagttcgagcccacccaccccgagagaggctggatcatcagccccctgggcgacaacccctggtggaccctgctgatcgccgccatccccgccctgctgtgcaccatcctgatcttcatggaccagcagatcaccgccgtgatcatcaacagaaaggagcacaagctgaagaagggcgccggctaccacctggacctgctgatggtgggcgtgatgctgggcgtgtgcagcgtgatgggcctgccctggttcgtggccgccaccgtgctgagcatcagccacgtgaacagcctgaaggtggagagcgagtgcagcgcccccggcgagcagcccaagttcctgggcatcagagagcagagagtgaccggcctgatgatcttcatcctgatgggcctgagcgtgttcatgaccagcgtgctgaagttcatccccatgcccgtgctgtacggcgtgttcctgtacatgggcgtgagcagcctgaagggcatccagctgttcgacagaatcaagctgttcggcatgcccgccaagcaccagcccgacctgatctacctgagatacgtgcccctgtggaaggtgcacatcttcaccgtgatccagctgacctgcctggtgctgctgtgggtgatcaaggtgagcgccgccgccgtggtgttccccatgatggtgctggccctggtgttcgtgagaaagctgatggacctgtgcttcaccaagagagagctgagctggctggacgacctgatgcccgagagcaagaagaagaaggaggacgacaagaagaagaaggagaaggaggaggccgagagaatgctgcaggacgacgacgacaccgtgcacctgcccttcgagggcggcagcctgctgcagatccccgtgaaggccctgaagtacagccccgacaagcccgtgagcgtgaagatcagcttcgaggacgagcccagaaagaagtacgtggacgccgagaccagcctgtag

SEQ ID NO: 100024 - DNA, 1392 bp, synthetic construct
  misc_feature 1..1392: note = Description of Artificial Sequence: Synthetic coding sequence
  source 1..1392: mol_type = other DNA
atggaggccgacggcgccggcgagcagatgagacccctgctgaccagaggccccgacgaggaggccgtggtggacctgggcaagaccagcagcaccgtgaacaccaagttcgagaaggaggagctggagagccacagagccgtgtacatcggcgtgcacgtgcccttcagcaaggagagcagaagaagacacagacacagaggccacaagcaccaccacagaagaagaaaggacaaggagagcgacaaggaggacggcagagagagccccagctacgacacccccagccagagagtgcagttcatcctgggcaccgaggacgacgacgaggagcacatcccccacgacctgttcaccgagatggacgagctgtgctacagagacggcgaggagtacgagtggaaggagaccgccagatggctgaagttcgaggaggacgtggaggacggcggcgacagatggagcaagccctacgtggccaccctgagcctgcacagcctgttcgagctgagaagctgcatcctgaacggcaccgtgatgctggacatgagagccagcaccctggacgagatcgccgacatggtgctggacaacatgatcgccagcggccagctggacgagagcatcagagagaacgtgagagaggccctgctgaagagacaccaccaccagaacgagaagagattcaccagcagaatccccctggtgagaagcttcgccgacatcggcaagaagcacagcgacccccacctgctggagagaaacggcatcctggccagcccccagagcgcccccggcaacctggacaacagcaagagcggcgagatcaagggcaacggcagcggcggcagcagagagaacagcaccgtggacttcagcaaggtggacatgaacttcatgagaaagatccccaccggcgccgaggccagcaacgtgctggtgggcgaggtggacttcctggagagacccatcatcgccttcgtgagactggcccccgccgtgctgctgaccggcctgaccgaggtgcccgtgcccaccagattcctgttcctgctgctgggccccgccggcaaggccccccagtaccacgagatcggcagaagcatcgccaccctgatgaccgacgagatcttccacgacgtggcctacaaggccaaggacagaaacgacctgctgagcggcatcgacgagttcctggaccaggtgaccgtgctgccccccggcgagtgggaccccagcatcagaatcgagccccccaagagcgtgcccagccaggagaagagaaagatccccgtgttccacaacggcagcacccccaccctgggcgagacccccaaggaggccgcccaccacgccggccccgagctgcagagaaccggcagagtgcagtag

SEQ ID NO: 100025 - DNA, 1725 bp, synthetic construct; identical to SEQ ID NO: 100020
  misc_feature 1..1725: note = Description of Artificial Sequence: Synthetic coding sequence
  source 1..1725: mol_type = other DNA

SEQ ID NO: 100026 - DNA, 3741 bp, synthetic construct
  misc_feature 1..3741: note = Description of Artificial Sequence: Synthetic coding sequence
  source 1..3741: mol_type = other DNA
atggaggccgacggcgccggcgagcagatgagacccctgctgaccagagtgaccagcagaggccccgacgaggaggccgtggtggacctgggcaagaccagcagcaccgtgaacaccaagttcgagaaggaggagctggagagccacagagccgtgtacatcggcgtgcacgtgcccttcagcaaggagagcagaagaagacacagacacagaggccacaagcaccaccacagaagaagaaaggacaaggagagcgacaaggaggacggcagagagagccccagctacgacacccccagccagagagtgcagttcatcctgggcaccgaggacgacgacgaggagcacatcccccacgacctgttcaccgagatggacgagctgtgctacagagacggcgaggagtacgagtggaaggagaccgccagatggctgaagttcgaggaggacgtggaggacggcggcgacagatggagcaagccctacgtggccaccctgagcctgcacagcctgttcgagctgagaagctgcatcctgaacggcaccgtgatgctggacatgagagccagcaccctggacgagatcgccgacatggtgctggacaacatgatcgccagcggccagctggacgagagcatcagagagaacgtgagagaggccctgctgaagagacaccaccaccagaacgagaagagattcaccagcagaatccccctggtgagaagcttcgccgacatcggcgagggcctgagcgccagcagacacagcctgagaaccggcctgagcgccagcaacctgagcctgagaggcgagagccccctgagcctgctgctgggccacctgctgcccagcagcagagccggcacccccgccggcagcagatgcaccacccccgtgcccaccccccagaacagcccccccagcagccccagcatcagcagactgaccagcagaagcagccaggagagccagagacaggcccccgagctgctggtgagccccgccagcgacgacatccccaccgtggtgatccacccccccgaggaggacctggaggccgccctgaagggcgaggagcagaagaacgaggagaacgtggacctgacccccggcatcctggccagcccccagagcgcccccggcaacctggacaacagcaagagcggcgagatcaagggcaacggcagcggcggcagcagagagaacagcaccgtggacttcagcaaggtggacatgaacttcatgagaaagatccccaccggcgccgaggccagcaacgtgctggtgggcgaggtggacttcctggagagacccatcatcgccttcgtgagactggcccccgccgtgctgctgaccggcctgaccgaggtgcccgtgcccaccagattcctgttcctgctgctgggccccgccggcaaggccccccagtaccacgagatcggcagaagcatcgccaccctgatgaccgacgagatcttccacgacgtggcctacaaggccaaggacagaaacgacctgctgagcggcatcgacgagttcctggaccaggtgaccgtgctgccccccggcgagtgggaccccagcatcagaatcgagccccccaagagcgtgcccagccaggagaagagaaagatccccgtgttccacaacggcagcacccccaccctgggcgagacccccaaggaggccgcccaccacgccggccccgagctgcagagaaccggcagactgttcggcggcctgatcctggacatcaagagaaaggcccccttcttcctgagcgacttcaaggacgccctgagcctgcagtgcctggccagcatcctgttcctgtactgcgcctgcatgagccccgtgatcaccttcggcggcctgctgggcgaggccaccgagggcagaatcagcgccatcgagagcctgttcggcgccagcctgaccggcatcgcctacagcctgttcgccggccagcccctgaccatcctgggcagcaccggccccgtgctggtgttcgagaagatcctgtacaagttctgcagagactaccagctgagctacctgagcctgagaaccagcatcggcctgtggaccagcttcctgtgcatcgtgctggtggccaccgacgccagcagcctggtgtgctacatcaccagattcaccgaggaggccttcgccgccctgatctgcatcatcttcatctacgaggccctggagaagctgttcgacctgggcgagacctacgccttcaacatgcacaacaacctggacaagctgaccagctacagctgcgtgtgcaccgagccccccaaccccagcaacgagaccctggcccagtggaagaaggacaacatcaccgcccacaacatcagctggagaaacctgaccgtgagcgagtgcaagaagctgagaggcgtgttcctgggcagcgcctgcggccaccacggcccctacatccccgacgtgctgttctggtgcgtgatcctgttcttcaccaccttcttcctgagcagcttcctgaagcagttcaagaccaagagatacttccccaccaaggtgagaagcaccatcagcgacttcgccgtgttcctgaccatcgtgatcatggtgaccatcgactacctggtgggcgtgcccagccccaagctgcacgtgcccgagaagttcgagcccacccaccccgagagaggctggatcatcagccccctgggcgacaacccctggtggaccctgctgatcgccgccatccccgccctgctgtgcaccatcctgatcttcatggaccagcagatcaccgccgtgatcatcaacagaaaggagcacaagctgaagaagggcgccggctaccacctggacctgctgatggtgggcgtgatgctgggcgtgtgcagcgtgatgggcctgccctggttcgtggccgccaccgtgctgagcatcagccacgtgaacagcctgaaggtggagagcgagtgcagcgcccccggcgagcagcccaagttcctgggcatcagagagcagagagtgaccggcctgatgatcttcatcctgatgggcctgagcgtgttcatgaccagcgtgctgaagttcatccccatgcccgtgctgtacggcgtgttcctgtacatgggcgtgagcagcctgaagggcatccagctgttcgacagaatcaagctgttcggcatgcccgccaagcaccagcccgacctgatctacctgagatacgtgcccctgtggaaggtgcacatcttcaccgtgatccagctgacctgcctggtgctgctgtgggtgatcaaggtgagcgccgccgccgtggtgttccccatgatggtgctggccctggtgttcgtgagaaagctgatggacctgtgcttcaccaagagagagctgagctggctggacgacctgatgcccgagagcaagaagaagaaggaggacgacaagaagaagaaggagaaggaggaggccgagagaatgctgcaggacgacgacgacaccgtgcacctgcccttcgagggcggcagcctgctgcagatccccgtgaaggccctgaagtacagcgtggaccccagcatcgtgaacatcagcgacgagatggccaagaccgcccagtggaaggccctgagcatgaacaccgagaacgccaaggtgaccagaagcaacatgagccccgacaagcccgtgagcgtgaagatcagcttcgaggacgagcccagaaagaagtacgtggacgccgagaccagcctgtag

SEQ ID NO: 100027 - DNA, 3780 bp, synthetic construct
  misc_feature 1..3780: note = Description of Artificial Sequence: Synthetic coding sequence
  source 1..3780: mol_type = other DNA
atggaggccgacggcgccggcgagcagatgagacccctgctgaccagagtgaccagcagaggccccgacgaggaggccgtggtggacctgggcaagaccagcagcaccgtgaacaccaagttcgagaaggaggagctggagagccacagagccgtgtacatcggcgtgcacgtgcccttcagcaaggagagcagaagaagacacagacacagaggccacaagcaccaccacagaagaagaaaggacaaggagagcgacaaggaggacggcagagagagccccagctacgacacccccagccagagagtgcagttcatcctgggcaccgaggacgacgacgaggagcacatcccccacgacctgttcaccgagatggacgagctgtgctacagagacggcgaggagtacgagtggaaggagaccgccagatggctgaagttcgaggaggacgtggaggacggcggcgacagatggagcaagccctacgtggccaccctgagcctgcacagcctgttcgagctgagaagctgcatcctgaacggcaccgtgatgctggacatgagagccagcaccctggacgagatcgccgacatggtgctggacaacatgatcgccagcggccagctggacgagagcatcagagagaacgtgagagaggccctgctgaagagacaccaccaccagaacgagaagagattcaccagcagaatccccctggtgagaagcttcgccgacatcggcaagaagcacagcgacccccacctgctggagagaaacggcgagggcctgagcgccagcagacacagcctgagaaccggcctgagcgccagcaacctgagcctgagaggcgagagccccctgagcctgctgctgggccacctgctgcccagcagcagagccggcacccccgccggcagcagatgcaccacccccgtgcccaccccccagaacagcccccccagcagccccagcatcagcagactgaccagcagaagcagccaggagagccagagacaggcccccgagctgctggtgagccccgccagcgacgacatccccaccgtggtgatccacccccccgaggaggacctggaggccgccctgaagggcgaggagcagaagaacgaggagaacgtggacctgacccccggcatcctggccagcccccagagcgcccccggcaacctggacaacagcaagagcggcgagatcaagggcaacggcagcggcggcagcagagagaacagcaccgtggacttcagcaaggtggacatgaacttcatgagaaagatccccaccggcgccgaggccagcaacgtgctggtgggcgaggtggacttcctggagagacccatcatcgccttcgtgagactggcccccgccgtgctgctgaccggcctgaccgaggtgcccgtgcccaccagattcctgttcctgctgctgggccccgccggcaaggccccccagtaccacgagatcggcagaagcatcgccaccctgatgaccgacgagatcttccacgacgtggcctacaaggccaaggacagaaacgacctgctgagcggcatcgacgagttcctggaccaggtgaccgtgctgccccccggcgagtgggaccccagcatcagaatcgagccccccaagagcgtgcccagccaggagaagagaaagatccccgtgttccacaacggcagcacccccaccctgggcgagacccccaaggaggccgcccaccacgccggccccgagctgcagagaaccggcagactgttcggcggcctgatcctggacatcaagagaaaggcccccttcttcctgagcgacttcaaggacgccctgagcctgcagtgcctggccagcatcctgttcctgtactgcgcctgcatgagccccgtgatcaccttcggcggcctgctgggcgaggccaccgagggcagaatcagcgccatcgagagcctgttcggcgccagcctgaccggcatcgcctacagcctgttcgccggccagcccctgaccatcctgggcagcaccggccccgtgctggtgttcgagaagatcctgtacaagttctgcagagactaccagctgagctacctgagcctgagaaccagcatcggcctgtggaccagcttcctgtgcatcgtgctggtggccaccgacgccagcagcctggtgtgctacatcaccagattcaccgaggaggccttcgccgccctgatctgcatcatcttcatctacgaggccctggagaagctgttcgacctgggcgagacctacgccttcaacatgcacaacaacctggacaagctgaccagctacagctgcgtgtgcaccgagccccccaaccccagcaacgagaccctggcccagtggaagaaggacaacatcaccgcccacaacatcagctggagaaacctgaccgtgagcgagtgcaagaagctgagaggcgtgttcctgggcagcgcctgcggccaccacggcccctacatccccgacgtgctgttctggtgcgtgatcctgttcttcaccaccttcttcctgagcagcttcctgaagcagttcaagaccaagagatacttccccaccaaggtgagaagcaccatcagcgacttcgccgtgttcctgaccatcgtgatcatggtgaccatcgactacctggtgggcgtgcccagccccaagctgcacgtgcccgagaagttcgagcccacccaccccgagagaggctggatcatcagccccctgggcgacaacccctggtggaccctgctgatcgccgccatccccgccctgctgtgcaccatcctgatcttcatggaccagcagatcaccgccgtgatcatcaacagaaaggagcacaagctgaagaagggcgccggctaccacctggacctgctgatggtgggcgtgatgctgggcgtgtgcagcgtgatgggcctgccctggttcgtggccgccaccgtgctgagcatcagccacgtgaacagcctgaaggtggagagcgagtgcagcgcccccggcgagcagcccaagttcctgggcatcagagagcagagagtgaccggcctgatgatcttcatcctgatgggcctgagcgtgttcatgaccagcgtgctgaagttcatccccatgcccgtgctgtacggcgtgttcctgtacatgggcgtgagcagcctgaagggcatccagctgttcgacagaatcaagctgttcggcatgcccgccaagcaccagcccgacctgatctacctgagatacgtgcccctgtggaaggtgcacatcttcaccgtgatccagctgacctgcctggtgctgctgtgggtgatcaaggtgagcgccgccgccgtggtgttccccatgatggtgctggccctggtgttcgtgagaaagctgatggacctgtgcttcaccaagagagagctgagctggctggacgacctgatgcccgagagcaagaagaagaaggaggacgacaagaagaagaaggagaaggaggaggccgagagaatgctgcaggacgacgacgacaccgtgcacctgcccttcgagggcggcagcctgctgcagatccccgtgaaggccctgaagtacagcgtggaccccagcatcgtgaacatcagcgacgagatggccaagaccgcccagtggaaggccctgagcatgaacaccgagaacgccaaggtgaccagaagcaacatgagccccgacaagcccgtgagcgtgaagatcagcttcgaggacgagcccagaaagaagtacgtggacgccgagaccagcctgtag

SEQ ID NO: 100028 - DNA, 3396 bp, synthetic construct
  misc_feature 1..3396: note = Description of Artificial Sequence: Synthetic coding sequence
  source 1..3396: mol_type = other DNA
atggaggccgacggcgccggcgagcagatgagacccctgctgaccagaggccccgacgaggaggccgtggtggacctgggcaagaccagcagcaccgtgaacaccaagttcgagaaggaggagctggagagccacagagccgtgtacatcggcgtgcacgtgcccttcagcaaggagagcagaagaagacacagacacagaggccacaagcaccaccacagaagaagaaaggacaaggagagcgacaaggaggacggcagagagagccccagctacgacacccccagccagagagtgcagttcatcctgggcaccgaggacgacgacgaggagcacatcccccacgacctgttcaccgagatggacgagctgtgctacagagacggcgaggagtacgagtggaaggagaccgccagatggctgaagttcgaggaggacgtggaggacggcggcgacagatggagcaagccctacgtggccaccctgagcctgcacagcctgttcgagctgagaagctgcatcctgaacggcaccgtgatgctggacatgagagccagcaccctggacgagatcgccgacatggtgctggacaacatgatcgccagcggccagctggacgagagcatcagagagaacgtgagagaggccctgctgaagagacaccaccaccagaacgagaagagattcaccagcagaatccccctggtgagaagcttcgccgacatcggcaagaagcacagcgacccccacctgctggagagaaacggcatcctggccagcccccagagcgcccccggcaacctggacaacagcaagagcggcgagatcaagggcaacggcagcggcggcagcagagagaacagcaccgtggacttcagcaaggtggacatgaacttcatgagaaagatccccaccggcgccgaggccagcaacgtgctggtgggcgaggtggacttcctggagagacccatcatcgccttcgtgagactggcccccgccgtgctgctgaccggcctgaccgaggtgcccgtgcccaccagattcctgttcctgctgctgggccccgccggcaaggccccccagtaccacgagatcggcagaagcatcgccaccctgatgaccgacgagatcttccacgacgtggcctacaaggccaaggacagaaacgacctgctgagcggcatcgacgagttcctggaccaggtgaccgtgctgccccccggcgagtgggaccccagcatcagaatcgagccccccaagagcgtgcccagccaggagaagagaaagatccccgtgttccacaacggcagcacccccaccctgggcgagacccccaaggaggccgcccaccacgccggccccgagctgcagagaaccggcagactgttcggcggcctgatcctggacatcaagagaaaggcccccttcttcctgagcgacttcaaggacgccctgagcctgcagtgcctggccagcatcctgttcctgtactgcgcctgcatgagccccgtgatcaccttcggcggcctgctgggcgaggccaccgagggcagaatcagcgccatcgagagcctgttcggcgccagcctgaccggcatcgcctacagcctgttcgccggccagcccctgaccatcctgggcagcaccggccccgtgctggtgttcgagaagatcctgtacaagttctgcagagactaccagctgagctacctgagcctgagaaccagcatcggcctgtggaccagcttcctgtgcatcgtgctggtggccaccgacgccagcagcctggtgtgctacatcaccagattcaccgaggaggccttcgccgccctgatctgcatcatcttcatctacgaggccctggagaagctgttcgacctgggcgagacctacgccttcaacatgcacaacaacctggacaagctgaccagctacagctgcgtgtgcaccgagccccccaaccccagcaacgagaccctggcccagtggaagaaggacaacatcaccgcccacaacatcagctggagaaacctgaccgtgagcgagtgcaagaagctgagaggcgtgttcctgggcagcgcctgcggccaccacggcccctacatccccgacgtgctgttctggtgcgtgatcctgttcttcaccaccttcttcctgagcagcttcctgaagcagttcaagaccaagagatacttccccaccaaggtgagaagcaccatcagcgacttcgccgtgttcctgaccatcgtgatcatggtgaccatcgactacctggtgggcgtgcccagccccaagctgcacgtgcccgagaagttcgagcccacccaccccgagagaggctggatcatcagccccctgggcgacaacccctggtggaccctgctgatcgccgccatccccgccctgctgtgcaccatcctgatcttcatggaccagcagatcaccgccgtgatcatcaacagaaaggagcacaagctgaagaagggcgccggctaccacctggacctgctgatggtgggcgtgatgctgggcgtgtgcagcgtgatgggcctgccctggttcgtggccgccaccgtgctgagcatcagccacgtgaacagcctgaaggtggagagcgagtgcagcgcccccggcgagcagcccaagttcctgggcatcagagagcagagagtgaccggcctgatgatcttcatcctgatgggcctgagcgtgttcatgaccagcgtgctgaagttcatccccatgcccgtgctgtacggcgtgttcctgtacatgggcgtgagcagcctgaagggcatccagctgttcgacagaatcaagctgttcggcatgcccgccaagcaccagcccgacctgatctacctgagatacgtgcccctgtggaaggtgcacatcttcaccgtgatccagctgacctgcctggtgctgctgtgggtgatcaaggtgagcgccgccgccgtggtgttccccatgatggtgctggccctggtgttcgtgagaaagctgatggacctgtgcttcaccaagagagagctgagctggctggacgacctgatgcccgagagcaagaagaagaaggaggacgacaagaagaagaaggagaaggaggaggccgagagaatgctgcaggacgacgacgacaccgtgcacctgcccttcgagggcggcagcctgctgcagatccccgtgaaggccctgaagtacagcgtggaccccagcatcgtgaacatcagcgacgagatggccaagaccgcccagtggaaggccctgagcatgaacaccgagaacgccaaggtgaccagaagcaacatgagccccgacaagcccgtgagcgtgaagatcagcttcgaggacgagcccagaaagaagtacgtggacgccgagaccagcctgtag

SEQ ID NO: 100029 - DNA, 1392 bp, synthetic construct; identical to SEQ ID NO: 100024
  misc_feature 1..1392: note = Description of Artificial Sequence: Synthetic coding sequence
  source 1..1392: mol_type = other DNA

SEQ ID NO: 100030 - DNA, 3135 bp, synthetic construct; identical to SEQ ID NO: 99992
  misc_feature 1..3135: note = Description of Artificial Sequence: Synthetic coding sequence
  source 1..3135: mol_type = other DNA

SEQ ID NO: 100031 - DNA, 3216 bp, synthetic construct
  misc_feature 1..3216: note = Description of Artificial Sequence: Synthetic coding sequence
  source 1..3216: mol_type = other DNA
atgttcaacaagaacaacagcaacaagctgagaagcacccccagatacagaagaggcgaccccggctacctgaacttcaccgagctgggccccctgaagcccgagcagaaggaccagtggagccagcacagacccgacgaggaggccgtggtggaccagggcggcaccagcaccatcctgaacatccactacgagaaggaggagctggagggccacagaaccctgtacgtgggcgtgagaatgcccctgggcagacagagccacagacaccacagaacccacggccagaagcacagaagaagaggcagaggcaagggcgccagccagggcgaggagggcctggaggccctggcccacgacacccccagccagagagtgcagttcatcctgggcaccgaggaggacgaggagcacgtgccccacgagctgttcaccgagctggacgagatctgcatgaaggagggcgaggacgccgagtggaaggagaccgccagatggctgaagttcgaggaggacgtggaggacggcggcgagagatggagcaagccctacgtggccaccctgagcctgcacagcctgttcgagctgagaagctgcctgatcaacggcaccgtgctgctggacatgcacgccaacagcatcgaggagatcagcgacctgatcctggaccagcaggagctgagcagcgacctgaacgacagcatgagagtgaaggtgagagaggccctgctgaagaagcaccaccaccagaacgagaagaagagaaacaacctgatccccatcgtgagaagcttcgccgaggtgggcaagaagcagagcgacccccacctgatggacaagcacggccagaccgtgagcccccagagcgtgcccaccaccaacctggaggtgaagaacggcgtgaactgcgagcacagccccgtggacctgagcaaggtggacctgcacttcatgaagaagatccccaccggcgccgaggccagcaacgtgctggtgggcgaggtggacatcctggacagacccatcgtggccttcgtgagactgagccccgccgtgctgctgagcggcctgaccgaggtgcccatccccaccagattcctgttcatcctgctgggccccgtgggcaagggccagcagtaccacgagatcggcagaagcatggccaccatcatgaccgacgagatcttccacgacgtggcctacaaggccaaggagagagacgacctgctggccggcatcgacgagttcctggaccaggtgaccgtgctgccccccggcgagtgggaccccagcatcagaatcgagccccccaagaacgtgcccagccaggagaagagaaagatgcccggcgtgcccaacggcaacgtgtgccacatcgagcaggagccccacggcggccacagcggccccgagctgcagagaaccggcagactgttcggcggcctggtgctggacatcaagagaaaggccccctggtactggagcgactacagagacgccctgagcctgcagtgcctggccagcttcctgttcctgtactgcgcctgcatgagccccgtgatcaccttcggcggcctgctgggcgaggccaccgagggcagaatcagcgccatcgagagcctgttcggcgccagcatgaccggcatcgcctacagcctgttcgccggccaggccctgaccatcctgggcagcaccggccccgtgctggtgttcgagaagatcctgttcaagttctgcaaggactacgccctgagctacctgagcctgagagcctgcatcggcctgtggaccgccttcctgtgcatcgtgctggtggccaccgacgccagcagcctggtgtgctacatcaccagattcaccgaggaggccttcgccagcctgatctgcatcatcttcatctacgaggccatcgagaagctgatccacctggccgagacctaccccatccacatgcacagccagctggaccacctgagcctgtactactgcagatgcaccctgcccgagaaccccaacaaccacaccctgcagtactggaaggaccacaacatcgtgaccgccgaggtgcactgggccaacctgaccgtgagcgagtgccaggagatgcacggcgagttcatgggcagcgcctgcggccaccacggcccctacacccccgacgtgctgttctggagctgcatcctgttcttcaccaccttcatcctgagcagcaccctgaagaccttcaagaccagcagatacttccccaccagagtgagaagcatggtgagcgacttcgccgtgttcctgaccatcttcaccatggtgatcatcgacttcctgatcggcgtgcccagccccaagctgcaggtgcccagcgtgttcaagcccaccagagacgacagaggctggatcatcaaccccatcggccccaacccctggtggaccgtgatcgccgccatcatccccgccctgctgtgcaccatcctgatcttcatggaccagcagatcaccgccgtgatcatcaacagaaaggagcacaagctgaagaagggctgcggctaccacctggacctgctgatggtggccatcatgctgggcgtgtgcagcatcatgggcctgccctggttcgtggccgccaccgtgctgagcatcacccacgtgaacagcctgaagctggagagcgagtgcagcgcccccggcgagcagcccaagttcctgggcatcagagagcagagagtgaccggcctgatgatcttcgtgctgatgggctgcagcgtgttcatgaccgccatcctgaagttcatccccatgcccgtgctgtacggcgtgttcctgtacatgggcgtgagcagcctgcagggcatccagttcttcgacagactgaagctgttcggcatgcccgccaagcaccagcccgacttcatctacctgagacacgtgcccctgagaaaggtgcacctgttcaccctgatccagctgacctgcctggtgctgctgtgggtgatcaaggccagccccgccgccatcgtgttccccatgatggtgctggccctggtgttcgtgagaaaggtgatggacctgtgcttcagcaagagagagctgagctggctggacgacctgatgcccgagagcaagaagaagaagctggacgacgccaagaagaaggccaaggaggaggaggtgatcgtgctggcccccaccgtgtacctgggcgccagcaactacagaacctag

SEQ ID NO: 100032 - DNA, 2244 bp, synthetic construct; identical to SEQ ID NO: 99991
  misc_feature 1..2244: note = Description of Artificial Sequence: Synthetic coding sequence
  source 1..2244: mol_type = other DNA

SEQ ID NO: 100033 - DNA, 3282 bp, synthetic construct
  misc_feature 1..3282: note = Description of Artificial Sequence: Synthetic coding sequence
  source 1..3282: mol_type = other DNA
atgcccgccgccggcagcaacgagcccgacggcgtgctgagctaccagagacccgacgaggaggccgtggtggaccagggcggcaccagcaccatcctgaacatccactacgagaaggaggagctggagggccacagaaccctgtacgtgggcgtgagaatgcccctgggcagacagagccacagacaccacagaacccacggccagaagcacagaagaagaggcagaggcaagggcgccagccagggcgaggagggcctggaggccctggcccacgacacccccagccagagagtgcagttcatcctgggcaccgaggaggacgaggagcacgtgccccacgagctgttcaccgagctggacgagatctgcatgaaggagggcgaggacgccgagtggaaggagaccgccagatggctgaagttcgaggaggacgtggaggacggcggcgagagatggagcaagccctacgtggccaccctgagcctgcacagcctgttcgagctgagaagctgcctgatcaacggcaccgtgctgctggacatgcacgccaacagcatcgaggagatcagcgacctgatcctggaccagcaggagctgagcagcgacctgaacgacagcatgagagtgaaggtgagagaggccctgctgaagaagcaccaccaccagaacgagaagaagagaaacaacctgatccccatcgtgagaagcttcgccgaggtgggcaagaagcagagcgacccccacctgatggacaagcacggccagaccgtgagcccccagagcgtgcccaccaccaacctggaggtgaagaacggcgtgaactgcgagcacagccccgtggacctgagcaaggtggacctgcacttcatgaagaagatccccaccggcgccgaggccagcaacgtgctggtgggcgaggtggacatcctggacagacccatcgtggccttcgtgagactgagccccgccgtgctgctgagcggcctgaccgaggtgcccatccccaccagattcctgttcatcctgctgggccccgtgggcaagggccagcagtaccacgagatcggcagaagcatggccaccatcatgaccgacgagatcttccacgacgtggcctacaaggccaaggagagagacgacctgctggccggcatcgacgagttcctggaccaggtgaccgtgctgccccccggcgagtgggaccccagcatcagaatcgagccccccaagaacgtgcccagccaggagaagagaaagatgcccggcgtgcccaacggcaacgtgtgccacatcgagcaggagccccacggcggccacagcggccccgagctgcagagaaccggcagactgttcggcggcctggtgctggacatcaagagaaaggccccctggtactggagcgactacagagacgccctgagcctgcagtgcctggccagcttcctgttcctgtactgcgcctgcatgagccccgtgatcaccttcggcggcctgctgggcgaggccaccgagggcagaatcagcgccatcgagagcctgttcggcgccagcatgaccggcatcgcctacagcctgttcgccggccaggccctgaccatcctgggcagcaccggccccgtgctggtgttcgagaagatcctgttcaagttctgcaaggactacgccctgagctacctgagcctgagagcctgcatcggcctgtggaccgccttcctgtgcatcgtgctggtggccaccgacgccagcagcctggtgtgctacatcaccagattcaccgaggaggccttcgccagcctgatctgcatcatcttcatctacgaggccatcgagaagctgatccacctggccgagacctaccccatccacatgcacagccagctggaccacctgagcctgtactactgcagatgcaccctgcccgagaaccccaacaaccacaccctgcagtactggaaggaccacaacatcgtgaccgccgaggtgcactgggccaacctgaccgtgagcgagtgccaggagatgcacggcgagttcatgggcagcgcctgcggccaccacggcccctacacccccgacgtgctgttctggagctgcatcctgttcttcaccaccttcatcctgagcagcaccctgaagaccttcaagaccagcagatacttccccaccagagtgagaagcatggtgagcgacttcgccgtgttcctgaccatcttcaccatggtgatcatcgacttcctgatcggcgtgcccagccccaagctgcaggtgcccagcgtgttcaagcccaccagagacgacagaggctggatcatcaaccccatcggccccaacccctggtggaccgtgatcgccgccatcatccccgccctgctgtgcaccatcctgatcttcatggaccagcagatcaccgccgtgatcatcaacagaaaggagcacaagctgaagaagggctgcggctaccacctggacctgctgatggtggccatcatgctgggcgtgtgcagcatcatgggcctgccctggttcgtggccgccaccgtgctgagcatcacccacgtgaacagcctgaagctggagagcgagtgcagcgcccccggcgagcagcccaagttcctgggcatcagagagcagagagtgaccggcctgatgatcttcgtgctgatgggctgcagcgtgttcatgaccgccatcctgaagttcatccccatgcccgtgctgtacggcgtgttcctgtacatgggcgtgagcagcctgcagggcatccagttcttcgacagactgaagctgttcggcatgcccgccaagcaccagcccgacttcatctacctgagacacgtgcccctgagaaaggtgcacctgttcaccctgatccagctgacctgcctggtgctgctgtgggtgatcaaggccagccccgccgccatcgtgttccccatgatggtgctggccctggtgttcgtgagaaaggtgatggacctgtgcttcagcaagagagagctgagctggctggacgacctgatgcccgagagcaagaagaagaagctggacgacgccaagaagaaggccaaggaggaggaggaggccgagaagatgctggagatcggcggcgacaagttccccctggagagcagaaagctgctgagcagccccggcaagaacatcagctgcagatgcgaccccagcgagatcaacatcagcgacgagatgcccaagaccaccgtgtggaaggccctgagcatgaacagcggcaacgccaaggagaagagcctgttcaactag

SEQ ID NO: 100034 - DNA, 1917 bp, synthetic construct
  misc_feature 1..1917: note = Description of Artificial Sequence: Synthetic coding sequence
  source 1..1917: mol_type = other DNA
atgcccctgggcagacagagccacagacaccacagaacccacggccagaagcacagaagaagaggcagaggcaagggcgccagccagggcgaggagggcctggaggccctggcccacgacacccccagccagagagtgcagttcatcctgggcaccgaggaggacgaggagcacgtgccccacgagctgttcaccgagctggacgagatctgcatgaaggagggcgaggacgccgagtggaaggagaccgccagatggctgaagttcgaggaggacgtggaggacggcggcgagagatggagcaagccctacgtggccaccctgagcctgcacagcctgttcgagctgagaagctgcctgatcaacggcaccgtgctgctggacatgcacgccaacagcatcgaggagatcagcgacctgatcctggaccagcaggagctgagcagcgacctgaacgacagcatgagagtgaaggtgagagaggccctgctgaagaagcaccaccaccagaacgagaagaagagaaacaacctgatccccatcgtgagaagcttcgccgaggtgggcaagaagcagagcgacccccacctgatggacaagcacggccagaccgtgagcccccagagcgtgcccaccaccaacctggaggtgaagaacggcgtgaactgcgagcacagccccgtggacctgagcaaggtggacctgcacttcatgaagaagatccccaccggcgccgaggccagcaacgtgctggtgggcgaggtggacatcctggacagacccatcgtggccttcgtgagactgagccccgccgtgctgctgagcggcctgaccgaggtgcccatccccaccagattcctgttcatcctgctgggccccgtgggcaagggccagcagtaccacgagatcggcagaagcatggccaccatcatgaccgacgagatcttccacgacgtggcctacaaggccaaggagagagacgacctgctggccggcatcgacgagttcctggaccaggtgaccgtgctgccccccggcgagtgggaccccagcatcagaatcgagccccccaagaacgtgcccagccaggagaagagaaagatgcccggcgtgcccaacggcaacgtgtgccacatcgagcaggagccccacggcggccacagcggccccgagctgcagagaaccggcagactgttcggcggcctggtgctggacatcaagagaaaggccccctggtactggagcgactacagagacgccctgagcctgcagtgcctggccagcttcctgttcctgtactgcgcctgcatgagccccgtgatcaccttcggcggcctgctgggcgaggccaccgagggcagaatcagcgccatcgagagcctgttcggcgccagcatgaccggcatcgcctacagcctgttcgccggccaggccctgaccatcctgggcagcaccggccccgtgctggtgttcgagaagatcctgttcaagttctgcaaggactacgccctgagctacctgagcctgagagcctgcatcggcctgtggaccgccttcctgtgcatcgtgctggtggccaccgacgccagcagcctggtgtgctacatcaccagattcaccgaggaggccttcgccagcctgatctgcatcatcttcatctacgaggccatcgagaagctgatccacctggccgagacctaccccatccacatgcacagccagctggaccacctgagcctgtactactgcagatgcaccctgcccgagaaccccaacaaccacaccctgcagtactggaaggaccacaacatcgtgaccgccgaggtgcactgggccaacctgaccgtgagcgtgagcctgggcgccgccagatgccccagcatcgtgaccaccggcctgggcggcaccagcaagtag

SEQ ID NO: 100035 - DNA, 2976 bp, synthetic construct
  misc_feature 1..2976: note = Description of Artificial Sequence: Synthetic coding sequence
  source 1..2976: mol_type = other DNA
atgcccctgggcagacagagccacagacaccacagaacccacggccagaagcacagaagaagaggcagaggcaagggcgccagccagggcgaggagggcctggaggccctggcccacgacacccccagccagagagtgcagttcatcctgggcaccgaggaggacgaggagcacgtgccccacgagctgttcaccgagctggacgagatctgcatgaaggagggcgaggacgccgagtggaaggagaccgccagatggctgaagttcgaggaggacgtggaggacggcggcgagagatggagcaagccctacgtggccaccctgagcctgcacagcctgttcgagctgagaagctgcctgatcaacggcaccgtgctgctggacatgcacgccaacagcatcgaggagatcagcgacctgatcctggaccagcaggagctgagcagcgacctgaacgacagcatgagagtgaaggtgagagaggccctgctgaagaagcaccaccaccagaacgagaagaagagaaacaacctgatccccatcgtgagaagcttcgccgaggtgggcaagaagcagagcgacccccacctgatggacaagcacggccagaccgtgagcccccagagcgtgcccaccaccaacctggaggtgaagaacggcgtgaactgcgagcacagccccgtggacctgagcaaggtggacctgcacttcatgaagaagatccccaccggcgccgaggccagcaacgtgctggtgggcgaggtggacatcctggacagacccatcgtggccttcgtgagactgagccccgccgtgctgctgagcggcctgaccgaggtgcccatccccaccagattcctgttcatcctgctgggccccgtgggcaagggccagcagtaccacgagatcggcagaagcatggccaccatcatgaccgacgagatcttccacgacgtggcctacaaggccaaggagagagacgacctgctggccggcatcgacgagttcctggaccaggtgaccgtgctgccccccggcgagtgggaccccagcatcagaatcgagccccccaagaacgtgcccagccaggagaagagaaagatgcccggcgtgcccaacggcaacgtgtgccacatcgagcaggagccccacggcggccacagcggccccgagctgcagagaaccggcagactgttcggcggcctggtgctggacatcaagagaaaggccccctggtactggagcgactacagagacgccctgagcctgcagtgcctggccagcttcctgttcctgtactgcgcctgcatgagccccgtgatcaccttcggcggcctgctgggcgaggccaccgagggcagaatcagcgccatcgagagcctgttcggcgccagcatgaccggcatcgcctacagcctgttcgccggccaggccctgaccatcctgggcagcaccggccccgtgctggtgttcgagaagatcctgttcaagttctgcaaggactacgccctgagctacctgagcctgagagcctgcatcggcctgtggaccgccttcctgtgcatcgtgctggtggccaccgacgccagcagcctggtgtgctacatcaccagattcaccgaggaggccttcgccagcctgatctgcatcatcttcatctacgaggccatcgagaagctgatccacctggccgagacctaccccatccacatgcacagccagctggaccacctgagcctgtactactgcagatgcaccctgcccgagaaccccaacaaccacaccctgcagtactggaaggaccacaacatcgtgaccgccgaggtgcactgggccaacctgaccgtgagcgagtgccaggagatgcacggcgagttcatgggcagcgcctgcggccaccacggcccctacacccccgacgtgctgttctggagctgcatcctgttcttcaccaccttcatcctgagcagcaccctgaagaccttcaagaccagcagatacttccccaccagagtgagaagcatggtgagcgacttcgccgtgttcctgaccatcttcaccatggtgatcatcgacttcctgatcggcgtgcccagccccaagctgcaggtgcccagcgtgttcaagcccaccagagacgacagaggctggatcatcaaccccatcggccccaacccctggtggaccgtgatcgccgccatcatccccgccctgctgtgcaccatcctgatcttcatggaccagcagatcaccgccgtgatcatcaacagaaaggagcacaagctgaagaagggctgcggctaccacctggacctgctgatggtggccatcatgctgggcgtgtgcagcatcatgggcctgccctggttcgtggccgccaccgtgctgagcatcacccacgtgaacagcctgaagctggagagcgagtgcagcgcccccggcgagcagcccaagttcctgggcatcagagagcagagagtgaccggcctgatgatcttcgtgctgatgggctgcagcgtgttcatgaccgccatcctgaagttcatccccatgcccgtgctgtacggcgtgttcctgtacatgggcgtgagcagcctgcagggcatccagttcttcgacagactgaagctgttcggcatgcccgccaagcaccagcccgacttcatctacctgagacacgtgcccctgagaaaggtgcacctgttcaccctgatccagctgacctgcctggtgctgctgtgggtgatcaaggccagccccgccgccatcgtgttccccatgatggtgctggccctggtgttcgtgagaaaggtgatggacctgtgcttcagcaagagagagctgagctggctggacgacctgatgcccgagagcaagaagaagaagctggacgacgccaagaagaaggccaaggaggaggaggtgatcgtgctggcccccaccgtgtacctgggcgccagcaactacagaacctag

SEQ ID NO: 100036 - DNA, 3321 bp, synthetic construct
  misc_feature 1..3321: note = Description of Artificial Sequence: Synthetic coding sequence
  source 1..3321: mol_type = other DNA
atggagatcaaggaccagggcgcccagatggagcccctgctgcccaccagaaacgacgaggaggccgtggtggacagaggcggcaccagaagcatcctgaagacccacttcgagaaggaggacctggagggccacagaaccctgttcatcggcgtgcacgtgcccctgggcggcagaaagagccacagaagacacagacacagaggccacaagcacagaaagagagacagagagagagacagcggcctggaggacggcagagagagccccagcttcgacacccccagccagagagtgcagttcatcctgggcaccgaggacgacgacgaggagcacatcccccacgacctgttcaccgagctggacgagatctgctggagagagggcgaggacgccgagtggagagagaccgccagatggctgaagttcgaggaggacgtggaggacggcggcgagagatggagcaagccctacgtggccaccctgagcctgcacagcctgttcgagctgagaagctgcatcctgaacggcaccgtgctgctggacatgcacgccaacaccctggaggagatcgccgacatggtgctggaccagcaggtgagcagcggccagctgaacgaggacgtgagacacagagtgcacgaggccctgatgaagcagcaccaccaccagaaccagaagaagctgaccaacagaatccccatcgtgagaagcttcgccgacatcggcaagaagcagagcgagcccaacagcatggacaagaacgccggccaggtggtgagcccccagagcgcccccgcctgcgtggagaacaagaacgacgtgagcagagagaacagcaccgtggacttcagcaaggtggacctgcacttcatgaagaagatcccccccggcgccgaggccagcaacatcctggtgggcgagctggagttcctggacagaaccgtggtggccttcgtgagactgagccccgccgtgctgctgcagggcctggccgaggtgcccatccccaccagattcctgttcatcctgctgggccccctgggcaagggccagcagtaccacgagatcggcagaagcatcgccaccctgatgaccgacgaggtgttccacgacgtggcctacaaggccaaggacagaaacgacctggtgagcggcatcgacgagttcctggaccaggtgaccgtgctgccccccggcgagtgggaccccagcatcagaatcgagccccccaagaacgtgcccagccaggagaagagaaagatccccgccgtgcccaacggcaccgccgcccacggcgaggccgagccccacggcggccacagcggccccgagctgcagagaaccggcagaatcttcggcggcctgatcctggacatcaagagaaaggccccctacttctggagcgacttcagagacgccttcagcctgcagtgcctggccagcttcctgttcctgtactgcgcctgcatgagccccgtgatcaccttcggcggcctgctgggcgaggccaccgagggcagaatcagcgccatcgagagcctgttcggcgccagcatgaccggcatcgcctacagcctgttcggcggccagcccctgaccatcctgggcagcaccggccccgtgctggtgttcgagaagatcctgttcaagttctgcaaggagtacggcctgagctacctgagcctgagagccagcatcggcctgtggaccgccaccctgtgcatcatcctggtggccaccgacgccagcagcctggtgtgctacatcaccagattcaccgaggaggccttcgccagcctgatctgcatcatcttcatctacgaggccctggagaagctgttcgagctgagcgaggcctaccccatcaacatgcacaacgacctggagctgctgacccagtacagctgcaactgcgtggagccccacaaccccagcaacggcaccctgaaggagtggagagagagcaacatcagcgccagcgacatcatctgggagaacctgaccgtgagcgagtgcaagagcctgcacggcgagtacgtgggcagagcctgcggccacgaccacccctacgtgcccgacgtgctgttctggagcgtgatcctgttcttcagcaccgtgaccctgagcgccaccctgaagcagttcaagaccagcagatacttccccaccaaggtgagaagcatcgtgagcgacttcgccgtgttcctgaccatcctgtgcatggtgctgatcgactacgccatcggcatccccagccccaagctgcaggtgcccagcgtgttcaagcccaccagagacgacagaggctggttcgtgacccccctgggccccaacccctggtggaccgtgatcgccgccatcatccccgccctgctgtgcaccatcctgatcttcatggaccagcagatcaccgccgtgatcatcaacagaaaggagcacaagctgaagaagggctgcggctaccacctggacctgctgatggtggccgtgatgctgggcgtgtgcagcatcatgggcctgccctggttcgtggccgccaccgtgctgagcatcacccacgtgaacagcctgaagctggagagcgagtgcagcgcccccggcgagcagcccaagttcctgggcatcagagagcagagagtgaccggcctgatgatcttcatcctgatgggcagcagcgtgttcatgaccagcatcctgaagttcatccccatgcccgtgctgtacggcgtgttcctgtacatgggcgccagcagcctgaagggcatccagttcttcgacagaatcaagctgttctggatgcccgccaagcaccagcccgacttcatctacctgagacacgtgcccctgagaaaggtgcacctgttcaccatcatccagatgagctgcctgggcctgctgtggatcatcaaggtgagcagagccgccatcgtgttccccatgatggtgctggccctggtgttcgtgagaaagctgatggacctgctgttcaccaagagagagctgagctggctggacgacctgatgcccgagagcaagaagaagaagctggaggacgccgagaaggaggaggagcagagcatgctggccatggaggacgagggcaccgtgcagctgcccctggagggccactacagagacgaccccagcgtgatcaacatcagcgacgagatgagcaagaccgccctgtggagaaacctgctgatcaccgccgacaacagcaaggacaaggagagcagcttccccagcaagagcatcgagagcagaaaggagaagaaggccgacagcggcaagggcgtggacagagagacctgcctgtag

SEQ ID NO: 100037 - DNA, 3300 bp, synthetic construct
  misc_feature 1..3300: note = Description of Artificial Sequence: Synthetic coding sequence
  source 1..3300: mol_type = other DNA
atgcagagcctgggcgtgagcggcaacagaaaggtgatgcagagcggcacctgcgagcccttccagagcctgagccaccagagaaacgacgaggaggccgtggtggacagaggcggcaccagaagcatcctgaagacccacttcgagaaggaggacctggagggccacagaaccctgttcatcggcgtgcacgtgcccctgggcggcagaaagagccacagaagacacagacacagaggccacaagcacagaaagagagacagagagagagacagcggcctggaggacggcagagagagccccagcttcgacacccccagccagagagtgcagttcatcctgggcaccgaggacgacgacgaggagcacatcccccacgacctgttcaccgagctggacgagatctgctggagagagggcgaggacgccgagtggagagagaccgccagatggctgaagttcgaggaggacgtggaggacggcggcgagagatggagcaagccctacgtggccaccctgagcctgcacagcctgttcgagctgagaagctgcatcctgaacggcaccgtgctgctggacatgcacgccaacaccctggaggagatcgccgacatggtgctggaccagcaggtgagcagcggccagctgaacgaggacgtgagacacagagtgcacgaggccctgatgaagcagcaccaccaccagaaccagaagaagctgaccaacagaatccccatcgtgagaagcttcgccgacatcggcaagaagcagagcgagcccaacagcatggacaagaacgccggccaggtggtgagcccccagagcgcccccgcctgcgtggagaacaagaacgacgtgagcagagagaacagcaccgtggacttcagcaaggtggacctgcacttcatgaagaagatcccccccggcgccgaggccagcaacatcctggtgggcgagctggagttcctggacagaaccgtggtggccttcgtgagactgagccccgccgtgctgctgcagggcctggccgaggtgcccatccccaccagattcctgttcatcctgctgggccccctgggcaagggccagcagtaccacgagatcggcagaagcatcgccaccctgatgaccgacgaggtgttccacgacgtggcctacaaggccaaggacagaaacgacctggtgagcggcatcgacgagttcctggaccaggtgaccgtgctgccccccggcgagtgggaccccagcatcagaatcgagccccccaagaacgtgcccagccaggagaagagaaagatccccgccgtgcccaacggcaccgccgcccacggcgaggccgagccccacggcggccacagcggccccgagctgcagagaaccggcagaatcttcggcggcctgatcctggacatcaagagaaaggccccctacttctggagcgacttcagagacgccttcagcctgcagtgcctggccagcttcctgttcctgtactgcgcctgcatgagccccgtgatcaccttcggcggcctgctgggcgaggccaccgagggcagaatcagcgccatcgagagcctgttcggcgccagcatgaccggcatcgcctacagcctgttcggcggccagcccctgaccatcctgggcagcaccggccccgtgctggtgttcgagaagatcctgttcaagttctgcaaggagtacggcctgagctacctgagcctgagagccagcatcggcctgtggaccgccaccctgtgcatcatcctggtggccaccgacgccagcagcctggtgtgctacatcaccagattcaccgaggaggccttcgccagcctgatctgcatcatcttcatctacgaggccctggagaagctgttcgagctgagcgaggcctaccccatcaacatgcacaacgacctggagctgctgacccagtacagctgcaactgcgtggagccccacaaccccagcaacggcaccctgaaggagtggagagagagcaacatcagcgccagcgacatcatctgggagaacctgaccgtgagcgagtgcaagagcctgcacggcgagtacgtgggcagagcctgcggccacgaccacccctacgtgcccgacgtgctgttctggagcgtgatcctgttcttcagcaccgtgaccctgagcgccaccctgaagcagttcaagaccagcagatacttccccaccaaggtgagaagcatcgtgagcgacttcgccgtgttcctgaccatcctgtgcatggtgctgatcgactacgccatcggcatccccagccccaagctgcaggtgcccagcgtgttcaagcccaccagagacgacagaggctggttcgtgacccccctgggccccaacccctggtggaccgtgatcgccgccatcatccccgccctgctgtgcaccatcctgatcttcatggaccagcagatcaccgccgtgatcatcaacagaaaggagcacaagctgaagaagggctgcggctaccacctggacctgctgatggtggccgtgatgctgggcgtgtgcagcatcatgggcctgccctggttcgtggccgccaccgtgctgagcatcacccacgtgaacagcctgaagctggagagcgagtgcagcgcccccggcgagcagcccaagttcctgggcatcagagagcagagagtgaccggcctgatgatcttcatcctgatgggcagcagcgtgttcatgaccagcatcctgaagttcatccccatgcccgtgctgtacggcgtgttcctgtacatgggcgccagcagcctgaagggcatccagttcttcgacagaatcaagctgttctggatgcccgccaagcaccagcccgacttcatctacctgagacacgtgcccctgagaaaggtgcacctgttcaccatcatccagatgagctgcctgggcctgctgtggatcatcaaggtgagcagagccgccatcgtgttccccatgatggtgctggccctggtgttcgtgagaaagctgatggacctgctgttcaccaagagagagctgagctggctggacgacctgatgcccgagagcaagaagaagaagctggaggacgccgagaaggaggaggagcagagcatgctggccatggaggacgagggcaccgtgcagctgcccctggagggccactacagagacgaccccagcgtgatcaacatcagcgacgagatgagcaagaccgccctgtggagaaacctgctgatcaccgccgacaacagcaaggacaaggagagcagcttccccagcaagagcagccccagctag

SEQ ID NO: 100038 - DNA, 3354 bp, synthetic construct
  misc_feature 1..3354: note = Description of Artificial Sequence: Synthetic coding sequence
  source 1..3354: mol_type = other DNA
atggagatcaaggaccagggcgcccagatggagcccctgctgcccaccagaaacgacgaggaggccgtggtggacagaggcggcaccagaagcatcctgaagacccacttcgagaaggaggacctggagggccacagaaccctgttcatcggcgtgcacgtgcccctgggcggcagaaagagccacagaagacacagacacagaggccacaagcacagaaagagagacagagagagagacagcggcctggaggacggcagagagagccccagcttcgacacccccagccagagagtgcagttcatcctgggcaccgaggacgacgacgaggagcacatcccccacgacctgttcaccgagctggacgagatctgctggagagagggcgaggacgccgagtggagagagaccgccagatggctgaagttcgaggaggacgtggaggacggcggcgagagatggagcaagccctacgtggccaccctgagcctgcacagcctgttcgagctgagaagctgcatcctgaacggcaccgtgctgctggacatgcacgccaacaccctggaggagatcgccgacatggtgctggaccagcaggtgagcagcggccagctgaacgaggacgtgagacacagagtgcacgaggccctgatgaagcagcaccaccaccagaaccagaagaagctgaccaacagaatccccatcgtgagaagcttcgccgacatcggcaagaagcagagcgagcccaacagcatggacaagaacggccaggtggtgagcccccagagcgcccccgcctgcgtggagaacaagaacgacgtgagcagagagaacagcaccgtggacttcagcaagggcctgggcggccagcagaagggccacaccagcccctgcggcatgaagcagagacacgagaagggccccccccaccagcaggagagagaggtggacctgcacttcatgaagaagatcccccccggcgccgaggccagcaacatcctggtgggcgagctggagttcctggacagaaccgtggtggccttcgtgagactgagccccgccgtgctgctgcagggcctggccgaggtgcccatccccaccagattcctgttcatcctgctgggccccctgggcaagggccagcagtaccacgagatcggcagaagcatcgccaccctgatgaccgacgaggtgttccacgacgtggcctacaaggccaaggacagaaacgacctggtgagcggcatcgacgagttcctggaccaggtgaccgtgctgccccccggcgagtgggaccccagcatcagaatcgagccccccaagaacgtgcccagccaggagaagagaaagatccccgccgtgcccaacggcaccgccgcccacggcgaggccgagccccacggcggccacagcggccccgagctgcagagaaccggcagaatcttcggcggcctgatcctggacatcaagagaaaggccccctacttctggagcgacttcagagacgccttcagcctgcagtgcctggccagcttcctgttcctgtactgcgcctgcatgagccccgtgatcaccttcggcggcctgctgggcgaggccaccgagggcagaatcagcgccatcgagagcctgttcggcgccagcatgaccggcatcgcctacagcctgttcggcggccagcccctgaccatcctgggcagcaccggccccgtgctggtgttcgagaagatcctgttcaagttctgcaaggagtacggcctgagctacctgagcctgagagccagcatcggcctgtggaccgccaccctgtgcatcatcctggtggccaccgacgccagcagcctggtgtgctacatcaccagattcaccgaggaggccttcgccagcctgatctgcatcatcttcatctacgaggccctggagaagctgttcgagctgagcgaggcctaccccatcaacatgcacaacgacctggagctgctgacccagtacagctgcaactgcgtggagccccacaaccccagcaacggcaccctgaaggagtggagagagagcaacatcagcgccagcgacatcatctgggagaacctgaccgtgagcgagtgcaagagcctgcacggcgagtacgtgggcagagcctgcggccacgaccacccctacgtgcccgacgtgctgttctggagcgtgatcctgttcttcagcaccgtgaccctgagcgccaccctgaagcagttcaagaccagcagatacttccccaccaaggtgagaagcatcgtgagcgacttcgccgtgttcctgaccatcctgtgcatggtgctgatcgactacgccatcggcatccccagccccaagctgcaggtgcccagcgtgttcaagcccaccagagacgacagaggctggttcgtgacccccctgggccccaacccctggtggaccgtgatcgccgccatcatccccgccctgctgtgcaccatcctgatcttcatggaccagcagatcaccgccgtgatcatcaacagaaaggagcacaagctgaagaagggctgcggctaccacctggacctgctgatggtggccgtgatgctgggcgtgtgcagcatcatgggcctgccctggttcgtggccgccaccgtgctgagcatcacccacgtgaacagcctgaagctggagagcgagtgcagcgcccccggcgagcagcccaagttcctgggcatcagagagcagagagtgaccggcctgatgatcttcatcctgatgggcagcagcgtgttcatgaccagcatcctgaagttcatccccatgcccgtgctgtacggcgtgttcctgtacatgggcgccagcagcctgaagggcatccagttcttcgacagaatcaagctgttctggatgcccgccaagcaccagcccgacttcatctacctgagacacgtgcccctgagaaaggtgcacctgttcaccatcatccagatgagctgcctgggcctgctgtggatcatcaaggtgagcagagccgccatcgtgttccccatgatggtgctggccctggtgttcgtgagaaagctgatggacctgctgttcaccaagagagagctgagctggctggacgacctgatgcccgagagcaagaagaagaagctggaggacgccgagaaggaggaggagcagagcatgctggccatggaggacgagggcaccgtgcagctgcccctggagggccactacagagacgaccccagcgtgatcaacatcagcgacgagatgagcaagaccgccctgtggagaaacctgctgatcaccgccgacaacagcaaggacaaggagagcagcttccccagcaagagcagccccagctag

SEQ ID NO: 100039 - DNA, 3267 bp, synthetic construct
  misc_feature 1..3267: note = Description of Artificial Sequence: Synthetic coding sequence
  source 1..3267: mol_type = other DNA
atggagatcaaggaccagggcgcccagatggagcccctgctgcccaccagaaacgacgaggaggccgtggtggacagaggcggcaccagaagcatcctgaagacccacttcgagaaggaggacctggagggccacagaaccctgttcatcggcgtgcacgtgcccctgggcggcagaaagagccacagaagacacagacacagaggccacaagcacagaaagagagacagagagagagacagcggcctggaggacggcagagagagccccagcttcgacacccccagccagagagtgcagttcatcctgggcaccgaggacgacgacgaggagcacatcccccacgacctgttcaccgagctggacgagatctgctggagagagggcgaggacgccgagtggagagagaccgccagatggctgaagttcgaggaggacgtggaggacggcggcgagagatggagcaagccctacgtggccaccctgagcctgcacagcctgttcgagctgagaagctgcatcctgaacggcaccgtgctgctggacatgcacgccaacaccctggaggagatcgccgacatggtgctggaccagcaggtgagcagcggccagctgaacgaggacgtgagacacagagtgcacgaggccctgatgaagcagcaccaccaccagaaccagaagaagctgaccaacagaatccccatcgtgagaagcttcgccgacatcggcaagaagcagagcgagcccaacagcatggacaagaacgccggccaggtggtgagcccccagagcgcccccgcctgcgtggagaacaagaacgacgtgagcagagagaacagcaccgtggacttcagcaaggtggacctgcacttcatgaagaagatcccccccggcgccgaggccagcaacatcctggtgggcgagctggagttcctggacagaaccgtggtggccttcgtgagactgagccccgccgtgctgctgcagggcctggccgaggtgcccatccccaccagattcctgttcatcctgctgggccccctgggcaagggccagcagtaccacgagatcggcagaagcatcgccaccctgatgaccgacgaggtgttccacgacgtggcctacaaggccaaggacagaaacgacctggtgagcggcatcgacgagttcctggaccaggtgaccgtgctgccccccggcgagtgggaccccagcatcagaatcgagccccccaagaacgtgcccagccaggagaagagaaagatccccgccgtgcccaacggcaccgccgcccacggcgaggccgagccccacggcggccacagcggccccgagctgcagagaaccggcagaatcttcggcggcctgatcctggacatcaagagaaaggccccctacttctggagcgacttcagagacgccttcagcctgcagtgcctggccagcttcctgttcctgtactgcgcctgcatgagccccgtgatcaccttcggcggcctgctgggcgaggccaccgagggcagaatcagcgccatcgagagcctgttcggcgccagcatgaccggcatcgcctacagcctgttcggcggccagcccctgaccatcctgggcagcaccggccccgtgctggtgttcgagaagatcctgttcaagttctgcaaggagtacggcctgagctacctgagcctgagagccagcatcggcctgtggaccgccaccctgtgcatcatcctggtggccaccgacgccagcagcctggtgtgctacatcaccagattcaccgaggaggccttcgccagcctgatctgcatcatcttcatctacgaggccctggagaagctgttcgagctgagcgaggcctaccccatcaacatgcacaacgacctggagctgctgacccagtacagctgcaactgcgtggagccccacaaccccagcaacggcaccctgaaggagtggagagagagcaacatcagcgccagcgacatcatctgggagaacctgaccgtgagcgagtgcaagagcctgcacggcgagtacgtgggcagagcctgcggccacgaccacccctacgtgcccgacgtgctgttctggagcgtgatcctgttcttcagcaccgtgaccctgagcgccaccctgaagcagttcaagaccagcagatacttccccaccaaggtgagaagcatcgtgagcgacttcgccgtgttcctgaccatcctgtgcatggtgctgatcgactacgccatcggcatccccagccccaagctgcaggtgcccagcgtgttcaagcccaccagagacgacagaggctggttcgtgacccccctgggccccaacccctggtggaccgtgatcgccgccatcatccccgccctgctgtgcaccatcctgatcttcatggaccagcagatcaccgccgtgatcatcaacagaaaggagcacaagctgaagaagggctgcggctaccacctggacctgctgatggtggccgtgatgctgggcgtgtgcagcatcatgggcctgccctggttcgtggccgccaccgtgctgagcatcacccacgtgaacagcctgaagctggagagcgagtgcagcgcccccggcgagcagcccaagttcctgggcatcagagagcagagagtgaccggcctgatgatcttcatcctgatgggcagcagcgtgttcatgaccagcatcctgaagttcatccccatgcccgtgctgtacggcgtgttcctgtacatgggcgccagcagcctgaagggcatccagttcttcgacagaatcaagctgttctggatgcccgccaagcaccagcccgacttcatctacctgagacacgtgcccctgagaaaggtgcacctgttcaccatcatccagatgagctgcctgggcctgctgtggatcatcaaggtgagcagagccgccatcgtgttccccatgatggtgctggccctggtgttcgtgagaaagctgatggacctgctgttcaccaagagagagctgagctggctggacgacctgatgcccgagagcaagaagaagaagctggaggacgccgagaaggaggaggagcagagcatgctggccatggaggacgagggcaccgtgcagctgcccctggagggccactacagagacgaccccagcgtgatcaacatcagcgacgagatgagcaagaccgccctgtggagaaacctgctgatcaccgccgacaacagcaaggacaaggagagcagcttccccagcaagagcagccccagctag

SEQ ID NO: 100040 - DNA, 3165 bp, synthetic construct
  misc_feature 1..3165: note = Description of Artificial Sequence: Synthetic coding sequence
  source 1..3165: mol_type = other DNA
atggagatcaaggaccagggcgcccagatggagcccctgctgcccaccagaaacgacgaggaggccgtggtggacagaggcggcaccagaagcatcctgaagacccacttcgagaaggaggacctggagggccacagaaccctgttcatcggcgtgcacgtgcccctgggcggcagaaagagccacagaagacacagacacagaggccacaagcacagaaagagagacagagagagagacagcggcctggaggacggcagagagagccccagcttcgacacccccagccagagagtgcagttcatcctgggcaccgaggacgacgacgaggagcacatcccccacgacctgttcaccgagctggacgagatctgctggagagagggcgaggacgccgagtggagagagaccgccagatggctgaagttcgaggaggacgtggaggacggcggcgagagatggagcaagccctacgtggccaccctgagcctgcacagcctgttcgagctgagaagctgcatcctgaacggcaccgtgctgctggacatgcacgccaacaccctggaggagatcgccgacatggtgctggaccagcaggtgagcagcggccagctgaacgaggacgtgagacacagagtgcacgaggccctgatgaagcagcaccaccaccagaaccagaagaagctgaccaacagaatccccatcgtgagaagcttcgccgacatcggcaagaagcagagcgagcccaacagcatggacaagaacgccggccaggtggtgagcccccagagcgcccccgcctgcgtggagaacaagaacgacgtgagcagagagaacagcaccgtggacttcagcaagggcctgggcggccagcagaagggccacaccagcccctgcggcatgaagcagagacacgagaagggccccccccaccagcaggagagagaggtggacctgcacttcatgaagaagatcccccccggcgccgaggccagcaacatcctggtgggcgagctggagttcctggacagaaccgtggtggccttcgtgagactgagccccgccgtgctgctgcagggcctggccgaggtgcccatccccaccagattcctgttcatcctgctgggccccctgggcaagggccagcagtaccacgagatcggcagaagcatcgccaccctgatgaccgacgaggtgttccacgacgtggcctacaaggccaaggacagaaacgacctggtgagcggcatcgacgagttcctggaccaggtgaccgtgctgccccccggcgagtgggaccccagcatcagaatcgagccccccaagaacgtgcccagccaggagaagagaaagatccccgccgtgcccaacggcaccgccgcccacggcgaggccgagccccacggcggccacagcggccccgagctgcagagaaccggcagaatcttcggcggcctgatcctggacatcaagagaaaggccccctacttctggagcgacttcagagacgccttcagcctgcagtgcctggccagcttcctgttcctgtactgcgcctgcatgagccccgtgatcaccttcggcggcctgctgggcgaggccaccgagggcagaatcagcgccatcgagagcctgttcggcgccagcatgaccggcatcgcctacagcctgttcggcggccagcccctgaccatcctgggcagcaccggccccgtgctggtgttcgagaagatcctgttcaagttctgcaaggagtacggcctgagctacctgagcctgagagccagcatcggcctgtggaccgccaccctgtgcatcatcctggtggccaccgacgccagcagcctggtgtgctacatcaccagattcaccgaggaggccttcgccagcctgatctgcatcatcttcatctacgaggccctggagaagctgttcgagctgagcgaggcctaccccatcaacatgcacaacgacctggagctgctgacccagtacagctgcaactgcgtggagccccacaaccccagcaacggcaccctgaaggagtggagagagagcaacatcagcgccagcgacatcatctgggagaacctgaccgtgagcgagtgcaagagcctgcacggcgagtacgtgggcagagcctgcggccacgaccacccctacgtgcccgacgtgctgttctggagcgtgatcctgttcttcagcaccgtgaccctgagcgccaccctgaagcagttcaagaccagcagatacttccccaccaaggtgagaagcatcgtgagcgacttcgccgtgttcctgaccatcctgtgcatggtgctgatcgactacgccatcggcatccccagccccaagctgcaggtgcccagcgtgttcaagcccaccagagacgacagaggctggttcgtgacccccctgggccccaacccctggtggaccgtgatcgccgccatcatccccgccctgctgtgcaccatcctgatcttcatggaccagcagatcaccgccgtgatcatcaacagaaaggagcacaagctgaagaagggctgcggctaccacctggacctgctgatggtggccgtgatgctgggcgtgtgcagcatcatgggcctgccctggttcgtggccgccaccgtgctgagcatcacccacgtgaacagcctgaagctggagagcgagtgcagcgcccccggcgagcagcccaagttcctgggcatcagagagcagagagtgaccggcctgatgatcttcatcctgatgggcagcagcgtgttcatgaccagcatcctgaagttcatccccatgcccgtgctgtacggcgtgttcctgtacatgggcgccagcagcctgaagggcatccagttcttcgacagaatcaagctgttctggatgcccgccaagcaccagcccgacttcatctacctgagacacgtgcccctgagaaaggtgcacctgttcaccatcatccagatgagctgcctgggcctgctgtggatcatcaaggtgagcagagccgccatcgtgttccccatgatggtgctggccctggtgttcgtgagaaagctgatggacctgctgttcaccaagagagagctgagctggctggacgacctgatgcccgagagcaagaagaagaagctggaggacgccgagaaggagcactag

SEQ ID NO: 100041 - DNA, 3357 bp, synthetic construct
  misc_feature 1..3357: note = Description of Artificial Sequence: Synthetic coding sequence
  source 1..3357: mol_type = other DNA
atggagatcaaggaccagggcgcccagatggagcccctgctgcccaccagaaacgacgaggaggccgtggtggacagaggcggcaccagaagcatcctgaagacccacttcgagaaggaggacctggagggccacagaaccctgttcatcggcgtgcacgtgcccctgggcggcagaaagagccacagaagacacagacacagaggccacaagcacagaaagagagacagagagagagacagcggcctggaggacggcagagagagccccagcttcgacacccccagccagagagtgcagttcatcctgggcaccgaggacgacgacgaggagcacatcccccacgacctgttcaccgagctggacgagatctgctggagagagggcgaggacgccgagtggagagagaccgccagatggctgaagttcgaggaggacgtggaggacggcggcgagagatggagcaagccctacgtggccaccctgagcctgcacagcctgttcgagctgagaagctgcatcctgaacggcaccgtgctgctggacatgcacgccaacaccctggaggagatcgccgacatggtgctggaccagcaggtgagcagcggccagctgaacgaggacgtgagacacagagtgcacgaggccctgatgaagcagcaccaccaccagaaccagaagaagctgaccaacagaatccccatcgtgagaagcttcgccgacatcggcaagaagcagagcgagcccaacagcatggacaagaacgccggccaggtggtgagcccccagagcgcccccgcctgcgtggagaacaagaacgacgtgagcagagagaacagcaccgtggacttcagcaagggcctgggcggccagcagaagggccacaccagcccctgcggcatgaagcagagacacgagaagggccccccccaccagcaggagagagaggtggacctgcacttcatgaagaagatcccccccggcgccgaggccagcaacatcctggtgggcgagctggagttcctggacagaaccgtggtggccttcgtgagactgagccccgccgtgctgctgcagggcctggccgaggtgcccatccccaccagattcctgttcatcctgctgggccccctgggcaagggccagcagtaccacgagatcggcagaagcatcgccaccctgatgaccgacgaggtgttccacgacgtggcctacaaggccaaggacagaaacgacctggtgagcggcatcgacgagttcctggaccaggtgaccgtgctgccccccggcgagtgggaccccagcatcagaatcgagccccccaagaacgtgcccagccaggagaagagaaagatccccgccgtgcccaacggcaccgccgcccacggcgaggccgagccccacggcggccacagcggccccgagctgcagagaaccggcagaatcttcggcggcctgatcctggacatcaagagaaaggccccctacttctggagcgacttcagagacgccttcagcctgcagtgcctggccagcttcctgttcctgtactgcgcctgcatgagccccgtgatcaccttcggcggcctgctgggcgaggccaccgagggcagaatcagcgccatcgagagcctgttcggcgccagcatgaccggcatcgcctacagcctgttcggcggccagcccctgaccatcctgggcagcaccggccccgtgctggtgttcgagaagatcctgttcaagttctgcaaggagtacggcctgagctacctgagcctgagagccagcatcggcctgtggaccgccaccctgtgcatcatcctggtggccaccgacgccagcagcctggtgtgctacatcaccagattcaccgaggaggccttcgccagcctgatctgcatcatcttcatctacgaggccctggagaagctgttcgagctgagcgaggcctaccccatcaacatgcacaacgacctggagctgctgacccagtacagctgcaactgcgtggagccccacaaccccagcaacggcaccctgaaggagtggagagagagcaacatcagcgccagcgacatcatctgggagaacctgaccgtgagcgagtgcaagagcctgcacggcgagtacgtgggcagagcctgcggccacgaccacccctacgtgcccgacgtgctgttctggagcgtgatcctgttcttcagcaccgtgaccctgagcgccaccctgaagcagttcaagaccagcagatacttccccaccaaggtgagaagcatcgtgagcgacttcgccgtgttcctgaccatcctgtgcatggtgctgatcgactacgccatcggcatccccagccccaagctgcaggtgcccagcgtgttcaagcccaccagagacgacagaggctggttcgtgacccccctgggccccaacccctggtggaccgtgatcgccgccatcatccccgccctgctgtgcaccatcctgatcttcatggaccagcagatcaccgccgtgatcatcaacagaaaggagcacaagctgaagaagggctgcggctaccacctggacctgctgatggtggccgtgatgctgggcgtgtgcagcatcatgggcctgccctggttcgtggccgccaccgtgctgagcatcacccacgtgaacagcctgaagctggagagcgagtgcagcgcccccggcgagcagcccaagttcctgggcatcagagagcagagagtgaccggcctgatgatcttcatcctgatgggcagcagcgtgttcatgaccagcatcctgaagttcatccccatgcccgtgctgtacggcgtgttcctgtacatgggcgccagcagcctgaagggcatccagttcttcgacagaatcaagctgttctggatgcccgccaagcaccagcccgacttcatctacctgagacacgtgcccctgagaaaggtgcacctgttcaccatcatccagatgagctgcctgggcctgctgtggatcatcaaggtgagcagagccgccatcgtgttccccatgatggtgctggccctggtgttcgtgagaaagctgatggacctgctgttcaccaagagagagctgagctggctggacgacctgatgcccgagagcaagaagaagaagctggaggacgccgagaaggaggaggagcagagcatgctggccatggaggacgagggcaccgtgcagctgcccctggagggccactacagagacgaccccagcgtgatcaacatcagcgacgagatgagcaagaccgccctgtggagaaacctgctgatcaccgccgacaacagcaaggacaaggagagcagcttccccagcaagagcagccccagctag

SEQ ID NO: 100042 - DNA, 3318 bp, synthetic construct
  misc_feature 1..3318: note = Description of Artificial Sequence: Synthetic coding sequence
  source 1..3318: mol_type = other DNA
atggagatcaaggaccagggcgcccagatggagcccctgctgcccaccagaaacgacgaggaggccgtggtggacagaggcggcaccagaagcatcctgaagacccacttcgagaaggaggacctggagggccacagaaccctgttcatcggcgtgcacgtgcccctgggcggcagaaagagccacagaagacacagacacagaggccacaagcacagaaagagagacagagagagagacagcggcctggaggacggcagagagagccccagcttcgacacccccagccagagagtgcagttcatcctgggcaccgaggacgacgacgaggagcacatcccccacgacctgttcaccgagctggacgagatctgctggagagagggcgaggacgccgagtggagagagaccgccagatggctgaagttcgaggaggacgtggaggacggcggcgagagatggagcaagccctacgtggccaccctgagcctgcacagcctgttcgagctgagaagctgcatcctgaacggcaccgtgctgctggacatgcacgccaacaccctggaggagatcgccgacatggtgctggaccagcaggtgagcagcggccagctgaacgaggacgtgagacacagagtgcacgaggccctgatgaagcagcaccaccaccagaaccagaagaagctgaccaacagaatccccatcgtgagaagcttcgccgacatcggcaagaagcagagcgagcccaacagcatggacaagaacggccaggtggtgagcccccagagcgcccccgcctgcgtggagaacaagaacgacgtgagcagagagaacagcaccgtggacttcagcaaggtggacctgcacttcatgaagaagatcccccccggcgccgaggccagcaacatcctggtgggcgagctggagttcctggacagaaccgtggtggccttcgtgagactgagccccgccgtgctgctgcagggcctggccgaggtgcccatccccaccagattcctgttcatcctgctgggccccctgggcaagggccagcagtaccacgagatcggcagaagcatcgccaccctgatgaccgacgaggtgttccacgacgtggcctacaaggccaaggacagaaacgacctggtgagcggcatcgacgagttcctggaccaggtgaccgtgctgccccccggcgagtgggaccccagcatcagaatcgagccccccaagaacgtgcccagccaggagaagagaaagatccccgccgtgcccaacggcaccgccgcccacggcgaggccgagccccacggcggccacagcggccccgagctgcagagaaccggcagaatcttcggcggcctgatcctggacatcaagagaaaggccccctacttctggagcgacttcagagacgccttcagcctgcagtgcctggccagcttcctgttcctgtactgcgcctgcatgagccccgtgatcaccttcggcggcctgctgggcgaggccaccgagggcagaatcagcgccatcgagagcctgttcggcgccagcatgaccggcatcgcctacagcctgttcggcggccagcccctgaccatcctgggcagcaccggccccgtgctggtgttcgagaagatcctgttcaagttctgcaaggagtacggcctgagctacctgagcctgagagccagcatcggcctgtggaccgccaccctgtgcatcatcctggtggccaccgacgccagcagcctggtgtgctacatcaccagattcaccgaggaggccttcgccagcctgatctgcatcatcttcatctacgaggccctggagaagctgttcgagctgagcgaggcctaccccatcaacatgcacaacgacctggagctgctgacccagtacagctgcaactgcgtggagccccacaaccccagcaacggcaccctgaaggagtggagagagagcaacatcagcgccagcgacatcatctgggagaacctgaccgtgagcgagtgcaagagcctgcacggcgagtacgtgggcagagcctgcggccacgaccacccctacgtgcccgacgtgctgttctggagcgtgatcctgttcttcagcaccgtgaccctgagcgccaccctgaagcagttcaagaccagcagatacttccccaccaaggtgagaagcatcgtgagcgacttcgccgtgttcctgaccatcctgtgcatggtgctgatcgactacgccatcggcatccccagccccaagctgcaggtgcccagcgtgttcaagcccaccagagacgacagaggctggttcgtgacccccctgggccccaacccctggtggaccgtgatcgccgccatcatccccgccctgctgtgcaccatcctgatcttcatggaccagcagatcaccgccgtgatcatcaacagaaaggagcacaagctgaagaagggctgcggctaccacctggacctgctgatggtggccgtgatgctgggcgtgtgcagcatcatgggcctgccctggttcgtggccgccaccgtgctgagcatcacccacgtgaacagcctgaagctggagagcgagtgcagcgcccccggcgagcagcccaagttcctgggcatcagagagcagagagtgaccggcctgatgatcttcatcctgatgggcagcagcgtgttcatgaccagcatcctgaagttcatccccatgcccgtgctgtacggcgtgttcctgtacatgggcgccagcagcctgaagggcatccagttcttcgacagaatcaagctgttctggatgcccgccaagcaccagcccgacttcatctacctgagacacgtgcccctgagaaaggtgcacctgttcaccatcatccagatgagctgcctgggcctgctgtggatcatcaaggtgagcagagccgccatcgtgttccccatgatggtgctggccctggtgttcgtgagaaagctgatggacctgctgttcaccaagagagagctgagctggctggacgacctgatgcccgagagcaagaagaagaagctggaggacgccgagaaggaggaggagcagagcatgctggccatggaggacgagggcaccgtgcagctgcccctggagggccactacagagacgaccccagcgtgatcaacatcagcgacgagatgagcaagaccgccctgtggagaaacctgctgatcaccgccgacaacagcaaggacaaggagagcagcttccccagcaagagcatcgagagcagaaaggagaagaaggccgacagcggcaagggcgtggacagagagacctgcctgtag

SEQ ID NO: 100043 - DNA, 1227 bp, synthetic construct
  misc_feature 1..1227: note = Description of Artificial Sequence: Synthetic coding sequence
  source 1..1227: mol_type = other DNA
atggagatcaaggaccagggcgcccagatggagcccctgctgcccaccagaaacgacgaggaggccgtggtggacagaggcggcaccagaagcatcctgaagacccacttcgagaaggaggacctggagggccacagaaccctgttcatcggcgtgcacgtgcccctgggcggcagaaagagccacagaagacacagacacagaggccacaagcacagaaagagagacagagagagagacagcggcctggaggacggcagagagagccccagcttcgacacccccagccagagagtgcagttcatcctgggcaccgaggacgacgacgaggagcacatcccccacgacctgttcaccgagctggacgagatctgctggagagagggcgaggacgccgagtggagagagaccgccagatggctgaagttcgaggaggacgtggaggacggcggcgagagatggagcaagccctacgtggccaccctgagcctgcacagcctgttcgagctgagaagctgcatcctgaacggcaccgtgctgctggacatgcacgccaacaccctggaggagatcgccgacatggtgctggaccagcaggtgagcagcggccagctgaacgaggacgtgagacacagagtgcacgaggccctgatgaagcagcaccaccaccagaaccagaagaagctgaccaacagaatccccatcgtgagaagcttcgccgacatcggcaagaagcagagcgagcccaacagcatggacaagaacgccggccaggtggtgagcccccagagcgcccccgcctgcgtggagaacaagaacgacgtgagcagagagaacagcaccgtggacttcagcaagggcctgggcggccagcagaagggccacaccagcccctgcggcatgaagcagagacacgagaagggccccccccaccagcaggagagagaggtggacctgcacttcatgaagaagatcccccccggcgccgaggccagcaacatcctggtgggcgagctggagttcctggacagaaccgtggtggccttcgtgagactgagccccgccgtgctgctgcagggcctggccgaggtgcccatccccaccagatacttcatgatgctgcccatcaagctgaagatcgtgatgacctggtaccaggagctgatgagcttctggatcagactgctgttcagcctgctggagaacggcatccaggccttcgagtag

SEQ ID NO: 100044 - DNA, 2676 bp, synthetic construct
  misc_feature 1..2676: note = Description of Artificial Sequence: Synthetic coding sequence
  source 1..2676: mol_type = other DNA
atgagccaggtgggcggcagaggcgacagatgcacccaggaggtgcagggcctggtgcacggcgccggcgacctgagcgccagcctggccgagaacagccccaccatgagccagaacggctacttcgaggacagcagctactacaagtgcgacaccgacgacaccttcgaggccagagaggagatcctgggcgacgaggccttcgacaccgccaacagcagcatcgtgagcggcgagagcatcagattcttcgtgaacgtgaacctggagatgcaggccaccaacaccgagaacgaggccaccagcggcggctgcgtgctgctgcacaccagcagaaagtacctgaagctgaagaacttcaaggaggagatcagagcccacagagacctggacggcttcctggcccaggccagcatcgtgctgaacgagaccgccaccagcctggacaacgtgctgagaaccatgctgagaagattcgccagagaccccgacaacaacgagcccaactgcaacctggacctgctgatggccatgctgttcaccgacgccggcgcccccatgagaggcaaggtgcacctgctgagcgacaccatccagggcgtgaccgccaccgtgaccggcgtgagataccagcagagctggctgtgcatcatctgcaccatgaaggccctgcagaagagacacgtgtgcatcagcagactggtgagaccccagaactggggcgagaacagctgcgaggtgagattcgtgatcctggtgctggccccccccaagatgaagagcaccaagaccgccatggaggtggccagaaccttcgccaccatgttcagcgacatcgccttcagacagaagctgctggagaccagaaccgaggaggagttcaaggaggccctggtgcaccagagacagctgctgaccatggtgagccacggccccgtggcccccagaaccaaggagagaagcaccgtgagcctgcccgcccacagacaccccgagccccccaagtgcaaggacttcgtgcccttcggcaagggcatcagagaggacatcgccagaagattccccctgtaccccctggacttcaccgacggcatcatcggcaagaacaaggccgtgggcaagtacatcaccaccaccctgttcctgtacttcgcctgcctgctgcccaccatcgccttcggcagcctgaacgacgagaacaccgacggcgccatcgacgtgcagaagaccatcgccggccagagcatcggcggcctgctgtacgccctgttcagcggccagcccctggtgatcctgctgaccaccgcccccctggccctgtacatccaggtgatcagagtgatctgcgacgactacgacctggacttcaacagcttctacgcctggaccggcctgtggaacagcttcttcctggccctgtacgccttcttcaacctgagcctggtgatgagcctgttcaagagaagcaccgaggagatcatcgccctgttcatcagcatcaccttcgtgctggacgccgtgaagggcaccgtgaagatcttctggaagtactactacggccactacctggacgactaccacaccaagagaaccagcagcctggtgagcctgagcggcctgggcgccagcctgaacgccagcctgcacaccgccctgaacgccagcttcctggccagccccaccgagctgcccagcgccacccacagcggccaggccaccgccgtgctgagcctgctgatcatgctgggcaccctgtggctgggctacaccctgtaccagttcaagaagagcccctacctgcacccctgcgtgagagagatcctgagcgactgcgccctgcccatcgccgtgctggccttcagcctgatcagcagccacggcttcagagagatcgagatgagcaagttcagatacaaccccagcgagagccccttcgccatggcccagatccagagcctgagcctgagagccgtgagcggcgccatgggcctgggcttcctgctgagcatgctgttcttcatcgagcagaacctggtggccgccctggtgaacgcccccgagaacagactggtgaagggcaccgcctaccactgggacctgctgctgctggccatcatcaacaccggcctgagcctgttcggcctgccctggatccacgccgcctacccccacagccccctgcacgtgagagccctggccctggtggaggagagagtggagaacggccacatctacgacaccatcgtgaacgtgaaggagaccagactgaccagcctgggcgccagcgtgctggtgggcctgagcctgctgctgctgcccgtgcccctgcagtggatccccaagcccgtgctgtacggcctgttcctgtacatcgccctgaccagcctggacggcaaccagctggtgcagagagtggccctgctgctgaaggagcagaccgcctacccccccacccactacatcagaagagtgccccagagaaagatccactacttcaccggcctgcaggtgctgcagctgctgctgctgtgcgccttcggcatgagcagcctgccctacatgaagatgatcttccccctgatcatgatcgccatgatccccatcagatacatcctgctgcccagaatcatcgaggccaagtacctggacgtgatggacgccgagcacagaccctag

SEQ ID NO: 100045 - DNA, 2757 bp, synthetic construct
  misc_feature 1..2757: note = Description of Artificial Sequence: Synthetic coding sequence
  source 1..2757: mol_type = other DNA
atgggcgtgtacggcccccaggacagaagcgagagcgagaagagagacgtgcagagagacccccccccctggcaccccagaagagagggcgagagacccgccagagccagaagcctgcccctggccgccgccggccagggcttcctgagaaagacctggatcagcgagcacgagaacagccccaccatgagccagaacggctacttcgaggacagcagctactacaagtgcgacaccgacgacaccttcgaggccagagaggagatcctgggcgacgaggccttcgacaccgccaacagcagcatcgtgagcggcgagagcatcagattcttcgtgaacgtgaacctggagatgcaggccaccaacaccgagaacgaggccaccagcggcggctgcgtgctgctgcacaccagcagaaagtacctgaagctgaagaacttcaaggaggagatcagagcccacagagacctggacggcttcctggcccaggccagcatcgtgctgaacgagaccgccaccagcctggacaacgtgctgagaaccatgctgagaagattcgccagagaccccgacaacaacgagcccaactgcaacctggacctgctgatggccatgctgttcaccgacgccggcgcccccatgagaggcaaggtgcacctgctgagcgacaccatccagggcgtgaccgccaccgtgaccggcgtgagataccagcagagctggctgtgcatcatctgcaccatgaaggccctgcagaagagacacgtgtgcatcagcagactggtgagaccccagaactggggcgagaacagctgcgaggtgagattcgtgatcctggtgctggccccccccaagatgaagagcaccaagaccgccatggaggtggccagaaccttcgccaccatgttcagcgacatcgccttcagacagaagctgctggagaccagaaccgaggaggagttcaaggaggccctggtgcaccagagacagctgctgaccatggtgagccacggccccgtggcccccagaaccaaggagagaagcaccgtgagcctgcccgcccacagacaccccgagccccccaagtgcaaggacttcgtgcccttcggcaagggcatcagagaggacatcgccagaagattccccctgtaccccctggacttcaccgacggcatcatcggcaagaacaaggccgtgggcaagtacatcaccaccaccctgttcctgtacttcgcctgcctgctgcccaccatcgccttcggcagcctgaacgacgagaacaccgacggcgccatcgacgtgcagaagaccatcgccggccagagcatcggcggcctgctgtacgccctgttcagcggccagcccctggtgatcctgctgaccaccgcccccctggccctgtacatccaggtgatcagagtgatctgcgacgactacgacctggacttcaacagcttctacgcctggaccggcctgtggaacagcttcttcctggccctgtacgccttcttcaacctgagcctggtgatgagcctgttcaagagaagcaccgaggagatcatcgccctgttcatcagcatcaccttcgtgctggacgccgtgaagggcaccgtgaagatcttctggaagtactactacggccactacctggacgactaccacaccaagagaaccagcagcctggtgagcctgagcggcctgggcgccagcctgaacgccagcctgcacaccgccctgaacgccagcttcctggccagccccaccgagctgcccagcgccacccacagcggccaggccaccgccgtgctgagcctgctgatcatgctgggcaccctgtggctgggctacaccctgtaccagttcaagaagagcccctacctgcacccctgcgtgagagagatcctgagcgactgcgccctgcccatcgccgtgctggccttcagcctgatcagcagccacggcttcagagagatcgagatgagcaagttcagatacaaccccagcgagagccccttcgccatggcccagatccagagcctgagcctgagagccgtgagcggcgccatgggcctgggcttcctgctgagcatgctgttcttcatcgagcagaacctggtggccgccctggtgaacgcccccgagaacagactggtgaagggcaccgcctaccactgggacctgctgctgctggccatcatcaacaccggcctgagcctgttcggcctgccctggatccacgccgcctacccccacagccccctgcacgtgagagccctggccctggtggaggagagagtggagaacggccacatctacgacaccatcgtgaacgtgaaggagaccagactgaccagcctgggcgccagcgtgctggtgggcctgagcctgctgctgctgcccgtgcccctgcagtggatccccaagcccgtgctgtacggcctgttcctgtacatcgccctgaccagcctggacggcaaccagctggtgcagagagtggccctgctgctgaaggagcagaccgcctacccccccacccactacatcagaagagtgccccagagaaagatccactacttcaccggcctgcaggtgctgcagctgctgctgctgtgcgccttcggcatgagcagcctgccctacatgaagatgatcttccccctgatcatgatcgccatgatccccatcagatacatcctgctgcccagaatcatcgaggccaagtacctggacgtgatggacgccgagcacagaccctag

SEQ ID NO: 100046 - DNA, 951 bp, synthetic construct
  misc_feature 1..951: note = Description of Artificial Sequence: Synthetic coding sequence
  source 1..951: mol_type = other DNA
atggccgccgccaccagaagagtgttccacctgcagccctgcgagaacagccccaccatgagccagaacggctacttcgaggacagcagctactacaagtgcgacaccgacgacaccttcgaggccagagaggagatcctgggcgacgaggccttcgacaccgccaacagcagcatcgtgagcggcgagagcatcagattcttcgtgaacgtgaacctggagatgcaggccaccaacaccgagaacgaggccaccagcggcggctgcgtgctgctgcacaccagcagaaagtacctgaagctgaagaacttcaaggaggagatcagagcccacagagacctggacggcttcctggcccaggccagcatcgtgctgaacgagaccgccaccagcctggacaacgtgctgagaaccatgctgagaagattcgccagagaccccgacaacaacgagcccaactgcaacctggacctgctgatggccatgctgttcaccgacgccggcgcccccatgagaggcaaggtgcacctgctgagcgacaccatccagggcgtgaccgccaccgtgaccggcgtgagataccagcagagctggctgtgcatcatctgcaccatgaaggccctgcagaagagacacgtgtgcatcagcagactggtgagaccccagaactggggcgagaacagctgcgaggtgagattcgtgatcctggtgctggccccccccaagatgaagagcaccaagaccgccatggaggtggccagaaccttcgccaccatgttcagcgacatcgccttcagacagaagctgctggagaccagaaccgaggaggagttcaaggaggccctggtgcaccagagacagctgctgaccatggtgagccacggccccgtggcccccagaaccaaggagagaagcaccgtgagcctgcccgcccacagacaccccgagtag

SEQ ID NO: 100047 - DNA, 2628 bp, synthetic construct
  misc_feature 1..2628: note = Description of Artificial Sequence: Synthetic coding sequence
  source 1..2628: mol_type = other DNA
atggccgccgccaccagaagagtgttccacctgcagccctgcgagaacagccccaccatgagccagaacggctacttcgaggacagcagctactacaagtgcgacaccgacgacaccttcgaggccagagaggagatcctgggcgacgaggccttcgacaccgccaacagcagcatcgtgagcggcgagagcatcagattcttcgtgaacgtgaacctggagatgcaggccaccaacaccgagaacgaggccaccagcggcggctgcgtgctgctgcacaccagcagaaagtacctgaagctgaagaacttcaaggaggagatcagagcccacagagacctggacggcttcctggcccaggccagcatcgtgctgaacgagaccgccaccagcctggacaacgtgctgagaaccatgctgagaagattcgccagagaccccgacaacaacgagcccaactgcaacctggacctgctgatggccatgctgttcaccgacgccggcgcccccatgagaggcaaggtgcacctgctgagcgacaccatccagggcgtgaccgccaccgtgaccggcgtgagataccagcagagctggctgtgcatcatctgcaccatgaaggccctgcagaagagacacgtgtgcatcagcagactggtgagaccccagaactggggcgagaacagctgcgaggtgagattcgtgatcctggtgctggccccccccaagatgaagagcaccaagaccgccatggaggtggccagaaccttcgccaccatgttcagcgacatcgccttcagacagaagctgctggagaccagaaccgaggaggagttcaaggaggccctggtgcaccagagacagctgctgaccatggtgagccacggccccgtggcccccagaaccaaggagagaagcaccgtgagcctgcccgcccacagacaccccgagccccccaagtgcaaggacttcgtgcccttcggcaagggcatcagagaggacatcgccagaagattccccctgtaccccctggacttcaccgacggcatcatcggcaagaacaaggccgtgggcaagtacatcaccaccaccctgttcctgtacttcgcctgcctgctgcccaccatcgccttcggcagcctgaacgacgagaacaccgacggcgccatcgacgtgcagaagaccatcgccggccagagcatcggcggcctgctgtacgccctgttcagcggccagcccctggtgatcctgctgaccaccgcccccctggccctgtacatccaggtgatcagagtgatctgcgacgactacgacctggacttcaacagcttctacgcctggaccggcctgtggaacagcttcttcctggccctgtacgccttcttcaacctgagcctggtgatgagcctgttcaagagaagcaccgaggagatcatcgccctgttcatcagcatcaccttcgtgctggacgccgtgaagggcaccgtgaagatcttctggaagtactactacggccactacctggacgactaccacaccaagagaaccagcagcctggtgagcctgagcggcctgggcgccagcctgaacgccagcctgcacaccgccctgaacgccagcttcctggccagccccaccgagctgcccagcgccacccacagcggccaggccaccgccgtgctgagcctgctgatcatgctgggcaccctgtggctgggctacaccctgtaccagttcaagaagagcccctacctgcacccctgcgtgagagagatcctgagcgactgcgccctgcccatcgccgtgctggccttcagcctgatcagcagccacggcttcagagagatcgagatgagcaagttcagatacaaccccagcgagagccccttcgccatggcccagatccagagcctgagcctgagagccgtgagcggcgccatgggcctgggcttcctgctgagcatgctgttcttcatcgagcagaacctggtggccgccctggtgaacgcccccgagaacagactggtgaagggcaccgcctaccactgggacctgctgctgctggccatcatcaacaccggcctgagcctgttcggcctgccctggatccacgccgcctacccccacagccccctgcacgtgagagccctggccctggtggaggagagagtggagaacggccacatctacgacaccatcgtgaacgtgaaggagaccagactgaccagcctgggcgccagcgtgctggtgggcctgagcctgctgctgctgcccgtgcccctgcagtggatccccaagcccgtgctgtacggcctgttcctgtacatcgccctgaccagcctggacggcaaccagctggtgcagagagtggccctgctgctgaaggagcagaccgcctacccccccacccactacatcagaagagtgccccagagaaagatccactacttcaccggcctgcaggtgctgcagctgctgctgctgtgcgccttcggcatgagcagcctgccctacatgaagatgatcttccccctgatcatgatcgccatgatccccatcagatacatcctgctgcccagaatcatcgaggccaagtacctggacgtgatggacgccgagcacagaccctag

SEQ ID NO: 100048 - DNA, 1113 bp, synthetic construct
  misc_feature 1..1113: note = Description of Artificial Sequence: Synthetic coding sequence
  source 1..1113: mol_type = other DNA
atgaccctggccagcagactgagcaccgccgccaacaccggccagatcgacgacccccaggagcagcacagagtgatcagcagcaacctggccctgatccaggtgcaggccaccgtggtgggcctgctggccgccgtggccgccctgctgctgggcgtggtgagcagagaggaggtggacgtggccaaggtggagctgctgtgcgccagcagcgtgctgaccgccttcctggccgccttcgccctgggcgtgctgatggtgtgcatcgtgatcggcgccagaaagctgggcgtgaaccccgacaacatcgccacccccatcgccgccagcctgggcgacctgatcaccctgagcatcctggccctggtgagcagcttcttctacagacacaaggacagcagatacctgacccccctggtgtgcctgagcttcgccgccctgacccccgtgtgggtgctgatcgccaagcagagcccccccatcgtgaagatcctgaagttcggctggttccccatcatcctggccatggtgatcagcagcttcggcggcctgatcctgagcaagaccgtgagcaagcagcagtacaagggcatggccatcttcacccccgtgatctgcggcgtgggcggcaacctggtggccatccagaccagcagaatcagcacctacctgcacatgtggagcgcccccggcgtgctgcccctgcagatgaagaagttctggcccaacccctgcagcaccttctgcaccagcgagatcaacagcatgagcgccagagtgctgctgctgctggtggtgcccggccacctgatcttcttctacatcatctacctggtggagggccagagcgtgatcaacagccagaccttcgtggtgctgtacctgctggccggcctgatccaggtgaccatcctgctgtacctggccgaggtgatggtgagactgacctggcaccaggccctggaccccgacaaccactgcatcccctacctgaccggcctgggcgacctgctgggcaccggcctgctggccctgtgcttcttcaccgactggctgctgaagagcaaggccgagctgggcggcatcagcgagctggccagcggccccccctag

SEQ ID NO: 100049 - DNA, 1542 bp, synthetic construct
  misc_feature 1..1542: note = Description of Artificial Sequence: Synthetic coding sequence
  source 1..1542: mol_type = other DNA
atgagcagcaagcccgagcccaaggacgtgcaccagctgaacggcaccggccccagcgccagcccctgcagcagcgacggccccggcagagagcccctggccggcaccagcgagttcctgggccccgacggcgccggcgtggaggtggtgatcgagagcagagccaacgccaagggcgtgagagaggaggacgccctgctggagaacggcagccagagcaacgagagcgacgacgtgagcaccgacagaggccccgccccccccagccccctgaaggagaccagcttcagcatcggcctgcaggtgctgttccccttcctgctggccggcttcggcaccgtggccgccggcatggtgctggacatcgtgcagcactgggaggtgttccagaaggtgaccgaggtgttcatcctggtgcccgccctgctgggcctgaagggcaacctggagatgaccctggccagcagactgagcaccgccgccaacatcggccacatggacacccccaaggagctgtggagaatgatcaccggcaacatggccctgatccaggtgcaggccaccgtggtgggcttcctggccagcatcgccgccgtggtgttcggctggatccccgacggccacttcagcatcccccacgccttcctgctgtgcgccagcagcgtggccaccgccttcatcgccagcctggtgctgggcatgatcatgatcggcgtgatcatcggcagcagaaagatcggcatcaaccccgacaacgtggccacccccatcgccgccagcctgggcgacctgatcaccctggccctgctgagcggcatcagctggggcctgtacctggagctgaaccactggagatacatctaccccctggtgtgcgccttcttcgtggccctgctgcccgtgtgggtggtgctggccagaagaagccccgccaccagagaggtgctgtacagcggctgggagcccgtgatcatcgccatggccatcagcagcgtgggcggcctgatcctggacaagaccgtgagcgaccccaacttcgccggcatggccgtgttcacccccgtgatcaacggcgtgggcggcaacctggtggccgtgcaggccagcagaatcagcaccttcctgcacatgaacggcatgcccggcgagaacagcgagcaggcccccagaagatgccccagcccctgcaccaccttcttcagccccgacgtgaacagcagaagcgccagagtgctgttcctgctggtggtgcccggccacctggtgttcctgtacaccatcagctgcatgcagggcggccacaccaccctgaccctgatcttcatcatcttctacatgaccgccgccctgctgcaggtgctgatcctgctgtacatcgccgactggatggtgcactggatgtggggcagaggcctggaccccgacaacttcagcatcccctacctgaccgccctgggcgacctgctgggcaccggcctgctggccctgagcttccacgtgctgtggctgatcggcgacagagacaccgacgtgggcgactag

SEQ ID NO: 100050 - DNA, 1722 bp, synthetic construct
  misc_feature 1..1722: note = Description of Artificial Sequence: Synthetic coding sequence
  source 1..1722: mol_type = other DNA
atgaccaacagcaagggcagaagcatcaccgacaagaccagcggcggccccagcagcggcggcggcttcgtggactggaccctgagactgaacaccatccagagcgacaagttcctgaacctgctgctgagcatggtgcccgtgatctaccagaagaaccaggaggacagacacaagaaggccaacggcatctggcaggacggcctgagcaccgccgtgcagaccttcagcaacagaagcgagcagcacatggagtaccacagcttcagcgagcagagcttccacgccaacaacggccacgccagcagcagctgcagccagaagtacgacgactacgccaactacaactactgcgacggcagagagaccagcgagaccaccgccatgctgcaggacgaggacatcagcagcgacggcgacgaggacgccatcgtggaggtgacccccaagctgcccaaggagagcagcggcatcatggccctgcagatcctggtgcccttcctgctggccggcttcggcaccgtgagcgccggcatggtgctggacatcgtgcagcactgggaggtgttcagaaaggtgaccgaggtgttcatcctggtgcccgccctgctgggcctgaagggcaacctggagatgaccctggccagcagactgagcaccgccgtgaacatcggcaagatggacagccccatcgagaagtggaacctgatcatcggcaacctggccctgaagcaggtgcaggccaccgtggtgggcttcctggccgccgtggccgccatcatcctgggctggatccccgagggcaagtactacctggaccacagcatcctgctgtgcagcagcagcgtggccaccgccttcatcgccagcctgctgcagggcatcatcatggtgggcgtgatcgtgggcagcaagaagaccggcatcaaccccgacaacgtggccacccccatcgccgccagcttcggcgacctgatcaccctggccatcctggcctggatcagccagggcctgtacagctgcctggagacctactactacatcagccccctggtgggcgtgttcttcctggccctgacccccatctggatcatcatcgccgccaagcaccccgccaccagaaccgtgctgcacagcggctgggagcccgtgatcaccgccatggtgatcagcagcatcggcggcctgatcctggacaccaccgtgagcgaccccaacctggtgggcatcgtggtgtacacccccgtgatcaacggcatcggcggcaacctggtggccatccaggccagcagaatcagcacctacctgcacctgcacagcatccccggcgagctgcccgacgagcccaagggctgctactaccccttcagaaccttcttcggccccggcgtgaacaacaagagcgcccaggtgctgctgctgctggtgatccccggccacctgatcttcctgtacaccatccacctgatgaagagcggccacaccagcctgaccatcatcttcatcgtggtgtacctgttcggcgccgtgctgcaggtgttcaccctgctgtggatcgccgactggatggtgcaccacttctggagaaagggcaaggaccccgacagcttcagcatcccctacctgaccgccctgggcgacctgctgggcaccgccctgctggccctgagcttccacttcctgtggctgatcggcgacagagacggcgacgtgggcgactag

SEQ ID NO: 100051 - DNA, 369 bp, synthetic construct
  misc_feature 1..369: note = Description of Artificial Sequence: Synthetic coding sequence
  source 1..369: mol_type = other DNA
atgaccaacagcaagggcagaagcatcaccgacaagaccagcggcggccccagcagcggcggcggcttcgtggactggaccctgagactgaacaccatccagagcgacaagttcctgaacctgctgctgagcatggtgcccgtgatctaccagaagaaccaggaggacagacacaagaaggccaacggcatctggcaggacggcctgagcaccgccgtgcagaccttcagcaacagaagcgagcagcacatggagtaccacagcttcagcgagcagagcttccacgccaacaacggccacgccagcagcagctgcagccagaagtacgacgactacgccaactacaactactgcgacggcagagagtag

SEQ ID NO: 100052 - DNA, 432 bp, synthetic construct
  misc_feature 1..432: note = Description of Artificial Sequence: Synthetic coding sequence
  source 1..432: mol_type = other DNA
atgaccaacagcaagggcagaagcatcaccgacaagaccagcggcggccccagcagcggcggcggcttcgtggactggaccctgagactgaacaccatccagagcgacaagttcctgaacctgctgctgagcatggtgcccgtgatctaccagaagaaccaggaggacagacacaagaaggccaacggcatctggcaggacggcctgagcaccgccgtgcagaccttcagcaacagaagcgagcagcacatggagtaccacagcttcagcgagcagagcttccacgccaacaacggccacgccagcagcagctgcagccagaagtacgacgactacgccaactacaactactgcgacggcagagagaccagcgagaccaccgccatgctgcaggacgaggacatcagcagcgacggcgacgaggacgcctag

SEQ ID NO: 100053 - DNA, 141 bp, synthetic construct
  misc_feature 1..141: note = Description of Artificial Sequence: Synthetic coding sequence
  source 1..141: mol_type = other DNA
atgaccaacagcaagggcagaagcatcaccgacaagaccagcggcggccccagcagcggcggcggcttcgtggactggaccctgagactgaacaccatccagagcgacaagttcctgaacctgctgctgagcatggtgtag

SEQ ID NO: 100054 - DNA, 219 bp, synthetic construct
  misc_feature 1..219: note = Description of Artificial Sequence: Synthetic coding sequence
  source 1..219: mol_type = other DNA
atgaccaacagcaagggcagaagcatcaccgacaagaccagcggcggccccagcagcggcggcggcttcgtggactggaccctgagactgaacaccatccagagcgacaagttcctgaacctgctgctgagcatggtgcccgtgatctaccagaagaaccaggaggacagacacaagaaggccaacggcatctggcaggacggcctgagcaccgcctag

SEQ ID NO: 100055 - DNA, 39 bp, synthetic construct
  misc_feature 1..39: note = Description of Artificial Sequence: Synthetic coding sequence
  source 1..39: mol_type = other DNA
atgaccaacagcaagggcagaagcatcaccgacaagtag

SEQ ID NO: 100056 - DNA, 231 bp, synthetic construct
  misc_feature 1..231: note = Description of Artificial Sequence: Synthetic coding sequence
  source 1..231: mol_type = other DNA
atgaccaacagcaagggcagaagcatcaccgacaagaccagcggcggccccagcagcggcggcggcttcgtggactggaccctgagactgaacaccatccagagcgacaagttcctgaacctgctgctgagcatggtgcccgtgatctaccagaagaaccaggaggacagacacaagaaggccaacggcatctggcaggacggcctgagcaccgccgtgcagaccttctag

SEQ ID NO: 100057 - DNA, 285 bp, synthetic construct
  misc_feature 1..285: note = Description of Artificial Sequence: Synthetic coding sequence
  source 1..285: mol_type = other DNA
atgaccaacagcaagggcagaagcatcaccgacaagaccagcggcggccccagcagcggcggcggcttcgtggactggaccctgagactgaacaccatccagagcgacaagttcctgaacctgctgctgagcatggtgcccgtgatctaccagaagaaccaggaggacagacacaagaaggccaacggcatctggcaggacggcctgagcaccgccgtgcagaccttcagcaacagaagcgagcagcacatggagtaccacagcttcagcgagcagagcttctag

SEQ ID NO: 100058 - DNA, 1524 bp, synthetic construct
  misc_feature 1..1524: note = Description of Artificial Sequence: Synthetic coding sequence
  source 1..1524: mol_type = other DNA
atggacggcaccgagaccagacagagaagactggacagctgcggcaagcccggcgagctgggcctgccccaccccctgagcaccggcggcctgcccgtggccagcgaggacggcgccctgagagcccccgagagccagagcgtgacccccaagcccctggagaccgagcccagcagagagaccacctggagcatcggcctgcaggtgaccgtgcccttcatgttcgccggcctgggcctgagctgggccggcatgctgctggactacttccagcactggcccgtgttcgtggaggtgaaggacctgctgaccctggtgccccccctggtgggcctgaagggcaacctggagatgaccctggccagcagactgagcaccgccgccaacaccggccagatcgacgacccccaggagcagcacagagtgatcagcagcaacctggccctgatccaggtgcaggccaccgtggtgggcctgctggccgccgtggccgccctgctgctgggcgtggtgagcagagaggaggtggacgtggccaaggtggagctgctgtgcgccagcagcgtgctgaccgccttcctggccgccttcgccctgggcgtgctgatggtgtgcatcgtgatcggcgccagaaagctgggcgtgaaccccgacaacatcgccacccccatcgccgccagcctgggcgacctgatcaccctgagcatcctggccctggtgagcagcttcttctacagacacaaggacagcagatacctgacccccctggtgtgcctgagcttcgccgccctgacccccgtgtgggtgctgatcgccaagcagagcccccccatcgtgaagatcctgaagttcggctggttccccatcatcctggccatggtgatcagcagcttcggcggcctgatcctgagcaagaccgtgagcaagcagcagtacaagggcatggccatcttcacccccgtgatctgcggcgtgggcggcaacctggtggccatccagaccagcagaatcagcacctacctgcacatgtggagcgcccccggcgtgctgcccctgcagatgaagaagttctggcccaacccctgcagcaccttctgcaccagcgagatcaacagcatgagcgccagagtgctgctgctgctggtggtgcccggccacctgatcttcttctacatcatctacctggtggagggccagagcgtgatcaacagccagaccttcgtggtgctgtacctgctggccggcctgatccaggtgaccatcctgctgtacctggccgaggtgatggtgagactgacctggcaccaggccctggaccccgacaaccactgcatcccctacctgaccggcctgggcgacctgctgggcagcagcagcgtgggccacaccgccgccgtgcccagaagatgcaccgccagccccggctggggcctgatccagcccttcatctgcacccagcacctgatcgtgagcctgctgagcttctacttccccttctgcctgctggccaagaccagcatctag

SEQ ID NO: 100059 - DNA, 1416 bp, synthetic construct
  misc_feature 1..1416: note = Description of Artificial Sequence: Synthetic coding sequence
  source 1..1416: mol_type = other DNA
atggacggcaccgagaccagacagagaagactggacagctgcggcaagcccggcgagctgggcctgccccaccccctgagcaccggcggcctgcccgtggccagcgaggacggcgccctgagagcccccgagagccagagcgtgacccccaagcccctggagaccgagcccagcagagagaccacctggagcatcggcctgcaggtgaccgtgcccttcatgttcgccggcctgggcctgagctgggccggcatgctgctggactacttccaggccaacaccggccagatcgacgacccccaggagcagcacagagtgatcagcagcaacctggccctgatccaggtgcaggccaccgtggtgggcctgctggccgccgtggccgccctgctgctgggcgtggtgagcagagaggaggtggacgtggccaaggtggagctgctgtgcgccagcagcgtgctgaccgccttcctggccgccttcgccctgggcgtgctgatggtgtgcatcgtgatcggcgccagaaagctgggcgtgaaccccgacaacatcgccacccccatcgccgccagcctgggcgacctgatcaccctgagcatcctggccctggtgagcagcttcttctacagacacaaggacagcagatacctgacccccctggtgtgcctgagcttcgccgccctgacccccgtgtgggtgctgatcgccaagcagagcccccccatcgtgaagatcctgaagttcggctggttccccatcatcctggccatggtgatcagcagcttcggcggcctgatcctgagcaagaccgtgagcaagcagcagtacaagggcatggccatcttcacccccgtgatctgcggcgtgggcggcaacctggtggccatccagaccagcagaatcagcacctacctgcacatgtggagcgcccccggcgtgctgcccctgcagatgaagaagttctggcccaacccctgcagcaccttctgcaccagcgagatcaacagcatgagcgccagagtgctgctgctgctggtggtgcccggccacctgatcttcttctacatcatctacctggtggagggccagagcgtgatcaacagccagaccttcgtggtgctgtacctgctggccggcctgatccaggtgaccatcctgctgtacctggccgaggtgatggtgagactgacctggcaccaggccctggaccccgacaaccactgcatcccctacctgaccggcctgggcgacctgctgggcagcagcagcgtgggccacaccgccgccgtgcccagaagatgcaccgccagccccggctggggcctgatccagcccttcatctgcacccagcacctgatcgtgagcctgctgagcttctacttccccttctgcctgctggccaagaccagcatctag

SEQ ID NO: 100060 - DNA, 1464 bp, synthetic construct
  misc_feature 1..1464: note = Description of Artificial Sequence: Synthetic coding sequence
  source 1..1464: mol_type = other DNA
atggacggcaccgagaccagacagagaagactggacagctgcggcaagcccggcgagctgggcctgccccaccccctgagcaccggcggcctgcccgtggccagcgaggacggcgccctgagagcccccgagagccagagcgtgacccccaagcccctggagaccgagcccagcagagagaccacctggagcatcggcctgcaggtgaccgtgcccttcatgttcgccggcctgggcctgagctgggccggcatgctgctggactacttccagcactggcccgtgttcgtggaggtgaaggacctgctgaccctggtgccccccctggtgggcctgaagggcaacctggagatgaccctggccagcagactgagcaccgccgccaacaccggccagatcgacgacccccaggagcagcacagagtgatcagcagcaacctggccctgatccaggtgcaggccaccgtggtgggcctgctggccgccgtggccgccctgctgctgggcgtggtgagcagagaggaggtggacgtggccaaggtggagctgctgtgcgccagcagcgtgctgaccgccttcctggccgccttcgccctgggcgtgctgatggtgtgcatcgtgatcggcgccagaaagctgggcgtgaaccccgacaacatcgccacccccatcgccgccagcctgggcgacctgatcaccctgagcatcctggccctggtgagcagcttcttctacagacacaaggacagcagatacctgacccccctggtgtgcctgagcttcgccgccctgacccccgtgtgggtgctgatcgccaagcagagcccccccatcgtgaagatcctgaagttcggctggttccccatcatcctggccatggtgatcagcagcttcggcggcctgatcctgagcaagaccgtgagcaagcagcagtacaagggcatggccatcttcacccccgtgatctgcggcgtgggcggcaacctggtggccatccagaccagcagaatcagcacctacctgcacatgtggagcgcccccggcgtgctgcccctgcagatgaagaagttctggcccaacccctgcagcaccttctgcaccagcgagatcaacagcatgagcgccagagtgctgctgctgctggtggtgcccggccacctgatcttcttctacatcatctacctggtggagggccagagcgtgatcaacagccagaccttcgtggtgctgtacctgctggccggcctgatccaggtgaccatcctgctgtacctggccgaggtgatggtgagactgacctggcaccaggccctggaccccgacaaccactgcatcccctacctgaccggcctgggcgacctgctgggcaccggcctgctggccctgtgcttcttcaccgactggctgctgaagagcaaggccgagctgggcggcatcagcgagctggccagcggccccccctag

SEQ ID NO: 100061 - DNA, 1386 bp, synthetic construct
  misc_feature 1..1386: note = Description of Artificial Sequence: Synthetic coding sequence
  source 1..1386: mol_type = other DNA
atggtggtgacccagctgaacctggagttctgcttccagggcaagaagctgagaggcttcagctgcgagctgaccagaagcccccacggcgtgctgcccgagagcttcttcaccatcatgtgccaggtggtggtgcccatcctgctgagcggcctgtgcatgatgaccgccggcctggtgatgaacaccatccagcactggcccgtgttcgtggaggtgaaggacctgctgaccctggtgccccccctggtgggcctgaagggcaacctggagatgaccctggccagcagactgagcaccgccgccaacaccggccagatcgacgacccccaggagcagcacagagtgatcagcagcaacctggccctgatccaggtgcaggccaccgtggtgggcctgctggccgccgtggccgccctgctgctgggcgtggtgagcagagaggaggtggacgtggccaaggtggagctgctgtgcgccagcagcgtgctgaccgccttcctggccgccttcgccctgggcgtgctgatggtgtgcatcgtgatcggcgccagaaagctgggcgtgaaccccgacaacatcgccacccccatcgccgccagcctgggcgacctgatcaccctgagcatcctggccctggtgagcagcttcttctacagacacaaggacagcagatacctgacccccctggtgtgcctgagcttcgccgccctgacccccgtgtgggtgctgatcgccaagcagagcccccccatcgtgaagatcctgaagttcggctggttccccatcatcctggccatggtgatcagcagcttcggcggcctgatcctgagcaagaccgtgagcaagcagcagtacaagggcatggccatcttcacccccgtgatctgcggcgtgggcggcaacctggtggccatccagaccagcagaatcagcacctacctgcacatgtggagcgcccccggcgtgctgcccctgcagatgaagaagttctggcccaacccctgcagcaccttctgcaccagcgagatcaacagcatgagcgccagagtgctgctgctgctggtggtgcccggccacctgatcttcttctacatcatctacctggtggagggccagagcgtgatcaacagccagaccttcgtggtgctgtacctgctggccggcctgatccaggtgaccatcctgctgtacctggccgaggtgatggtgagactgacctggcaccaggccctggaccccgacaaccactgcatcccctacctgaccggcctgggcgacctgctgggcaccggcctgctggccctgtgcttcttcaccgactggctgctgaagagcaaggccgagctgggcggcatcagcgagctggccagcggccccccctag

SEQ ID NO: 100062 - DNA, 1437 bp, synthetic construct
  misc_feature 1..1437: note = Description of Artificial Sequence: Synthetic coding sequence
  source 1..1437: mol_type = other DNA
atggacggcaccgagaccagacagagaagactggacagctgcggcaagcccggcgagctgggcctgccccaccccctgagcaccggcggcctgcccgtggccagcgaggacggcgccctgagagcccccgagagccagagcgtgacccccaagcccctggagaccgagcccagcagagtgaccgtgcccttcatgttcgccggcctgggcctgagctgggccggcatgctgctggactacttccagcactggcccgtgttcgtggaggtgaaggacctgctgaccctggtgccccccctggtgggcctgaagggcaacctggagatgaccctggccagcagactgagcaccgccgccaacaccggccagatcgacgacccccaggagcagcacagagtgatcagcagcaacctggccctgatccaggtgcaggccaccgtggtgggcctgctggccgccgtggccgccctgctgctgggcgtggtgagcagagaggaggtggacgtggccaaggtggagctgctgtgcgccagcagcgtgctgaccgccttcctggccgccttcgccctgggcgtgctgatggtgtgcatcgtgatcggcgccagaaagctgggcgtgaaccccgacaacatcgccacccccatcgccgccagcctgggcgacctgatcaccctgagcatcctggccctggtgagcagcttcttctacagacacaaggacagcagatacctgacccccctggtgtgcctgagcttcgccgccctgacccccgtgtgggtgctgatcgccaagcagagcccccccatcgtgaagatcctgaagttcggctggttccccatcatcctggccatggtgatcagcagcttcggcggcctgatcctgagcaagaccgtgagcaagcagcagtacaagggcatggccatcttcacccccgtgatctgcggcgtgggcggcaacctggtggccatccagaccagcagaatcagcacctacctgcacatgtggagcgcccccggcgtgctgcccctgcagatgaagaagttctggcccaacccctgcagcaccttctgcaccagcgagatcaacagcatgagcgccagagtgctgctgctgctggtggtgcccggccacctgatcttcttctacatcatctacctggtggagggccagagcgtgatcaacagccagaccttcgtggtgctgtacctgctggccggcctgatccaggtgaccatcctgctgtacctggccgaggtgatggtgagactgacctggcaccaggccctggaccccgacaaccactgcatcccctacctgaccggcctgggcgacctgctgggcaccggcctgctggccctgtgcttcttcaccgactggctgctgaagagcaaggccgagctgggcggcatcagcgagctggccagcggccccccctag

SEQ ID NO: 100063 - DNA, 459 bp, synthetic construct
  misc_feature 1..459: note = Description of Artificial Sequence: Synthetic coding sequence
  source 1..459: mol_type = other DNA
atggacggcaccgagaccagacagagaagactggacagctgcggcaagcccggcgagctgggcctgccccaccccctgagcaccggcggcctgcccgtggccagcgaggacggcgccctgagagcccccgagagccagagcgtgacccccaagcccctggagaccgagcccagcagagagaccacctggagcatcggcctgcaggtgaccgtgcccttcatgttcgccggcctgggcctgagctgggccggcatgctgctggactacttccagcactggcccgtgttcgtggaggtgaaggacctgctgaccctggtgccccccctggtgggcctgaagggcaacctggagatgaccctggccagcagactgagcaccgccgccaacaccggccagatcgacgacccccaggagcagcacagagtgatcagcagcaacctggccctgatccaggtgtag

SEQ ID NO: 100064 - DNA, 459 bp, synthetic construct; identical to SEQ ID NO: 100063
  misc_feature 1..459: note = Description of Artificial Sequence: Synthetic coding sequence
  source 1..459: mol_type = other DNA

SEQ ID NO: 100065 - DNA, 261 bp, synthetic construct
  misc_feature 1..261: note = Description of Artificial Sequence: Synthetic coding sequence
  source 1..261: mol_type = other DNA
atggacggcaccgagaccagacagagaagactggacagctgcggcaagcccggcgagctgggcctgccccaccccctgagcaccggcggcctgcccgtggccagcgaggacggcgccctgagagcccccgagagccagagcgtgacccccaagcccctggagaccgagcccagcagagagaccacctggagcatcggcctgcaggtgaccgtgcccttcatgttcgccggcctgggcctgagctgggccggcatgctgtag

SEQ ID NO: 100066 - DNA, 606 bp, synthetic construct
  misc_feature 1..606: note = Description of Artificial Sequence: Synthetic coding sequence
  source 1..606: mol_type = other DNA
atggacggcaccgagaccagacagagaagactggacagctgcggcaagcccggcgagctgggcctgccccaccccctgagcaccggcggcctgcccgtggccagcgaggacggcgccctgagagcccccgagagccagagcgtgacccccaagcccctggagaccgagcccagcagagagaccacctggagcatcggcctgcaggtgaccgtgcccttcatgttcgccggcctgggcctgagctgggccggcatgctgctggactacttccagcactggcccgtgttcgtggaggtgaaggacctgctgaccctggtgccccccctggtgggcctgaagggcaacctggagatgaccctggccagcagactgagcaccgccgccaacaccggccagatcgacgacccccaggagcagcacagagtgatcagcagcaacctggccctgatccaggtgcaggccaccgtggtgggcctgctggccgccgtggccgccctgctgctgggcgtggtgagcagagaggaggtggacgtggccaaggtggagctgctgtgcgccagcagcgtgctgaccgccttcctggccgccttcgccctgggcgagtag

SEQ ID NO: 100067 - DNA, 414 bp, synthetic construct
  misc_feature 1..414: note = Description of Artificial Sequence: Synthetic coding sequence
  source 1..414: mol_type = other DNA
atggacggcaccgagaccagacagagaagactggacagctgcggcaagcccggcgagctgggcctgccccaccccctgagcaccggcggcctgcccgtggccagcgaggacggcgccctgagagcccccgagagccagagcgtgacccccaagcccctggagaccgagcccagcagagagaccacctggagcatcggcctgcaggtgaccgtgcccttcatgttcgccggcctgggcctgagctgggccggcatgctgctggactacttccaggccaacaccggccagatcgacgacccccaggagcagcacagagtgatcagcagcaacctggccctgatccaggtgcaggccaccgtggtgggcctgctggccgccgtggccgccctgctgctgggcgtggtgagcagatag

SEQ ID NO: 100068 - DNA, 459 bp, synthetic construct; identical to SEQ ID NO: 100063
  misc_feature 1..459: note = Description of Artificial Sequence: Synthetic coding sequence
  source 1..459: mol_type = other DNA

SEQ ID NO: 100069 - DNA, 1680 bp, synthetic construct
  misc_feature 1..1680: note = Description of Artificial Sequence: Synthetic coding sequence
  source 1..1680: mol_type = other DNA
atggcccccaccctgcagcaggcctacagaagaagatggtggatggcctgcaccgccgtgctggagaacctgttcttcagcgccgtgctgctgggctggggcagcctgctgatcatcctgaagaacgagggcttctacagcagcacctgccccgccgagagcagcaccaacaccacccaggacgagcagagaagatggcccggctgcgaccagcaggacgagatgctgaacctgggcttcaccatcggcagcttcgtgctgagcgccaccaccctgcccctgggcatcctgatggacagattcggccccagacccgtgagactggtgggcagcgcctgcttcaccgccagctgcaccctgatggccctggccagcagagacgtggaggccctgagccccctgatcttcctggccctgagcctgaacggcttcggcggcatctgcctgaccttcaccagcctgaccctgcccaacatgttcggcaacctgagaagcaccctgatggccctgatgatcggcagctacgccagcagcgccatcaccttccccggcatcaagctgatctacgacgccggcgtggccttcgtggtgatcatgttcacctggagcggcctggcctgcctgatcttcctgaactgcaccctgaactggcccatcgaggccttccccgcccccgaggaggtgaactacaccaagaagatcaagctgagcggcctggccctggaccacaaggtgaccggcgacctgttctacacccacgtgaccaccatgggccagagactgagccagaaggcccccagcctggaggacggcagcgacgccttcatgagcccccaggacgtgagaggcaccagcgagaacctgcccgagagaagcgtgcccctgagaaagagcctgtgcagccccaccttcctgtggagcctgctgaccatgggcatgacccagctgagaatcatcttctacatggccgccgtgaacaagatgctggagtacctggtgaccggcggccaggagcacgagaccaacgagcagcagcagaaggtggccgagaccgtgggcttctacagcagcgtgttcggcgccatgcagctgctgtgcctgctgacctgccccctgatcggctacatcatggactggagaatcaaggactgcgtggacgcccccacccagggcaccgtgctgggcgacgccagagacggcgtggccaccaagagcatcagacccagatactgcaagatccagaagctgaccaacgccatcagcgccttcaccctgaccaacctgctgctggtgggcttcggcatcacctgcctgatcaacaacctgcacctgcagttcgtgaccttcgtgctgcacaccatcgtgagaggcttcttccacagcgcctgcggcagcctgtacgccgccgtgttccccagcaaccacttcggcaccctgaccggcctgcagagcctgatcagcgccgtgttcgccctgctgcagcagcccctgttcatggccatggtgggccccctgaagggcgagcccttctgggtgaacctgggcctgctgctgttcagcctgctgggcttcctgctgcccagctacctgttctactacagagccagactgcagcaggagtacgccgccaacggcatgggccccctgaaggtgctgagcggcagcgaggtgaccgcctag

SEQ ID NO: 100070 - DNA, 1680 bp, synthetic construct; identical to SEQ ID NO: 100069
  misc_feature 1..1680: note = Description of Artificial Sequence: Synthetic coding sequence
  source 1..1680: mol_type = other DNA

SEQ ID NO: 100071 - DNA, 333 bp, synthetic construct
  misc_feature 1..333: note = Description of Artificial Sequence: Synthetic coding sequence
  source 1..333: mol_type = other DNA
atggcccccaccctgcagcaggcctacagaagaagatggtggatggcctgcaccgccgtgctggagaacctgttcttcagcgccgtgctgctgggctggggcagcctgctgatcatcctgaagaacgagggcttctacagcagcacctgccccgccgagagcagcaccaacaccacccaggacgagcagagaagatggcccggctgcgaccagcaggacgagatgctgaacctgggcttcaccatcggcagcttcgtgctgagcgccaccaccctgcccctgggcatcctgatggacagattcggccccagacccgtgagactggtgggctag

SEQ ID NO: 100072 - DNA, 1710 bp, synthetic construct
  misc_feature 1..1710: note = Description of Artificial Sequence: Synthetic coding sequence
  source 1..1710: mol_type = other DNA
atggcccccaccctggccaccgcccacagaagaagatggtggatggcctgcaccgccgtgctggagaacctgctgttcagcgccgtgctgctgggctggggcagcctgctgatcatgctgaagagcgagggcttctacagctacctgtgcaccgagcccgagaacgtgaccaacggcaccgtgggcggcaccgccgagcccggccacgaggaggtgagctggatgaacggctggctgagctgccaggcccaggacgagatgctgaacctggccttcaccgtgggcagcttcctgctgagcgccatcaccctgcccctgggcatcgtgatggacaagtacggccccagaaagctgagactgctgggcagcgcctgcttcgccgtgagctgcctgctgatcgcctacggcgccagcaagcccaacgccctgagcgtgctgatcttcatcgccctggccctgaacggcttcggcggcatgtgcatgaccttcaccagcctgaccctgcccaacatgttcggcgacctgagaagcaccttcatcgccctgatgatcggcagctacgccagcagcgccgtgaccttccccggcatcaagctgatctacgacgccggcgtgagcttcatcgtggtgctggtggtgtgggccggctgcagcggcctggtgttcctgaactgcttcttcaactggcccctggagcccttccccggccccgaggacatggactacagcgtgaagatcaagttcagctggctgggcttcgaccacaagatcaccggcaagcagttctacaagcaggtgaccaccgtgggcagaagactgagcgtgggcagcagcatgagaagcgccaaggagcaggtggccctgcaggagggccacaagctgtgcctgagcaccgtggacctggaggtgaagtgccagcccgacgccgccgtggcccccagcttcatgcacagcgtgttcagccccatcctgctgctgagcctggtgaccatgtgcgtgacccagctgagactgatcttctacatgggcgccatgaacaacatcctgaagttcctggtgagcggcgaccagaagaccgtgggcctgtacaccagcatcttcggcgtgctgcagctgctgtgcctgctgaccgcccccgtgatcggctacatcatggactggagactgaaggagtgcgaggacgccagcgaggagcccgaggagaaggacgccaaccagggcgagaagaagaagaagaagagagacagacagatccagaagatcaccaacgccatgagagccttcgccttcaccaacctgctgctggtgggcttcggcgtgacctgcctgatccccaacctgcccctgcagatcctgagcttcatcctgcacaccatcgtgagaggcttcatccacagcgccgtgggcggcctgtacgccgccgtgtaccccagcacccagttcggcagcctgaccggcctgcagagcctgatcagcgccctgttcgccctgctgcagcagcccctgttcctggccatgatgggccccctgcagggcgaccccctgtgggtgaacgtgggcctgctgctgctgagcctgctgggcttctgcctgcccctgtacctgatctgctacagaagacagctggagagacagctgcagcagagacaggaggacgacaagctgttcctgaagatcaacggcagcagcaaccaggaggccttcgtgtag

SEQ ID NO: 100073 - DNA, 1722 bp, synthetic construct
  misc_feature 1..1722: note = Description of Artificial Sequence: Synthetic coding sequence
  source 1..1722: mol_type = other DNA
atggcccccaccctggccaccgcccacagaagaagatggtggatggcctgcaccgccgtgctggagaacctgctgttcagcgccgtgctgctgggctggggcagcctgctgatcatgctgaagagcgagggcttctacagctacctgtgcaccgagcccgagaacgtgaccaacggcaccgtgggcggcaccgccgagcccggccacgaggaggtgagctggatgaacggctggctgagctgccaggcccaggacgagatgctgaacctggccttcaccgtgggcagcttcctgctgagcgccatcaccctgcccctgggcatcgtgatggacaagtacggccccagaaagctgagactgctgggcagcgcctgcttcgccgtgagctgcctgctgatcgcctacggcgccagcaagcccaacgccctgagcgtgctgatcttcatcgccctggccctgaacggcttcggcggcatgtgcatgaccttcaccagcctgaccctgcccaacatgttcggcgacctgagaagcaccttcatcgccctgatgatcggcagctacgccagcagcgccgtgaccttccccggcatcaagctgatctacgacgccggcgtgagcttcatcgtggtgctggtggtgtgggccggctgcagcggcctggtgttcctgaactgcttcttcaactggcccctggagcccttccccggccccgaggacatggactacagcgtgaagatcaagttcagctggctgggcttcgaccacaagatcaccggcaagcagttctacaagcaggtgaccaccgtgggcagaagactgagcgtgggcagcagcatgagaagcgccaaggagcaggtggccctgcaggagggccacaagctgtgcctgagcaccgtggacctggaggtgaagtgccagcccgacgccgccgtggcccccagcttcatgcacagcgtgttcagccccatcctgctgctgagcctggtgaccatgtgcgtgacccagctgagactgatcttctacatgggcgccatgaacaacatcctgaagttcctggtgagcggcgaccagaagaccgccagcagcaccgtgggcctgtacaccagcatcttcggcgtgctgcagctgctgtgcctgctgaccgcccccgtgatcggctacatcatggactggagactgaaggagtgcgaggacgccagcgaggagcccgaggagaaggacgccaaccagggcgagaagaagaagaagaagagagacagacagatccagaagatcaccaacgccatgagagccttcgccttcaccaacctgctgctggtgggcttcggcgtgacctgcctgatccccaacctgcccctgcagatcctgagcttcatcctgcacaccatcgtgagaggcttcatccacagcgccgtgggcggcctgtacgccgccgtgtaccccagcacccagttcggcagcctgaccggcctgcagagcctgatcagcgccctgttcgccctgctgcagcagcccctgttcctggccatgatgggccccctgcagggcgaccccctgtgggtgaacgtgggcctgctgctgctgagcctgctgggcttctgcctgcccctgtacctgatctgctacagaagacagctggagagacagctgcagcagagacaggaggacgacaagctgttcctgaagatcaacggcagcagcaaccaggaggccttcgtgtag

SEQ ID NO: 100074 - DNA, 1299 bp, synthetic construct
  misc_feature 1..1299: note = Description of Artificial Sequence: Synthetic coding sequence
  source 1..1299: mol_type = other DNA
atgacctacggcagcccccaggccaacgccagccccagcgacgccgtggccctggaccacggcgaggtgagcagaagacagcagcaggagctgcccaacatgttcggcgacctgagaagcaccttcatcgccctgatgatcggcagctacgccagcagcgccgtgaccttccccggcatcaagctgatctacgacgccggcgtgagcttcatcgtggtgctggtggtgtgggccggctgcagcggcctggtgttcctgaactgcttcttcaactggcccctggagcccttccccggccccgaggacatggactacagcgtgaagatcaagttcagctggctgggcttcgaccacaagatcaccggcaagcagttctacaagcaggtgaccaccgtgggcagaagactgagcgtgggcagcagcatgagaagcgccaaggagcaggtggccctgcaggagggccacaagctgtgcctgagcaccgtggacctggaggtgaagtgccagcccgacgccgccgtggcccccagcttcatgcacagcgtgttcagccccatcctgctgctgagcctggtgaccatgtgcgtgacccagctgagactgatcttctacatgggcgccatgaacaacatcctgaagttcctggtgagcggcgaccagaagaccgtgggcctgtacaccagcatcttcggcgtgctgcagctgctgtgcctgctgaccgcccccgtgatcggctacatcatggactggagactgaaggagtgcgaggacgccagcgaggagcccgaggagaaggacgccaaccagggcgagaagaagaagaagaagagagacagacagatccagaagatcaccaacgccatgagagccttcgccttcaccaacctgctgctggtgggcttcggcgtgacctgcctgatccccaacctgcccctgcagatcctgagcttcatcctgcacaccatcgtgagaggcttcatccacagcgccgtgggcggcctgtacgccgccgtgtaccccagcacccagttcggcagcctgaccggcctgcagagcctgatcagcgccctgttcgccctgctgcagcagcccctgttcctggccatgatgggccccctgcagggcgaccccctgtgggtgaacgtgggcctgctgctgctgagcctgctgggcttctgcctgcccctgtacctgatctgctacagaagacagctggagagacagctgcagcagagacaggaggacgacaagctgttcctgaagatcaacggcagcagcaaccaggaggccttcgtgtag

SEQ ID NO: 100075 - DNA, 1341 bp, synthetic construct
  misc_feature 1..1341: note = Description of Artificial Sequence: Synthetic coding sequence
  source 1..1341: mol_type = other DNA
atgaccagcaaggagatcatcctgggcctgtgcctgctgagcctggtgctgagcatgatcctgatggtgatcatcagatacatcagcagagtgctggtgtggatcctgaccatcctggtgatcctgggcagcctgggcggcaccggcgtgctgtggtggctgtacgccaagcagagaagaagccccaaggagaccgtgacccccgagcagctgcagatcgccgaggacaacctgagagccctgctgatctacgccatcagcgccaccgtgttcaccgtgatcctgttcctgatcatgctggtgatgagaaagagagtggccctgaccatcgccctgttccacgtggccggcaaggtgttcatccacctgcccctgctggtgttccagcccttctggaccttcttcgccctggtgctgttctgggtgtactggatcatgaccctgctgttcctgggcaccaccggcagccccgtgcagaacgagcagggcttcgtggagttcaagatcagcggccccctgcagtacatgtggtggtaccacgtggtgggcctgatctggatcagcgagttcatcctggcctgccagcagatgaccgtggccggcgccgtggtgacctactacttcaccagagacaagagaaacctgcccttcacccccatcctggccagcgtgaacagactgatcagataccacctgggcaccgtggccaagggcagcttcatcatcaccctggtgaagatccccagaatgatcctgatgtacatccacagccagctgaagggcaaggagaacgcctgcgccagatgcgtgctgaagagctgcatctgctgcctgtggtgcctggagaagtgcctgaactacctgaaccagaacgcctacaccgccaccgccatcaacagcaccaacttctgcaccagcgccaaggacgccttcgtgatcctggtggagaacgccctgagagtggccaccatcaacaccgtgggcgacttcatgctgttcctgggcaaggtgctgatcgtgtgcagcaccggcctggccggcatcatgctgctgaactaccagcaggactacaccgtgtgggtgctgcccctgatcatcgtgtgcctgttcgccttcctggtggcccactgcttcctgagcatctacgagatggtggtggacgtgctgttcctgtgcttcgccatcgacaccaagtacaacgacggcagccccggcagagagttctacatggacaaggtgctgatggagttcgtggagaacagcagaaaggccatgaaggaggccggcaagggcggcgtggccgacagcagagagctgaagcccatgctgaagaagagatag

SEQ ID NO: 100076 - DNA, 1974 bp, synthetic construct
  misc_feature 1..1974: note = Description of Artificial Sequence: Synthetic coding sequence
  source 1..1974: mol_type = other DNA
atgggctgctgcagcagcgccagcagcgccgcccagagcagcaagagagagtggaagcccctggaggacagaagctgcaccgacatcccctggctgctgctgttcatcctgttctgcatcggcatgggcttcatctgcggcttcagcatcgccaccggcgccgccgccagactggtgagcggctacgacagctacggcaacatctgcggccagaagaacaccaagctggaggccatccccaacagcggcatggaccacacccagagaaagtacgtgttcttcctggacccctgcaacctggacctgatcaacagaaagatcaagagcgtggccctgtgcgtggccgcctgccccagacaggagctgaagaccctgagcgacgtgcagaagttcgccgagatcaacggcagcgccctgtgcagctacaacctgaagcccagcgagtacaccaccagccccaagagcagcgtgctgtgccccaagctgcccgtgcccgccagcgcccccatccccttcttccacagatgcgcccccgtgaacatcagctgctacgccaagttcgccgaggccctgatcaccttcgtgagcgacaacagcgtgctgcacagactgatcagcggcgtgatgaccagcaaggagatcatcctgggcctgtgcctgctgagcctggtgctgagcatgatcctgatggtgatcatcagatacatcagcagagtgctggtgtggatcctgaccatcctggtgatcctgggcagcctgggcggcaccggcgtgctgtggtggctgtacgccaagcagagaagaagccccaaggagaccgtgacccccgagcagctgcagatcgccgaggacaacctgagagccctgctgatctacgccatcagcgccaccgtgttcaccgtgatcctgttcctgatcatgctggtgatgagaaagagagtggccctgaccatcgccctgttccacgtggccggcaaggtgttcatccacctgcccctgctggtgttccagcccttctggaccttcttcgccctggtgctgttctgggtgtactggatcatgaccctgctgttcctgggcaccaccggcagccccgtgcagaacgagcagggcttcgtggagttcaagatcagcggccccctgcagtacatgtggtggtaccacgtggtgggcctgatctggatcagcgagttcatcctggcctgccagcagatgaccgtggccggcgccgtggtgacctactacttcaccagagacaagagaaacctgcccttcacccccatcctggccagcgtgaacagactgatcagataccacctgggcaccgtggccaagggcagcttcatcatcaccctggtgaagatccccagaatgatcctgatgtacatccacagccagctgaagggcaaggagaacgcctgcgccagatgcgtgctgaagagctgcatctgctgcctgtggtgcctggagaagtgcctgaactacctgaaccagaacgcctacaccgccaccgccatcaacagcaccaacttctgcaccagcgccaaggacgccttcgtgatcctggtggagaacgccctgagagtggccaccatcaacaccgtgggcgacttcatgctgttcctgggcaaggtgctgatcgtgtgcagcaccggcctggccggcatcatgctgctgaactaccagcaggactacaccgtgtgggtgctgcccctgatcatcgtgtgcctgttcgccttcctggtggcccactgcttcctgagcatctacgagatggtggtggacgtgctgttcctgtgcttcgccatcgacaccaagtacaacgacggcagccccggcagagagttctacatggacaaggtgctgatggagttcgtggagaacagcagaaaggccatgaaggaggccggcaagggcggcgtggccgacagcagagagctgaagcccatggccagcggcgccagcagcgcctag

SEQ ID NO: 100077 - DNA, 1959 bp, synthetic construct
  misc_feature 1..1959: note = Description of Artificial Sequence: Synthetic coding sequence
  source 1..1959: mol_type = other DNA
atgggctgctgcagcagcgccagcagcgccgcccagagcagcaagagagagtggaagcccctggaggacagaagctgcaccgacatcccctggctgctgctgttcatcctgttctgcatcggcatgggcttcatctgcggcttcagcatcgccaccggcgccgccgccagactggtgagcggctacgacagctacggcaacatctgcggccagaagaacaccaagctggaggccatccccaacagcggcatggaccacacccagagaaagtacgtgttcttcctggacccctgcaacctggacctgatcaacagaaagatcaagagcgtggccctgtgcgtggccgcctgccccagacaggagctgaagaccctgagcgacgtgcagaagttcgccgagatcaacggcagcgccctgtgcagctacaacctgaagcccagcgagtacaccaccagccccaagagcagcgtgctgtgccccaagctgcccgtgcccgccagcgcccccatccccttcttccacagatgcgcccccgtgaacatcagctgctacgccaagttcgccgaggccctgatcaccttcgtgagcgacaacagcgtgctgcacagactgatcagcggcgtgatgaccagcaaggagatcatcctgggcctgtgcctgctgagcctggtgctgagcatgatcctgatggtgatcatcagatacatcagcagagtgctggtgtggatcctgaccatcctggtgatcctgggcagcctgggcggcaccggcgtgctgtggtggctgtacgccaagcagagaagaagccccaaggagaccgtgacccccgagcagctgcagatcgccgaggacaacctgagagccctgctgatctacgccatcagcgccaccgtgttcaccgtgatcctgttcctgatcatgctggtgatgagaaagagagtggccctgaccatcgccctgttccacgtggccggcaaggtgttcatccacctgcccctgctggtgttccagcccttctggaccttcttcgccctggtgctgttctgggtgtactggatcatgaccctgctgttcctgggcaccaccggcagccccgtgcagaacgagcagggcttcgtggagttcaagatcagcggccccctgcagtacatgtggtggtaccacgtggtgggcctgatctggatcagcgagttcatcctggcctgccagcagatgaccgtggccggcgccgtggtgacctactacttcaccagagacaagagaaacctgcccttcacccccatcctggccagcgtgaacagactgatcagataccacctgggcaccgtggccaagggcagcttcatcatcaccctggtgaagatccccagaatgatcctgatgtacatccacagccagctgaagggcaaggagaacgcctgcgccagatgcgtgctgaagagctgcatctgctgcctgtggtgcctggagaagtgcctgaactacctgaaccagaacgcctacaccgccaccgccatcaacagcaccaacttctgcaccagcgccaaggacgccttcgtgatcctggtggagaacgccctgagagtggccaccatcaacaccgtgggcgacttcatgctgttcctgggcaaggtgctgatcgtgtgcagcaccggcctggccggcatcatgctgctgaactaccagcaggactacaccgtgtgggtgctgcccctgatcatcgtgtgcctgttcgccttcctggtggcccactgcttcctgagcatctacgagatggtggtggacgtgctgttcctgtgcttcgccatcgacaccaagtacaacgacggcagccccggcagagagttctacatggacaaggtgctgatggagttcgtggagaacagcagaaaggccatgaaggaggccggcaagggcggcgtggccgacagcagagagctgaagcccatgatcaagtag

SEQ ID NO: 100078 - DNA, 1965 bp, synthetic construct
  misc_feature 1..1965: note = Description of Artificial Sequence: Synthetic coding sequence
  source 1..1965: mol_type = other DNA
atgggctgctgcagcagcgccagcagcgccgcccagagcagcaagagagagtggaagcccctggaggacagaagctgcaccgacatcccctggctgctgctgttcatcctgttctgcatcggcatgggcttcatctgcggcttcagcatcgccaccggcgccgccgccagactggtgagcggctacgacagctacggcaacatctgcggccagaagaacaccaagctggaggccatccccaacagcggcatggaccacacccagagaaagtacgtgttcttcctggacccctgcaacctggacctgatcaacagaaagatcaagagcgtggccctgtgcgtggccgcctgccccagacaggagctgaagaccctgagcgacgtgcagaagttcgccgagatcaacggcagcgccctgtgcagctacaacctgaagcccagcgagtacaccaccagccccaagagcagcgtgctgtgccccaagctgcccgtgcccgccagcgcccccatccccttcttccacagatgcgcccccgtgaacatcagctgctacgccaagttcgccgaggccctgatcaccttcgtgagcgacaacagcgtgctgcacagactgatcagcggcgtgatgaccagcaaggagatcatcctgggcctgtgcctgctgagcctggtgctgagcatgatcctgatggtgatcatcagatacatcagcagagtgctggtgtggatcctgaccatcctggtgatcctgggcagcctgggcggcaccggcgtgctgtggtggctgtacgccaagcagagaagaagccccaaggagaccgtgacccccgagcagctgcagatcgccgaggacaacctgagagccctgctgatctacgccatcagcgccaccgtgttcaccgtgatcctgttcctgatcatgctggtgatgagaaagagagtggccctgaccatcgccctgttccacgtggccggcaaggtgttcatccacctgcccctgctggtgttccagcccttctggaccttcttcgccctggtgctgttctgggtgtactggatcatgaccctgctgttcctgggcaccaccggcagccccgtgcagaacgagcagggcttcgtggagttcaagatcagcggccccctgcagtacatgtggtggtaccacgtggtgggcctgatctggatcagcgagttcatcctggcctgccagcagatgaccgtggccggcgccgtggtgacctactacttcaccagagacaagagaaacctgcccttcacccccatcctggccagcgtgaacagactgatcagataccacctgggcaccgtggccaagggcagcttcatcatcaccctggtgaagatccccagaatgatcctgatgtacatccacagccagctgaagggcaaggagaacgcctgcgccagatgcgtgctgaagagctgcatctgctgcctgtggtgcctggagaagtgcctgaactacctgaaccagaacgcctacaccgccaccgccatcaacagcaccaacttctgcaccagcgccaaggacgccttcgtgatcctggtggagaacgccctgagagtggccaccatcaacaccgtgggcgacttcatgctgttcctgggcaaggtgctgatcgtgtgcagcaccggcctggccggcatcatgctgctgaactaccagcaggactacaccgtgtgggtgctgcccctgatcatcgtgtgcctgttcgccttcctggtggcccactgcttcctgagcatctacgagatggtggtggacgtgctgttcctgtgcttcgccatcgacaccaagtacaacgacggcagccccggcagagagttctacatggacaaggtgctgatggagttcgtggagaacagcagaaaggccatgaaggaggccggcaagggcggcgtggccgacagcagagagctgaagcccatgctgaagaagagatag

SEQ ID NO: 100079 - DNA, 1974 bp, synthetic construct; identical to SEQ ID NO: 100076
  misc_feature 1..1974: note = Description of Artificial Sequence: Synthetic coding sequence
  source 1..1974: mol_type = other DNA

SEQ ID NO: 100080 - DNA, 2121 bp, synthetic construct
  misc_feature 1..2121: note = Description of Artificial Sequence: Synthetic coding sequence
  source 1..2121: mol_type = other DNA
atgggcgacgagagaccccactactacggcaagcacggcaccccccagaagtacgaccccaccttcaagggccccatctacaacagaggctgcaccgacatcatctgctgcgtgttcctgctgctggccatcgtgggctacgtggccgtgggcatcatcgcctggacccacggcgaccccagaaaggtgatctaccccaccgacagcagaggcgagttctgcggccagaagggcaccaagaacgagaacaagccctacctgttctacttcaacatcgtgaagtgcgccagccccctggtgctgctggagttccagtgccccaccccccagatctgcgtggagaagtgccccgacagatacctgacctacctgaacgccagaagcagcagagacttcgagtactacaagcagttctgcgtgcccggcttcaagaacaacaagggcgtggccgaggtgctgcaggacggcgactgccccgccgtgctgatccccagcaagcccctggccagaagatgcttccccgccatccacgcctacaagggcgtgctgatggtgggcaacgagaccacctacgaggacggccacggcagcagaaagaacatcaccgacctggtggagggcgccaagaaggccaacggcgtgctggaggccagacagctggccatgagaatcttcgaggactacaccgtgagctggtactggatcatcatcggcctggtgatcgccatggccatgagcctgctgttcatcatcctgctgagattcctggccggcatcatggtgtgggtgatgatcatcatggtgatcctggtgctgggctacggcatcttccactgctacatggagtacagcagactgagaggcgaggccggcagcgacgtgagcctggtggacctgggcttccagaccgacttcagagtgtacctgcacctgagacagacctggctggccttcatgatcatcctgagcatcctggaggtgatcatcatcctgctgctgatcttcctgagaaagagaatcctgatcgccatcgccctgatcaaggaggccagcagagccgtgggctacgtgatgtgcagcctgctgtaccccctggtgaccttcttcctgctgtgcctgtgcatcgcctactgggccagcaccgccgtgttcctgagcaccagcaacgaggccgtgtacaagatcttcgacgacagcccctgccccttcaccgccaagacctgcaaccccgagaccttccccagcagcaacgagagcagacagtgccccaacgccagatgccagttcgccttctacggcggcgagagcggctaccacagagccctgctgggcctgcagatcttcaacgccttcatgttcttctggctggccaacttcgtgctggccctgggccaggtgaccctggccggcgccttcgccagctactactgggccctgagaaagcccgacgacctgcccgccttccccctgttcagcgccttcggcagagccctgagataccacaccggcagcctggccttcggcgccctgatcctggccatcgtgcagatcatcagagtgatcctggagtacctggaccagagactgaaggccgccgagaacaagttcgccaagtgcctgatgacctgcctgaagtgctgcttctggtgcctggagaagttcatcaagttcctgaacagaaacgcctacatcatgatcgccatctacggcaccaacttctgcaccagcgccagaaacgccttcttcctgctgatgagaaacatcatcagagtggccgtgctggacaaggtgaccgacttcctgttcctgctgggcaagctgctgatcgtgggcagcgtgggcatcctggccttcttcttcttcacccacagaatcagaatcgtgcaggacaccgccccccccctgaactactactgggtgcccatcctgaccgtgatcgtgggcagctacctgatcgcccacggcttcttcagcgtgtacggcatgtgcgtggacaccctgttcctgtgcttcctggaggacctggagagaaacgacggcagcgccgagagaccctacttcatgagcagcaccctgaagaagctgctgaacaagaccaacaagaaggccgccgagagctag

SEQ ID NO: 100081 - DNA, 2121 bp, synthetic construct
  misc_feature 1..2121: note = Description of Artificial Sequence: Synthetic coding sequence
  source 1..2121: mol_type = other DNA
atgggcgacgagagaccccactactacggcaagcacggcaccccccagaagtacgaccccaccttcaagggccccatctacaacagaggctgcaccgacatcatctgctgcgtgttcctgctgctggccatcgtgggctacgtggccgtgggcatcatcgcctggacccacggcgaccccagaaaggtgatctaccccaccgacagcagaggcgagttctgcggccagaagggcaccaagaacgagaacaagccctacctgttctacttcaacatcgtgaagtgcgccagccccctggtgctgctggagttccagtgccccaccccccagatctgcgtggagaagtgccccgacagatacctgacctacctgaacgccagaagcagcagagacttcgagtactacaagcagttctgcgtgcccggcttcaagaacaacaagggcgtggccgaggtgctgcaggacggcgactgccccgccgtgctgatccccagcaagcccctggccagaagatgcttccccgccatccacgcctacaagggcgtgctgatggtgggcaacgagaccacctacgaggacggccacggcagcagaaagaacatcaccgacctggtggagggcgccaagaaggccaacggcgtgctggaggccagacagctggccatgagaatcttcgaggactacaccgtgagctggtactggatcatcatcggcctggtgatcgccatggccatgagcctgctgttcatcatcctgctgagattcctggccggcatcatggtgtgggtgatgatcatcatggtgatcctggtgctgggctacggcatcttccactgctacatggagtacagcagactgagaggcgaggccggcagcgacgtgagcctggtggacctgggcttccagaccgacttcagagtgtacctgcacctgagacagacctggctggccttcatgatcatcctgagcatcctggaggtgatcatcatcctgctgctgatcttcctgagaaagagaatcctgatcgccatcgccctgatcaaggaggccagcagagccgtgggctacgtgatgtgcagcctgctgtaccccctggtgaccttcttcctgctgtgcctgtgcatcgcctactgggccagcaccgccgtgttcctgagcaccagcaacgaggccgtgtacaagatcttcgacgacagcccctgccccttcaccgccaagacctgcaaccccgagaccttccccagcagcaacgagagcagacagtgccccaacgccagatgccagttcgccttctacggcggcgagagcggctaccacagagccctgctgggcctgcagatcttcaacgccttcatgttcttctggctggccaacttcgtgctggccctgggccaggtgaccctggccggcgccttcgccagctactactgggccctgagaaagcccgacgacctgcccgccttccccctgttcagcgccttcggcagagccctgagataccacaccggcagcctggccttcggcgccctgatcctggccatcgtgcagatcatcagagtgatcctggagtacctggaccagagactgaaggccgccgagaacaagttcgccaagtgcctgatgacctgcctgaagtgctgcttctggtgcctggagaagttcatcaagttcctgaacagaaacgcctacatcatgatcgccatctacggcaccaacttctgcaccagcgccagaaacgccttcttcctgctgatgagaaacatcatcagagtggccgtgctggacaaggtgaccgacttcctgttcctgctgggcaagctgctgatcgtgggcagcgtgggcatcctggccttcttcttcttcacccacagaatcagaatcgtgcaggacaccgccccccccctgaactactactgggtgcccatcctgaccgtgatcgtgggcagctacctgatcgcccacggcttcttcagcgtgtacggcatgtgcgtggacaccctgttcctgtgcttctgcgaggacctggagagaaacgacggcagccaggagagaccctacttcatgagccccgagctgagagacatcctgctgaagggcagcgccgaggagggcaagagatag

SEQ ID NO: 100082 - DNA, 2115 bp, synthetic construct
  misc_feature 1..2115: note = Description of Artificial Sequence: Synthetic coding sequence
  source 1..2115: mol_type = other DNA
atggaggacgagagaaagaacggcgcctacggcaccccccagaagtacgaccccaccttcaagggccccatctacaacagaggctgcaccgacatcatctgctgcgtgttcctgctgctggccatcgtgggctacgtggccgtgggcatcatcgcctggacccacggcgaccccagaaaggtgatctaccccaccgacagcagaggcgagttctgcggccagaagggcaccaagaacgagaacaagccctacctgttctacttcaacatcgtgaagtgcgccagccccctggtgctgctggagttccagtgccccaccccccagatctgcgtggagaagtgccccgacagatacctgacctacctgaacgccagaagcagcagagacttcgagtactacaagcagttctgcgtgcccggcttcaagaacaacaagggcgtggccgaggtgctgcaggacggcgactgccccgccgtgctgatccccagcaagcccctggccagaagatgcttccccgccatccacgcctacaagggcgtgctgatggtgggcaacgagaccacctacgaggacggccacggcagcagaaagaacatcaccgacctggtggagggcgccaagaaggccaacggcgtgctggaggccagacagctggccatgagaatcttcgaggactacaccgtgagctggtactggatcatcatcggcctggtgatcgccatggccatgagcctgctgttcatcatcctgctgagattcctggccggcatcatggtgtgggtgatgatcatcatggtgatcctggtgctgggctacggcatcttccactgctacatggagtacagcagactgagaggcgaggccggcagcgacgtgagcctggtggacctgggcttccagaccgacttcagagtgtacctgcacctgagacagacctggctggccttcatgatcatcctgagcatcctggaggtgatcatcatcctgctgctgatcttcctgagaaagagaatcctgatcgccatcgccctgatcaaggaggccagcagagccgtgggctacgtgatgtgcagcctgctgtaccccctggtgaccttcttcctgctgtgcctgtgcatcgcctactgggccagcaccgccgtgttcctgagcaccagcaacgaggccgtgtacaagatcttcgacgacagcccctgccccttcaccgccaagacctgcaaccccgagaccttccccagcagcaacgagagcagacagtgccccaacgccagatgccagttcgccttctacggcggcgagagcggctaccacagagccctgctgggcctgcagatcttcaacgccttcatgttcttctggctggccaacttcgtgctggccctgggccaggtgaccctggccggcgccttcgccagctactactgggccctgagaaagcccgacgacctgcccgccttccccctgttcagcgccttcggcagagccctgagataccacaccggcagcctggccttcggcgccctgatcctggccatcgtgcagatcatcagagtgatcctggagtacctggaccagagactgaaggccgccgagaacaagttcgccaagtgcctgatgacctgcctgaagtgctgcttctggtgcctggagaagttcatcaagttcctgaacagaaacgcctacatcatgatcgccatctacggcaccaacttctgcaccagcgccagaaacgccttcttcctgctgatgagaaacatcatcagagtggccgtgctggacaaggtgaccgacttcctgttcctgctgggcaagctgctgatcgtgggcagcgtgggcatcctggccttcttcttcttcacccacagaatcagaatcgtgcaggacaccgccccccccctgaactactactgggtgcccatcctgaccgtgatcgtgggcagctacctgatcgcccacggcttcttcagcgtgtacggcatgtgcgtggacaccctgttcctgtgcttcctggaggacctggagagaaacgacggcagcgccgagagaccctacttcatgagcagcaccctgaagaagctgctgaacaagaccaacaagaaggccgccgagagctag

SEQ ID NO: 100083 - DNA, 1248 bp, synthetic construct; identical to SEQ ID NO: 98917
  misc_feature 1..1248: note = Description of Artificial Sequence: Synthetic coding sequence
  source 1..1248: mol_type = other DNA

SEQ ID NO: 100084 - DNA, 2007 bp, synthetic construct
  misc_feature 1..2007: note = Description of Artificial Sequence: Synthetic coding sequence
  source 1..2007: mol_type = other DNA
atgggcggcaagcagagagacgaggacgacgaggcctacggcaagcccgtgaagtacgaccccagcttcagaggccccatcaagaacagaagctgcaccgacgtgatctgctgcgtgctgttcctgctgttcatcctgggctacatcgtggtgggcatcgtggcctggctgtacggcgaccccagacaggtgctgtaccccagaaacagcaccggcgcctactgcggcatgggcgagaacaaggacaagccctacctgctgtacttcaacatcttcagctgcatcctgagcagcaacatcatcagcgtggccgagaacggcctgcagtgccccaccccccagaccgtgatcaccagcctgcagcaggagctgtgccccagcttcctgctgcccagcgcccccgccctgggcagatgcttcccctggaccaacgtgaccccccccgccctgcccggcatcaccaacgacaccaccatccagcagggcatcagcggcctgatcgacagcctgaacgccagagacatcagcgtgaagatcttcgaggacttcgcccagagctggtactggatcctggtggccctgggcgtggccctggtgctgagcctgctgttcatcctgctgctgagactggtggccggccccctggtgctggtgctgatcctgggcgtgctgggcgtgctggcctacggcatctactactgctgggaggagtacagagtgctgagagacaagggcgccagcatcagccagctgggcttcaccaccaacctgagcgcctaccagagcgtgcaggagacctggctggccgccctgatcgtgctggccgtgctggaggccatcctgctgctgatgctgatcttcctgagacagagaatcagaatcgccatcgccctgctgaaggaggccagcaaggccgtgggccagatgatgagcaccatgttctaccccctggtgaccttcgtgctgctgctgatctgcatcgcctactgggccatgaccgccctgtacctggccaccagcggccagccccagtacgtgctgtgggccagcaacatcagcagccccggctgcgagaaggtgcccatcaacaccagctgcaaccccaccgcccacctggtgaacagcagctgccccggcctgatgtgcgtgttccagggctacagcagcaagggcctgatccagagaagcgtgttcaacctgcagatctacggcgtgctgggcctgttctggaccctgaactgggtgctggccctgggccagtgcgtgctggccggcgccttcgccagcttctactgggccttccacaagccccaggacatccccaccttccccctgatcagcgccttcatcagaaccctgagataccacaccggcagcctggccttcggcgccctgatcctgaccctggtgcagatcgccagagtgatcctggagtacatcgaccacaagctgagaggcgtgcagaaccccgtggccagatgcatcatgtgctgcttcaagtgctgcctgtggtgcctggagaagttcatcaagttcctgaacagaaacgcctacatcatgatcgccatctacggcaagaacttctgcgtgagcgccaagaacgccttcatgctgctgatgagaaacatcgtgagagtggtggtgctggacaaggtgaccgacctgctgctgttcttcggcaagctgctggtggtgggcggcgtgggcgtgctgagcttcttcttcttcagcggcagaatccccggcctgggcaaggacttcaagagcccccacctgaactactactggctgcccatcatgaccagcatcctgggcgcctacgtgatcgccagcggcttcttcagcgtgttcggcatgtgcgtggacaccctgttcctgtgcttcctggaggacctggagagaaacaacggcagcctggacagaccctactacatgagcaagagcctgctgaagatcctgggcaagaagaacgaggccccccccgacaacaagaagagaaagaagtag

SEQ ID NO: 100085 - DNA, 2133 bp, synthetic construct; identical to SEQ ID NO: 81460
  misc_feature 1..2133: note = Description of Artificial Sequence: Synthetic coding sequence
  source 1..2133: mol_type = other DNA

SEQ ID NO: 100086 - DNA, 1236 bp, synthetic construct
  misc_feature 1..1236: note = Description of Artificial Sequence: Synthetic coding sequence
  source 1..1236: mol_type = other DNA
tgaagagacgaggacgacgaggcctacggcaagcccgtgaagtacgaccccagcttcagaggccccatcaagaacagaagctgcaccgacgtgatctgctgcgtgctgttcctgctgttcatcctgggctacatcgtggtgggcatcgtggcctggctgtacggcgaccccagacaggtgctgtaccccagaaacagcaccggcgcctactgcggcatgggcgagaacaaggacaagccctacctgctgtacttcaacatcttcagctgcatcctgagcagcaacatcatcagcgtggccgagaacggcctgcagtgccccaccccccaggtgtgcgtgagcagctgccccgaggacccctggaccgtgggcaagaacgagttcagccagaccgtgggcgaggtgttctacaccaagaacagaaacttctgcctgcccggcgtgccctggaacatgaccgtgatcaccagcctgcagcaggagctgtgccccagcttcctgctgcccagcgcccccgccctgggcagatgcttcccctggaccaacgtgaccccccccgccctgcccggcatcaccaacgacaccaccatccagcagggcatcagcggcctgatcgacagcctgaacgccagagacatcagcgtgaagatcttcgaggacttcgcccagagctggtactggatcctggtggccgtgggccagatgatgagcaccatgttctaccccctggtgaccttcgtgctgctgctgatctgcatcgcctactgggccatgaccgccctgtacctggccaccagcggccagccccagtacgtgctgtgggccagcaacatcagcagccccggctgcgagaaggtgcccatcaacaccagctgcaaccccaccgcccacctggtgaacagcagctgccccggcctgatgtgcgtgttccagggctacagcagcaagggcctgatccagagaagcgtgttcaacctgcagatctacggcgtgctgggcctgttctggaccctgaactgggtgctggccctgggccagtgcgtgctggccggcgccttcgccagcttctactgggccttccacaagccccaggacatccccaccttccccctgatcagcgccttcatcagaaccctgagataccacaccggcagcctggccttcggcgccctgatcctgaccctggtgcagatcgccagagtgatcctggagtacatcgaccacaagctgagatag

SEQ ID NO: 100087 - DNA, 1236 bp, synthetic construct
  misc_feature 1..1236: note = Description of Artificial Sequence: Synthetic coding sequence
  source 1..1236: mol_type = other DNA
tgaagagacgaggacgacgaggcctacggcaagcccgtgaagtacgaccccagcttcagaggccccatcaagaacagaagctgcaccgacgtgatctgctgcgtgctgttcctgctgttcatcctgggctacatcgtggtgggcatcgtggcctggctgtacggcgaccccagacaggtgctgtaccccagaaacagcaccggcgcctactgcggcatgggcgagaacaaggacaagccctacctgctgtacttcaacatcttcagctgcatcctgagcagcaacatcatcagcgtggccgagaacggcctgcagtgccccaccccccaggtgtgcgtgagcagctgccccgaggacccctggaccgtgggcaagaacgagttcagccagaccgtgggcgaggtgttctacaccaagaacagaaacttctgcctgcccggcgtgccctggaacatgaccgtgatcaccagcctgcagcaggagctgtgccccagcttcctgctgcccagcgcccccgccctgggcagatgcttcccctggaccaacatcaccccccccgccctgcccggcatcaccaacgacaccaccatccagcagggcatcagcggcctgatcgacagcctgaacgccagagacatcagcgtgaagatcttcgaggacttcgcccagagctggtactggatcctggtggccgtgggccagatgatgagcaccatgttctaccccctggtgaccttcgtgctgctgctgatctgcatcgcctactgggccatgaccgccctgtacctggccaccagcggccagccccagtacgtgctgtgggccagcaacatcagcagccccggctgcgagaaggtgcccatcaacaccagctgcaaccccaccgcccacctggtgaacagcagctgccccggcctgatgtgcgtgttccagggctacagcagcaagggcctgatccagagaagcgtgttcaacctgcagatctacggcgtgctgggcctgttctggaccctgaactgggtgctggccctgggccagtgcgtgctggccggcgccttcgccagcttctactgggccttccacaagccccaggacatccccaccttccccctgatcagcgccttcatcagaaccctgagataccacaccggcagcctggccttcggcgccctgatcctgaccctggtgcagatcgccagagtgatcctggagtacatcgaccacaagctgagatag

SEQ ID NO: 100088 - DNA, 2133 bp, synthetic construct
  misc_feature 1..2133: note = Description of Artificial Sequence: Synthetic coding sequence
  source 1..2133: mol_type = other DNA
atgggcggcaagcagagagacgaggacgacgaggcctacggcaagcccgtgaagtacgaccccagcttcagaggccccatcaagaacagaagctgcaccgacgtgatctgctgcgtgctgttcctgctgttcatcctgggctacatcgtggtgggcatcgtggcctggctgtacggcgaccccagacaggtgctgtaccccagaaacagcaccggcgcctactgcggcatgggcgagaacaaggacaagccctacctgctgtacttcaacatcttcagctgcatcctgagcagcaacatcatcagcgtggccgagaacggcctgcagtgccccaccccccaggtgtgcgtgagcagctgccccgaggacccctggaccgtgggcaagaacgagttcagccagaccgtgggcgaggtgttctacaccaagaacagaaacttctgcctgcccggcgtgccctggaacatgaccgtgatcaccagcctgcagcaggagctgtgccccagcttcctgctgcccagcgcccccgccctgggcagatgcttcccctggaccaacatcaccccccccgccctgcccggcatcaccaacgacaccaccatccagcagggcatcagcggcctgatcgacagcctgaacgccagagacatcagcgtgaagatcttcgaggacttcgcccagagctggtactggatcctggtggccctgggcgtggccctggtgctgagcctgctgttcatcctgctgctgagactggtggccggccccctggtgctggtgctgatcctgggcgtgctgggcgtgctggcctacggcatctactactgctgggaggagtacagagtgctgagagacaagggcgccagcatcagccagctgggcttcaccaccaacctgagcgcctaccagagcgtgcaggagacctggctggccgccctgatcgtgctggccgtgctggaggccatcctgctgctggtgctgatcttcctgagacagagaatcagaatcgccatcgccctgctgaaggaggccagcaaggccgtgggccagatgatgagcaccatgttctaccccctggtgaccttcgtgctgctgctgatctgcatcgcctactgggccatgaccgccctgtacctggccaccagcggccagccccagtacgtgctgtgggccagcaacatcagcagccccggctgcgagaaggtgcccatcaacaccagctgcaaccccaccgcccacctggtgaacagcagctgccccggcctgatgtgcgtgttccagggctacagcagcaagggcctgatccagagaagcgtgttcaacctgcagatctacggcgtgctgggcctgttctggaccctgaactgggtgctggccctgggccagtgcgtgctggccggcgccttcgccagcttctactgggccttccacaagccccaggacatccccaccttccccctgatcagcgccttcatcagaaccctgagataccacaccggcagcctggccttcggcgccctgatcctgaccctggtgcagatcgccagagtgatcctggagtacatcgaccacaagctgagaggcgtgcagaaccccgtggccagatgcatcatgtgctgcttcaagtgctgcctgtggtgcctggagaagttcatcaagttcctgaacagaaacgcctacatcatgatcgccatctacggcaagaacttctgcgtgagcgccaagaacgccttcatgctgctgatgagaaacatcgtgagagtggtggtgctggacaaggtgaccgacctgctgctgttcttcggcaagctgctggtggtgggcggcgtgggcgtgctgagcttcttcttcttcagcggcagaatccccggcctgggcaaggacttcaagagcccccacctgaactactactggctgcccatcatgaccagcatcctgggcgcctacgtgatcgccagcggcttcttcagcgtgttcggcatgtgcgtggacaccctgttcctgtgcttcctggaggacctggagagaaacaacggcagcctggacagaccctactacatgagcaagagcctgctgaagatcctgggcaagaagaacgaggccccccccgacaacaagaagagaaagaagtag

SEQ ID NO: 100089 - DNA, 2133 bp, synthetic construct; identical to SEQ ID NO: 100088
  misc_feature 1..2133: note = Description of Artificial Sequence: Synthetic coding sequence
  source 1..2133: mol_type = other DNA

SEQ ID NO: 100090 - DNA, 2133 bp, synthetic construct; identical to SEQ ID NO: 81460
  misc_feature 1..2133: note = Description of Artificial Sequence: Synthetic coding sequence
  source 1..2133: mol_type = other DNA

SEQ ID NO: 100091 - DNA, 1236 bp, synthetic construct; identical to SEQ ID NO: 100086
  misc_feature 1..1236: note = Description of Artificial Sequence: Synthetic coding sequence
  source 1..1236: mol_type = other DNA

SEQ ID NO: 100092 - DNA, 1236 bp, synthetic construct; identical to SEQ ID NO: 100086
  misc_feature 1..1236: note = Description of Artificial Sequence: Synthetic coding sequence
  source 1..1236: mol_type = other DNA

SEQ ID NO: 100093 - DNA, 1236 bp, synthetic construct; identical to SEQ ID NO: 100087
  misc_feature 1..1236: note = Description of Artificial Sequence: Synthetic coding sequence
  source 1..1236: mol_type = other DNA

SEQ ID NO: 100094 - DNA, 2133 bp, synthetic construct; identical to SEQ ID NO: 100088
  misc_feature 1..2133: note = Description of Artificial Sequence: Synthetic coding sequence
  source 1..2133: mol_type = other DNA

SEQ ID NO: 100095 - DNA, 1236 bp, synthetic construct; identical to SEQ ID NO: 100087
  misc_feature 1..1236: note = Description of Artificial Sequence: Synthetic coding sequence
  source 1..1236: mol_type = other DNA

SEQ ID NO: 100096 - DNA, 2133 bp, synthetic construct; identical to SEQ ID NO: 81460
  misc_feature 1..2133: note = Description of Artificial Sequence: Synthetic coding sequence
  source 1..2133: mol_type = other DNA

SEQ ID NO: 100097 - DNA, 1236 bp, synthetic construct; identical to SEQ ID NO: 100086
  misc_feature 1..1236: note = Description of Artificial Sequence: Synthetic coding sequence
  source 1..1236: mol_type = other DNA

SEQ ID NO: 100098 - DNA, 1905 bp, synthetic construct
  misc_feature 1..1905: note = Description of Artificial Sequence: Synthetic coding sequence
  source 1..1905: mol_type = other DNA
atgggcgagaacaaggacaagccctacctgctgtacttcaacatcttcagctgcatcctgagcagcaacatcatcagcgtggccgagaacggcctgcagtgccccaccccccaggtgtgcgtgagcagctgccccgaggacccctggaccgtgggcaagaacgagttcagccagaccgtgggcgaggtgttctacaccaagaacagaaacttctgcctgcccggcgtgccctggaacatgaccgtgatcaccagcctgcagcaggagctgtgccccagcttcctgctgcccagcgcccccgccctgggcagatgcttcccctggaccaacgtgaccccccccgccctgcccggcatcaccaacgacaccaccatccagcagggcatcagcggcctgatcgacagcctgaacgccagagacatcagcgtgaagatcttcgaggacttcgcccagagctggtactggatcctggtggccctgggcgtggccctggtgctgagcctgctgttcatcctgctgctgagactggtggccggccccctggtgctggtgctgatcctgggcgtgctgggcgtgctggcctacggcatctactactgctgggaggagtacagagtgctgagagacaagggcgccagcatcagccagctgggcttcaccaccaacctgagcgcctaccagagcgtgcaggagacctggctggccgccctgatcgtgctggccgtgctggaggccatcctgctgctgatgctgatcttcctgagacagagaatcagaatcgccatcgccctgctgaaggaggccagcaaggccgtgggccagatgatgagcaccatgttctaccccctggtgaccttcgtgctgctgctgatctgcatcgcctactgggccatgaccgccctgtacctggccaccagcggccagccccagtacgtgctgtgggccagcaacatcagcagccccggctgcgagaaggtgcccatcaacaccagctgcaaccccaccgcccacctggtgaacagcagctgccccggcctgatgtgcgtgttccagggctacagcagcaagggcctgatccagagaagcgtgttcaacctgcagatctacggcgtgctgggcctgttctggaccctgaactgggtgctggccctgggccagtgcgtgctggccggcgccttcgccagcttctactgggccttccacaagccccaggacatccccaccttccccctgatcagcgccttcatcagaaccctgagataccacaccggcagcctggccttcggcgccctgatcctgaccctggtgcagatcgccagagtgatcctggagtacatcgaccacaagctgagaggcgtgcagaaccccgtggccagatgcatcatgtgctgcttcaagtgctgcctgtggtgcctggagaagttcatcaagttcctgaacagaaacgcctacatcatgatcgccatctacggcaagaacttctgcgtgagcgccaagaacgccttcatgctgctgatgagaaacatcgtgagagtggtggtgctggacaaggtgaccgacctgctgctgttcttcggcaagctgctggtggtgggcggcgtgggcgtgctgagcttcttcttcttcagcggcagaatccccggcctgggcaaggacttcaagagcccccacctgaactactactggctgcccatcatgaccagcatcctgggcgcctacgtgatcgccagcggcttcttcagcgtgttcggcatgtgcgtggacaccctgttcctgtgcttcctggaggacctggagagaaacaacggcagcctggacagaccctactacatgagcaagagcctgctgaagatcctgggcaagaagaacgaggccccccccgacaacaagaagagaaagaagtag

SEQ ID NO: 100099 - DNA, 1905 bp, synthetic construct; identical to SEQ ID NO: 100098
  misc_feature 1..1905: note = Description of Artificial Sequence: Synthetic coding sequence
  source 1..1905: mol_type = other DNA

SEQ ID NO: 100100 - DNA, 1905 bp, synthetic construct
  misc_feature 1..1905: note = Description of Artificial Sequence: Synthetic coding sequence
  source 1..1905: mol_type = other DNA
atgggcgagaacaaggacaagccctacctgctgtacttcaacatcttcagctgcatcctgagcagcaacatcatcagcgtggccgagaacggcctgcagtgccccaccccccaggtgtgcgtgagcagctgccccgaggacccctggaccgtgggcaagaacgagttcagccagaccgtgggcgaggtgttctacaccaagaacagaaacttctgcctgcccggcgtgccctggaacatgaccgtgatcaccagcctgcagcaggagctgtgccccagcttcctgctgcccagcgcccccgccctgggcagatgcttcccctggaccaacatcaccccccccgccctgcccggcatcaccaacgacaccaccatccagcagggcatcagcggcctgatcgacagcctgaacgccagagacatcagcgtgaagatcttcgaggacttcgcccagagctggtactggatcctggtggccctgggcgtggccctggtgctgagcctgctgttcatcctgctgctgagactggtggccggccccctggtgctggtgctgatcctgggcgtgctgggcgtgctggcctacggcatctactactgctgggaggagtacagagtgctgagagacaagggcgccagcatcagccagctgggcttcaccaccaacctgagcgcctaccagagcgtgcaggagacctggctggccgccctgatcgtgctggccgtgctggaggccatcctgctgctggtgctgatcttcctgagacagagaatcagaatcgccatcgccctgctgaaggaggccagcaaggccgtgggccagatgatgagcaccatgttctaccccctggtgaccttcgtgctgctgctgatctgcatcgcctactgggccatgaccgccctgtacctggccaccagcggccagccccagtacgtgctgtgggccagcaacatcagcagccccggctgcgagaaggtgcccatcaacaccagctgcaaccccaccgcccacctggtgaacagcagctgccccggcctgatgtgcgtgttccagggctacagcagcaagggcctgatccagagaagcgtgttcaacctgcagatctacggcgtgctgggcctgttctggaccctgaactgggtgctggccctgggccagtgcgtgctggccggcgccttcgccagcttctactgggccttccacaagccccaggacatccccaccttccccctgatcagcgccttcatcagaaccctgagataccacaccggcagcctggccttcggcgccctgatcctgaccctggtgcagatcgccagagtgatcctggagtacatcgaccacaagctgagaggcgtgcagaaccccgtggccagatgcatcatgtgctgcttcaagtgctgcctgtggtgcctggagaagttcatcaagttcctgaacagaaacgcctacatcatgatcgccatctacggcaagaacttctgcgtgagcgccaagaacgccttcatgctgctgatgagaaacatcgtgagagtggtggtgctggacaaggtgaccgacctgctgctgttcttcggcaagctgctggtggtgggcggcgtgggcgtgctgagcttcttcttcttcagcggcagaatccccggcctgggcaaggacttcaagagcccccacctgaactactactggctgcccatcatgaccagcatcctgggcgcctacgtgatcgccagcggcttcttcagcgtgttcggcatgtgcgtggacaccctgttcctgtgcttcctggaggacctggagagaaacaacggcagcctggacagaccctactacatgagcaagagcctgctgaagatcctgggcaagaagaacgaggccccccccgacaacaagaagagaaagaagtag

SEQ ID NO: 100101 - DNA, 2007 bp, synthetic construct
  misc_feature 1..2007: note = Description of Artificial Sequence: Synthetic coding sequence
  source 1..2007: mol_type = other DNA
atgggcggcaagcagagagacgaggacgacgaggcctacggcaagcccgtgaagtacgaccccagcttcagaggccccatcaagaacagaagctgcaccgacgtgatctgctgcgtgctgttcctgctgttcatcctgggctacatcgtggtgggcatcgtggcctggctgtacggcgaccccagacaggtgctgtaccccagaaacagcaccggcgcctactgcggcatgggcgagaacaaggacaagccctacctgctgtacttcaacatcttcagctgcatcctgagcagcaacatcatcagcgtggccgagaacggcctgcagtgccccaccccccagaccgtgatcaccagcctgcagcaggagctgtgccccagcttcctgctgcccagcgcccccgccctgggcagatgcttcccctggaccaacatcaccccccccgccctgcccggcatcaccaacgacaccaccatccagcagggcatcagcggcctgatcgacagcctgaacgccagagacatcagcgtgaagatcttcgaggacttcgcccagagctggtactggatcctggtggccctgggcgtggccctggtgctgagcctgctgttcatcctgctgctgagactggtggccggccccctggtgctggtgctgatcctgggcgtgctgggcgtgctggcctacggcatctactactgctgggaggagtacagagtgctgagagacaagggcgccagcatcagccagctgggcttcaccaccaacctgagcgcctaccagagcgtgcaggagacctggctggccgccctgatcgtgctggccgtgctggaggccatcctgctgctggtgctgatcttcctgagacagagaatcagaatcgccatcgccctgctgaaggaggccagcaaggccgtgggccagatgatgagcaccatgttctaccccctggtgaccttcgtgctgctgctgatctgcatcgcctactgggccatgaccgccctgtacctggccaccagcggccagccccagtacgtgctgtgggccagcaacatcagcagccccggctgcgagaaggtgcccatcaacaccagctgcaaccccaccgcccacctggtgaacagcagctgccccggcctgatgtgcgtgttccagggctacagcagcaagggcctgatccagagaagcgtgttcaacctgcagatctacggcgtgctgggcctgttctggaccctgaactgggtgctggccctgggccagtgcgtgctggccggcgccttcgccagcttctactgggccttccacaagccccaggacatccccaccttccccctgatcagcgccttcatcagaaccctgagataccacaccggcagcctggccttcggcgccctgatcctgaccctggtgcagatcgccagagtgatcctggagtacatcgaccacaagctgagaggcgtgcagaaccccgtggccagatgcatcatgtgctgcttcaagtgctgcctgtggtgcctggagaagttcatcaagttcctgaacagaaacgcctacatcatgatcgccatctacggcaagaacttctgcgtgagcgccaagaacgccttcatgctgctgatgagaaacatcgtgagagtggtggtgctggacaaggtgaccgacctgctgctgttcttcggcaagctgctggtggtgggcggcgtgggcgtgctgagcttcttcttcttcagcggcagaatccccggcctgggcaaggacttcaagagcccccacctgaactactactggctgcccatcatgaccagcatcctgggcgcctacgtgatcgccagcggcttcttcagcgtgttcggcatgtgcgtggacaccctgttcctgtgcttcctggaggacctggagagaaacaacggcagcctggacagaccctactacatgagcaagagcctgctgaagatcctgggcaagaagaacgaggccccccccgacaacaagaagagaaagaagtag

SEQ ID NO: 100102 - DNA, 1905 bp, synthetic construct; identical to SEQ ID NO: 100098
  misc_feature 1..1905: note = Description of Artificial Sequence: Synthetic coding sequence
  source 1..1905: mol_type = other DNA

SEQ ID NO: 100103 - DNA, 1905 bp, synthetic construct; identical to SEQ ID NO: 100098
  misc_feature 1..1905: note = Description of Artificial Sequence: Synthetic coding sequence
  source 1..1905: mol_type = other DNA

SEQ ID NO: 100104 - DNA, 2007 bp, synthetic construct; identical to SEQ ID NO: 100084
  misc_feature 1..2007: note = Description of Artificial Sequence: Synthetic coding sequence
  source 1..2007: mol_type = other DNA

SEQ ID NO: 100105 - DNA, 2007 bp, synthetic construct; identical to SEQ ID NO: 100084
  misc_feature 1..2007: note = Description of Artificial Sequence: Synthetic coding sequence
  source 1..2007: mol_type = other DNA

SEQ ID NO: 100106 - DNA, 2007 bp, synthetic construct; identical to SEQ ID NO: 100101
  misc_feature 1..2007: note = Description of Artificial Sequence: Synthetic coding sequence
  source 1..2007: mol_type = other DNA

SEQ ID NO: 100107 - DNA, 1905 bp, synthetic construct; identical to SEQ ID NO: 100100
  misc_feature 1..1905: note = Description of Artificial Sequence: Synthetic coding sequence
  source 1..1905: mol_type = other DNA

SEQ ID NO: 100108 - DNA, 2007 bp, synthetic construct; identical to SEQ ID NO: 100084
  misc_feature 1..2007: note = Description of Artificial Sequence: Synthetic coding sequence
  source 1..2007: mol_type = other DNA

SEQ ID NO: 100109 - DNA, 2007 bp, synthetic construct; identical to SEQ ID NO: 100101
  misc_feature 1..2007: note = Description of Artificial Sequence: Synthetic coding sequence
  source 1..2007: mol_type = other DNA

SEQ ID NO: 100110 - DNA, 1905 bp, synthetic construct; identical to SEQ ID NO: 100100
  misc_feature 1..1905: note = Description of Artificial Sequence: Synthetic coding sequence
  source 1..1905: mol_type = other DNA

SEQ ID NO: 100111 - DNA, 2247 bp, synthetic construct
  misc_feature 1..2247: note = Description of Artificial Sequence: Synthetic coding sequence
  source 1..2247: mol_type = other DNA
atgatccccgccgccagcagcaccccccccggcgacgccctgttccccagcgtggccccccaggacttctggagaagccaggtgaccggctacagcggcagcgtgaccagacacctgagccacagagccaacaacttcaagagacaccccaagagaagaaagtgcatcagacccagccccccccccccccccaacaccccctgccccctggagctggtggacttcggcgacctgcacccccagagaagcttcagagagctgctgttcaacggctgcatcctgttcggcatcgagttcagctacgccatggagaccgcctacgtgacccccgtgctgctgcagatgggcctgcccgaccagctgtacagcctggtgtggttcatcagccccatcctgggcttcctgctgcagcccctgctgggcgcctggagcgacagatgcaccagcagattcggcagaagaagacccttcatcctggtgctggccatcggcgccctgctgggcctgagcctgctgctgaacggcagagacatcggcatcgccctggccgacgtgaccggcaaccacaagtggggcctgctgctgaccgtgtgcggcgtggtgctgatggacttcagcgccgacagcgccgacaaccccagccacgcctacatgatggacgtgtgcagccccgccgaccaggacagaggcctgaacatccacgccctgctggccggcctgggcggcggcttcggctacgtggtgggcggcatccactgggacaagaccggcttcggcagagccctgggcggccagctgagagtgatctacctgttcaccgccgtgaccctgagcgtgaccaccgtgctgaccctggtgagcatccccgagagacccctgagaccccccagcgagaagagagccgccatgaagagccccagcctgcccctgccccccagcccccccgtgctgcccgaggagggccccggcgacagcctgcccagccacaccgccaccaacttcagcagccccatcagcccccccagccccctgacccccaagtacggcagcttcatcagcagagacagcagcctgaccggcatcagcgagttcgccagcagcttcggcaccgccaacatcgacagcgtgctgatcgactgcttcaccggcggccacgacagctacctggccatccccggcagcgtgcccagaccccccatcagcgtgagcttccccagagcccccgacggcttctacagacaggacagaggcctgctggagggcagagagggcgccctgaccagcggctgcgacggcgacatcctgagagtgggcagcctggacaccagcaagcccagaagcagcggcatcctgaagagaccccagaccctggccatccccgacgccgccggcggcggcggccccgagaccagcagaagaagaaacgtgaccttcagccagcaggtggccaacatcctgctgaacggcgtgaagtacgagagcgagctgaccggcagcagcgagagagccgagcagcccctgagcgtgggcagactgtgcagcaccatctgcaacatgcccaaggccctgagaaccctgtgcgtgaaccacttcctgggctggctgagcttcgagggcatgctgctgttctacaccgacttcatgggcgaggtggtgttccagggcgaccccaaggccccccacaccagcgaggcctaccagaagtacaacagcggcgtgaccatgggctgctggggcatgtgcatctacgccttcagcgccgccttctacagcgccatcctggagaagctggaggagttcctgagcgtgagaaccctgtacttcatcgcctacctggccttcggcctgggcaccggcctggccaccctgagcagaaacctgtacgtggtgctgagcctgtgcatcacctacggcatcctgttcagcaccctgtgcaccctgccctacagcctgctgtgcgactactaccagagcaagaagttcgccggcagcagcgccgacggcaccagaagaggcatgggcgtggacatcagcctgctgagctgccagtacttcctggcccagatcctggtgagcctggtgctgggccccctgaccagcgccgtgggcagcgccaacggcgtgatgtacttcagcagcctggtgagcttcctgggctgcctgtacagcagcctgttcgtgatctacgagatcccccccagcgacgccgccgacgaggagcacagacccctgctgctgaacgtgtag

SEQ ID NO: 100112 - DNA, 2349 bp, synthetic construct
  misc_feature 1..2349: note = Description of Artificial Sequence: Synthetic coding sequence
  source 1..2349: mol_type = other DNA
atgctgcagcagcccggccccagacccggcagacagcagcccagcggcgacagagacgcctgcagactgcacccccagggcagaccccccgccctgcccaccatgatccccgccgccagcagcaccccccccggcgacgccctgttccccagcgtggccccccaggacttctggagaagccaggtgaccggctacagcggcagcgtgaccagacacctgagccacagagccaacaacttcaagagacaccccaagagaagaaagtgcatcagacccagccccccccccccccccaacaccccctgccccctggagctggtggacttcggcgacctgcacccccagagaagcttcagagagctgctgttcaacggctgcatcctgttcggcatcgagttcagctacgccatggagaccgcctacgtgacccccgtgctgctgcagatgggcctgcccgaccagctgtacagcctggtgtggttcatcagccccatcctgggcttcctgctgcagcccctgctgggcgcctggagcgacagatgcaccagcagattcggcagaagaagacccttcatcctggtgctggccatcggcgccctgctgggcctgagcctgctgctgaacggcagagacatcggcatcgccctggccgacgtgaccggcaaccacaagtggggcctgctgctgaccgtgtgcggcgtggtgctgatggacttcagcgccgacagcgccgacaaccccagccacgcctacatgatggacgtgtgcagccccgccgaccaggacagaggcctgaacatccacgccctgctggccggcctgggcggcggcttcggctacgtggtgggcggcatccactgggacaagaccggcttcggcagagccctgggcggccagctgagagtgatctacctgttcaccgccgtgaccctgagcgtgaccaccgtgctgaccctggtgagcatccccgagagacccctgagaccccccagcgagaagagagccgccatgaagagccccagcctgcccctgccccccagcccccccgtgctgcccgaggagggccccggcgacagcctgcccagccacaccgccaccaacttcagcagccccatcagcccccccagccccctgacccccaagtacggcagcttcatcagcagagacagcagcctgaccggcatcagcgagttcgccagcagcttcggcaccgccaacatcgacagcgtgctgatcgactgcttcaccggcggccacgacagctacctggccatccccggcagcgtgcccagaccccccatcagcgtgagcttccccagagcccccgacggcttctacagacaggacagaggcctgctggagggcagagagggcgccctgaccagcggctgcgacggcgacatcctgagagtgggcagcctggacaccagcaagcccagaagcagcggcatcctgaagagaccccagaccctggccatccccgacgccgccggcggcggcggccccgagaccagcagaagaagaaacgtgaccttcagccagcaggtggccaacatcctgctgaacggcgtgaagtacgagagcgagctgaccggcagcagcgagagagccgagcagcccctgagcgtgggcagactgtgcagcaccatctgcaacatgcccaaggccctgagaaccctgtgcgtgaaccacttcctgggctggctgagcttcgagggcatgctgctgttctacaccgacttcatgggcgaggtggtgttccagggcgaccccaaggccccccacaccagcgaggcctaccagaagtacaacagcggcgtgaccatgggctgctggggcatgtgcatctacgccttcagcgccgccttctacagcgccatcctggagaagctggaggagttcctgagcgtgagaaccctgtacttcatcgcctacctggccttcggcctgggcaccggcctggccaccctgagcagaaacctgtacgtggtgctgagcctgtgcatcacctacggcatcctgttcagcaccctgtgcaccctgccctacagcctgctgtgcgactactaccagagcaagaagttcgccggcagcagcgccgacggcaccagaagaggcatgggcgtggacatcagcctgctgagctgccagtacttcctggcccagatcctggtgagcctggtgctgggccccctgaccagcgccgtgggcagcgccaacggcgtgatgtacttcagcagcctggtgagcttcctgggctgcctgtacagcagcctgttcgtgatctacgagatcccccccagcgacgccgccgacgaggagcacagacccctgctgctgaacgtgtag

SEQ ID NO: 100113 - DNA, 2247 bp, synthetic construct; identical to SEQ ID NO: 100111
  misc_feature 1..2247: note = Description of Artificial Sequence: Synthetic coding sequence
  source 1..2247: mol_type = other DNA

SEQ ID NO: 100114 - DNA, 1593 bp, synthetic construct
  misc_feature 1..1593: note = Description of Artificial Sequence: Synthetic coding sequence
  source 1..1593: mol_type = other DNA
atgggcagcaacagcggccaggccggcagacacatctacaagagcctggccgacgacggccccttcgacagcgtggagccccccaagagacccaccagcagactgatcatgcacagcatggccatgttcggcagagagttctgctacgccgtggaggccgcctacgtgacccccgtgctgctgagcgtgggcctgcccagcagcctgtacagcatcgtgtggttcctgagccccatcctgggcttcctgctgcagcccgtggtgggcagcgccagcgaccactgcagaagcagatggggcagaagaagaccctacatcctgaccctgggcgtgatgatgctggtgggcatggccctgtacctgaacggcgccaccgtggtggccgccctgatcgccaaccccagaagaaagctggtgtgggccatcagcgtgaccatgatcggcgtggtgctgttcgacttcgccgccgacttcatcgacggccccatcaaggcctacctgttcgacgtgtgcagccaccaggacaaggagaagggcctgcactaccacgccctgttcaccggcttcggcggcgccctgggctacctgctgggcgccatcgactgggcccacctggagctgggcagactgctgggcaccgagttccaggtgatgttcttcttcagcgccctggtgctgaccctgtgcttcaccgtgcacctgtgcagcatcagcgaggcccccctgaccgaggtggccaagggcatccccccccagcagaccccccaggacccccccctgagcagcgacggcatgtacgagtacggcagcatcgagaaggtgaagaacggctacgtgaaccccgagctggccatgcagggcgccaagaacaagaaccacgccgagcagaccagaagagccatgaccctgaagagcctgctgagagccctggtgaacatgcccccccactacagatacctgtgcatcagccacctgatcggctggaccgccttcctgagcaacatgctgttcttcaccgacttcatgggccagatcgtgtacagaggcgacccctacagcgcccacaacagcaccgagttcctgatctacgagagaggcgtggaggtgggctgctggggcctgtgcatcaacagcgtgttcagcagcctgtacagctacttccagaaggtgctggtgagctacatcggcctgaagggcctgtacttcaccggctacctgctgttcggcctgggcaccggcttcatcggcctgttccccaacgtgtacagcaccctggtgctgtgcagcctgttcggcgtgatgagcagcaccctgtacaccgtgcccttcaacctgatcaccgagtaccacagagaggaggagaaggagagacagcaggcccccggcggcgaccccgacaacagcgtgagaggcaagggcatggactgcgccaccctgacctgcatggtgcagctggcccagatcctggtgggcggcggcctgggcttcctggtgaacaccgccggcaccgtggtggtggtggtgatcaccgccagcgccgtggccctgatcggctgctgcttcgtggccctgttcgtgagatacgtggactag

SEQ ID NO: 100115 - DNA, 1416 bp, synthetic construct
  misc_feature 1..1416: note = Description of Artificial Sequence: Synthetic coding sequence
  source 1..1416: mol_type = other DNA
atgggcagcaacagcggccaggccggcagacacatctacaagagcctggccgacgacggccccttcgacagcgtggagccccccaagagacccaccagcagactgatcatgcacagcatggccatgttcggcagagagttctgctacgccgtggaggccgcctacgtgacccccgtgctgctgagcgtgggcctgcccagcagcctgtacagcatcgtgtggttcctgagccccatcctgggcttcctgctgcagcccgtggtgggcagcgccagcgaccactgcagaagcagatggggcagaagaagaccctacatcctgaccctgggcgtgatgatgctggtgggcatggccctgtacctgaacggcgccaccgtggtggccggcttcggcggcgccctgggctacctgctgggcgccatcgactgggcccacctggagctgggcagactgctgggcaccgagttccaggtgatgttcttcttcagcgccctggtgctgaccctgtgcttcaccgtgcacctgtgcagcatcagcgaggcccccctgaccgaggtggccaagggcatccccccccagcagaccccccaggacccccccctgagcagcgacggcatgtacgagtacggcagcatcgagaaggtgaagaacggctacgtgaaccccgagctggccatgcagggcgccaagaacaagaaccacgccgagcagaccagaagagccatgaccctgaagagcctgctgagagccctggtgaacatgcccccccactacagatacctgtgcatcagccacctgatcggctggaccgccttcctgagcaacatgctgttcttcaccgacttcatgggccagatcgtgtacagaggcgacccctacagcgcccacaacagcaccgagttcctgatctacgagagaggcgtggaggtgggctgctggggcctgtgcatcaacagcgtgttcagcagcctgtacagctacttccagaaggtgctggtgagctacatcggcctgaagggcctgtacttcaccggctacctgctgttcggcctgggcaccggcttcatcggcctgttccccaacgtgtacagcaccctggtgctgtgcagcctgttcggcgtgatgagcagcaccctgtacaccgtgcccttcaacctgatcaccgagtaccacagagaggaggagaaggagagacagcaggcccccggcggcgaccccgacaacagcgtgagaggcaagggcatggactgcgccaccctgacctgcatggtgcagctggcccagatcctggtgggcggcggcctgggcttcctggtgaacaccgccggcaccgtggtggtggtggtgatcaccgccagcgccgtggccctgatcggctgctgcttcgtggccctgttcgtgagatacgtggactag

SEQ ID NO: 100116 - DNA, 897 bp, synthetic construct
  misc_feature 1..897: note = Description of Artificial Sequence: Synthetic coding sequence
  source 1..897: mol_type = other DNA
atgggcagcaacagcggccaggccggcagacacatctacaagagcctggccgacgacggccccttcgacagcgtggagccccccaagagacccaccagcagactgatcatgcacagcatggccatgttcggcagagagttctgctacgccgtggaggccgcctacgtgacccccgtgctgctgagcgtgggcctgcccagcagcctgtacagcatcgtgtggttcctgagccccatcctgggcttcctgctgcagcccgtggtgggcagcgccagcgaccactgcagaagcagatggggcagaagaagaccctacatcctgaccctgggcgtgatgatgctggtgggcatggccctgtacctgaacggcgccaccgtggtggccgccctgatcgccaaccccagaagaaagctggtgtgggccatcagcgtgaccatgatcggcgtggtgctgttcgacttcgccgccgacttcatcgacggccccatcaaggcctacctgttcgacgtgtgcagccaccaggacaaggagaagggcctgcactaccacgccctgttcaccggcaccagaagagccatgaccctgaagagcctgctgagagccctggtgaacatgcccccccactacagatacctgtgcatcagccacctgatcggctggaccgccttcctgagcaacatgctgttcttcaccgacttcatgggccagatcgtgtacagaggcgacccctacagcgcccacaacagcaccgagttcctgatctacgagagaggcgtggaggtgggctgctggggcctgtgcatcaacagcgtgttcagcagcctgtacagctgcaagagcttcagcctgctgagaatgagcagcaagagcttctggagcagcaccacctggatctag

SEQ ID NO: 100117 - DNA, 1383 bp, synthetic construct
  misc_feature 1..1383: note = Description of Artificial Sequence: Synthetic coding sequence
  source 1..1383: mol_type = other DNA
atgggcagcaacagcggccaggccggcagacacatctacaagagcctggccgacgacggccccttcgacagcgtggagccccccaagagacccaccagcagactgatcatgcacagcatggccatgttcggcagagagttctgctacgccgtggaggccgcctacgtgacccccgtgctgctgagcgtgggcctgcccagcagcctgtacagcatcgtgtggttcctgagccccatcctgggcttcctgctgcagcccgtggtgggcagcgccagcgaccactgcagaagcagatggggcagaagaagaccctacatcctgaccctgggcgtgatgatgctggtgggcatggccctgtacctgaacggcgccaccgtggtggccgccctgatcgccaaccccagaagaaagctggtgtgggccatcagcgtgaccatgatcggcgtggtgctgttcgacttcgccgccgacttcatcgacggccccatcaaggcctacctgttcgacgtgtgcagccaccaggacaaggagaagggcctgcactaccacgccctgttcaccggcttcggcggcgccctgggctacctgctgggcgccatcgactgggcccacctggagctgggcagactgctgggcaccgagttccaggtgatgttcttcttcagcgccctggtgctgaccctgtgcttcaccgtgcacctgtgcagcatcagcgaggcccccctgaccgaggtggccaagggcatccccccccagcagaccccccaggacccccccctgagcagcgacggcatgtacgagtacggcagcatcgagaaggtgaagaacggctacgtgaaccccgagctggccatgcagggcgccaagaacaagaaccacgccgagcagaccagaagagccatgaccctgaagagcctgctgagagccctggtgaacatgcccccccactacagatacctgtgcatcagccacctgatcggctggaccgccttcctgagcaacatgctgttcttcaccgacttcatgggccagatcgtgtacagaggcgacccctacagcgcccacaacagcaccgagttcctgatctacgagagaggcgtggaggtgggctgctggggcctgtgcatcaacagcgtgttcagcagcctgtacagctacttccagaaggtgctggtgagctacatcggcctgaagggcctgtacttcaccggctacctgctgttcggcctgggcaccggcttcatcggcctgttccccaacgtgtacagcaccctggtgctgtgcagcctgttcggcgtgatgagcagcaccctgtacaccgtgcccttcaacctgatcaccgagtaccacagagaggaggagaaggaggtgtgctgccactag

SEQ ID NO: 100118 - DNA, 732 bp, synthetic construct
  misc_feature 1..732: note = Description of Artificial Sequence: Synthetic coding sequence
  source 1..732: mol_type = other DNA
atgggcagcaacagcggccaggccggcagacacatctacaagagcctggccgacgacggccccttcgacagcgtggagccccccaagagacccaccagcagactgatcatgcacagcatggccatgttcggcagagagttctgctacgccgtggaggccgcctacgtgacccccgtgctgctgagcgtgggcctgcccagcagcctgtacagcatcgtgtggttcctgagccccatcctgggcttcctgctgcagcccgtggtgggcagcgccagcgaccactgcagaagcagatggggcagaagaagaccctacatcctgaccctgggcgtgatgatgctggtgggcatggccctgtacctgaacggcgccaccgtggtggccgccctgatcgccaaccccagaagaaagctggtgtgggccatcagcgtgaccatgatcggcgtggtgctgttcgacttcgccgccgacttcatcgacggccccatcaaggcctacctgttcgacgtgtgcagccaccaggacaaggagaagggcctgcactaccacgccctgttcaccgacagccagggcaacgacatcaaggtgaccgccgagagcaccggcgagcacgccagcagcctgcccctgcccctgcaccagcccccccactggatggacagcctgcccgtgcagcacgccgtgctgcacagattccacggccccgactgcgtgcccagaggcagcctgtag

SEQ ID NO: 100119 - DNA, 741 bp, synthetic construct
  misc_feature 1..741: note = Description of Artificial Sequence: Synthetic coding sequence
  source 1..741: mol_type = other DNA
atggccctgtacctgaacggcgccaccgtggtggccggcttcggcggcgccctgggctacctgctgggcgccatcgactgggcccacctggagctgggcagactgctgggcaccgagttccaggtgatgttcttcttcagcgccctggtgctgaccctgtgcttcaccgtgcacctgtgcagcatcagcgaggcccccctgaccgaggtggccaagggcatccccccccagcagaccccccaggacccccccctgagcagcgacggcatgtacgagtacggcagcatcgagaaggtgaagaacggctacgtgaaccccgagctggccatgcagggcgccaagaacaagaaccacgccgagcagaccagaagagccatgaccctgaagagcctgctgagagccctggtgaacatgcccccccactacagatacctgtgcatcagccacctgatcggctggaccgccttcctgagcaacatgctgttcttcaccgacttcatgggccagatcgtgtacagaggcgacccctacagcgcccacaacagcaccgagttcctgatctacgagagaggcgtggaggtgggctgctggggcctgtgcatcaacagcgtgttcagcagcctgtacagctacttccagaaggtgctggtgagctacatcggcctgaagggcctgtacttcaccggctacctgctgttcggcctgggcaccggcttcatcggcctgttccccaacgtgtag

SEQ ID NO: 100120 - DNA, 1662 bp, synthetic construct
  misc_feature 1..1662: note = Description of Artificial Sequence: Synthetic coding sequence
  source 1..1662: mol_type = other DNA
atggtgcagagactgtgggtgagcagactgctgagacacagaaaggcccagctgctgctggtgaacctgctgaccttcggcctggaggtgtgcctggccgccggcatcacctacgtgccccccctgctgctggaggtgggcgtggaggagaagttcatgaccatggtgctgggcatcggccccgtgctgggcctggtgtgcgtgcccctgctgggcagcgccagcgaccactggagaggcagatacggcagaagaagacccttcatctgggccctgagcctgggcatcctgctgagcctgttcctgatccccagagccggctggctggccggcctgctgtgccccgaccccagacccctggagctggccctgctgatcctgggcgtgggcctgctggacttctgcggccaggtgtgcttcacccccctggaggccctgctgagcgacctgttcagagaccccgaccactgcagacaggcctacagcgtgtacgccttcatgatcagcctgggcggctgcctgggctacctgctgcccgccatcgactgggacaccagcgccctggccccctacctgggcacccaggaggagtgcctgttcggcctgctgaccctgatcttcctgacctgcgtggccgccaccctgctggtggccgaggaggccgccctgggccccaccgagcccgccgagggcctgagcgcccccagcctgagcccccactgctgcccctgcagagccagactggccttcagaaacctgggcgccctgctgcccagactgcaccagctgtgctgcagaatgcccagaaccctgagaagactgttcgtggccgagctgtgcagctggatggccctgatgaccttcaccctgttctacaccgacttcgtgggcgagggcctgtaccagggcgtgcccagagccgagcccggcaccgaggccagaagacactacgacgagggcgtgagaatgggcagcctgggcctgttcctgcagtgcgccatcagcctggtgttcagcctggtgatggacagactggtgcagagattcggcaccagagccgtgtacctggccagcgtggccgccttccccgtggccgccggcgccacctgcctgagccacagcgtggccgtggtgaccgccagcgccgccctgaccggcttcaccttcagcgccctgcagatcctgccctacaccctggccagcctgtaccacagagagaagcaggtgttcctgcccaagtacagaggcgacaccggcggcgccagcagcgaggacagcctgatgaccagcttcctgcccggccccaagcccggcgcccccttccccaacggccacgtgggcgccggcggcagcggcctgctgccccccccccccgccctgtgcggcgccagcgcctgcgacgtgagcgtgagagtggtggtgggcgagcccaccgaggccagagtggtgcccggcagaggcatctgcctggacctggccatcctggacagcgccttcctgctgagccaggtggcccccagcctgttcatgggcagcatcgtgcagctgagccagagcgtgaccgcctacatggtgagcgccgccggcctgggcctggtggccatctacttcgccacccaggtggtgttcgacaagagcgacctggccaagtacagcgcctag

SEQ ID NO: 100121 - DNA, 1293 bp, synthetic construct
  misc_feature 1..1293: note = Description of Artificial Sequence: Synthetic coding sequence
  source 1..1293: mol_type = other DNA
atggagggcagcgccagcccccccgagaagcccagagccagacccgccgccgccgtgctgtgcagaggccccgtggagcccctggtgttcctggccaacttcgccctggtgctgcagggccccctgaccacccagtacctgtggcacagattcagcgccgacctgggctacaacggcaccagacagagaggcggctgcagcaacagaagcgccgaccccaccatgcaggaggtggagaccctgaccagccactggaccctgtacatgaacgtgggcggcttcctggtgggcctgttcagcagcaccctgctgggcgcctggagcgacagcgtgggcagaagacccctgctggtgctggccagcctgggcctgctgctgcaggccctggtgagcgtgttcgtggtgcagctgcagctgcacgtgggctacttcgtgctgggcagaatcctgtgcgccctgctgggcgacttcggcggcctgctggccgccagcttcgccagcgtggccgacgtgagcagcagcagaagcagaaccttcagaatggccctgctggaggccagcatcggcgtggccggcatgctggccagcctgctgggcggccactggctgagagcccagggctacgccaaccccttctggctggccctggccctgctgatcgccatgaccctgtacgccgccttctgcttcggcgagaccctgaaggagcccaagagcaccagactgttcaccttcagacaccacagaagcatcgtgcagctgtacgtggcccccgcccccgagaagagcagaaagcacctggccctgtacagcctggccatcttcgtggtgatcaccgtgcacttcggcgcccaggacatcctgaccctgtacgagctgagcacccccctgtgctgggacagcaagctgatcggctacggcagcgccgcccagcacctgccctacctgaccagcctgctggccctgaagctgctgcagtactgcctggccgacgcctgggtggccgagatcggcctggccttcaacatcctgggcatggtggtgttcgccttcgccaccatcacccccctgatgttcaccggcgccctgttcagcgccgtggcctgcgtgaacagcctggccatgctgaccgccagcggcttcaacagcctgtaccccgccaccctgaacttcatgaagggcttccccttcctgctgggcgccggcctgctgctgatccccgccgtgctgatcggcatgctggagaaggccgacccccacctggagttccagcagttcccccagagcccctag

SEQ ID NO: 100122 - DNA, 1380 bp, synthetic construct
  misc_feature 1..1380: note = Description of Artificial Sequence: Synthetic coding sequence
  source 1..1380: mol_type = other DNA
atggagggcagcgccagcccccccgagaagcccagagccagacccgccgccgccgtgctgtgcagaggccccgtggagcccctggtgttcctggccaacttcgccctggtgctgcagggccccctgaccacccagtacctgtggcacagattcagcgccgacctgggctacaacggcaccagacagagaggcggctgcagcaacagaagcgccgaccccaccatgcaggaggtggagaccctgaccagccactggaccctgtacatgaacgtgggcggcttcctggtgggcctgttcagcagcaccctgctgggcgcctggagcgacagcgtgggcagaagacccctgctggtgctggccagcctgggcctgctgctgcaggccctggtgagcgtgttcgtggtgcagctgcagctgcacgtgggctacttcgtgctgggcagaatcctgtgcgccctgctgggcgacttcggcggcctgctggccgccagcttcgccagcgtggccgacgtgagcagcagcagaagcagaaccttcagaatggccctgctggaggccagcatcggcgtggccggcatgctggccagcctgctgggcggccactggctgagagcccagggctacgccaaccccttctggctggccctggccctgctgatcgccatgaccctgtacgccgccttctgcttcggcgagaccctgaaggagcccaagagcaccagactgttcaccttcagacaccacagaagcatcgtgcagctgtacgtggcccccgcccccgagaagagcagaaagcacctggccctgtacagcctggccatcttcgtggtgatcaccgtgcacttcggcgcccaggacatcctgaccctgtacgagctgagcacccccctgtgctgggacagcaagctgatcggctacggcagcgccgcccagcacctgccctacctgaccagcctgctggccctgaagctgctgcagtactgcctggccgacgcctgggtggccgagatcggcctggccttcaacatcctgggcatggtggtgttcgccttcgccaccatcacccccctgatgttcaccggctacggcctgctgttcctgagcctggtgatcacccccgtgatcagagccaagctgagcaagctggtgagagagaccgagcagggcgccctgttcagcgccgtggcctgcgtgaacagcctggccatgctgaccgccagcggcatcttcaacagcctgtaccccgccaccctgaacttcatgaagggcttccccttcctgctgggcgccggcctgctgctgatccccgccgtgctgatcggcatgctggagaaggccgacccccacctggagttccagcagttcccccagagcccctag

SEQ ID NO: 100123 - DNA, 1428 bp, synthetic construct
  misc_feature 1..1428: note = Description of Artificial Sequence: Synthetic coding sequence
  source 1..1428: mol_type = other DNA
atgagccccgaggtgacctgccccagaagaggccacctgcccagattccaccccagaacctgggtggagcccgtggtggccagcagccaggtggccgccagcctgtacgacgccggcctgctgctggtggtgaaggccagctacggcaccggcggcagcagcaaccacagcgccagccccagccccagaggcgccctggaggaccagcagcagagagccatcagcaacttctacatcatctacaacctggtggtgggcctgagccccctgctgagcgcctacggcctgggctggctgagcgacagataccacagaaagatcagcatctgcatgagcctgctgggcttcctgctgagcagactgggcctgctgctgaaggtgctgctggactggcccgtggaggtgctgtacggcgccgccgccctgaacggcctgttcggcggcttcagcgccttctggagcggcgtgatggccctgggcagcctgggcagcagcgagggcagaagaagcgtgagactgatcctgatcgacctgatgctgggcctggccggcttctgcggcagcatggccagcggccacctgttcaagcagatggccggccacagcggccagggcctgatcctgaccgcctgcagcgtgagctgcgccagcttcgccctgctgtacagcctgctggtgctgaaggtgcccgagagcgtggccaagcccagccaggagctgcccgccgtggacaccgtgagcggcaccgtgggcacctacagaaccctggaccccgaccagctggaccagcagtacgccgtgggccacccccccagccccggcaaggccaagccccacaagaccaccatcgccctgctgttcgtgggcgccatcatctacgacctggccgtggtgggcaccgtggacgtgatccccctgttcgtgctgagagagcccctgggctggaaccaggtgcaggtgggctacggcatggccgccggctacaccatcttcatcaccagcttcctgggcgtgctggtgttcagcagatgcttcagagacaccaccatgatcatgatcggcatggtgagcttcggcagcggcgccctgctgctggccttcgtgaaggagacctacatgttctacatcgccagagccgtgatgctgttcgccctgatccccgtgaccaccatcagaagcgccatgagcaagctgatcaagggcagcagctacggcaaggtgttcgtgatcctgcagctgagcctggccctgaccggcgtggtgaccagcaccctgtacaacaagatctaccagctgaccatggacatgttcgtgggcagctgcttcgccctgagcagcttcctgagcttcctggccatcatccccatcagcatcgtggcctacaagcaggtgcccctgagcccctacggcgacatcatcgagaagtag

SEQ ID NO: 100124 - DNA, 1713 bp, synthetic construct
  misc_feature 1..1713: note = Description of Artificial Sequence: Synthetic coding sequence
  source 1..1713: mol_type = other DNA
atggaggcccccgaggagcccgcccccgtgagaggcggccccgaggccaccctggaggtgagaggcagcagatgcctgagactgagcgccttcagagaggagctgagagccctgctggtgctggccggccccgccttcctggtgcagctgatggtgttcctgatcagcttcatcagcagcgtgttctgcggccacctgggcaagctggagctggacgccgtgaccctggccatcgccgtgatcaacgtgaccggcgtgagcgtgggcttcggcctgagcagcgcctgcgacaccctgatcagccagacctacggcagccagaacctgaagcacgtgggcgtgatcctgcagagaagcgccctggtgctgctgctgtgctgcttcccctgctgggccctgttcctgaacacccagcacatcctgctgctgttcagacaggaccccgacgtgagcagactgacccagacctacgtgaccatcttcatccccgccctgcccgccaccttcctgtacatgctgcaggtgaagtacctgctgaaccagggcatcgtgctgccccagatcgtgaccggcgtggccgccaacctggtgaacgccctggccaactacctgttcctgcaccagctgcacctgggcgtgatcggcagcgccctggccaacctgatcagccagtacaccctggccctgctgctgttcctgtacatcctgggcaagaagctgcaccaggccacctggggcggctggagcctggagtgcctgcaggactgggccagcttcctgagactggccatccccagcatgctgatgctgtgcatggagtggtgggcctacgaggtgggcagcttcctgagcggcatcctgggcatggtggagctgggcgcccagagcatcgtgtacgagctggccatcatcgtgtacatggtgcccgccggcttcagcgtggccgccagcgtgagagtgggcaacgccctgggcgccggcgacatggagcaggccagaaagagcagcaccgtgagcctgctgatcaccgtgctgttcgccgtggccttcagcgtgctgctgctgagctgcaaggaccacgtgggctacatcttcaccaccgacagagacatcatcaacctggtggcccaggtggtgcccatctacgccgtgagccacctgttcgaggccctggcctgcaccagcggcggcgtgctgagaggcagcggcaaccagaaggtgggcgccatcgtgaacaccatcggctactacgtggtgggcctgcccatcggcatcgccctgatgttcgccaccaccctgggcgtgatgggcctgtggagcggcatcatcatctgcaccgtgttccaggccgtgtgcttcctgggcttcatcatccagctgaactggaagaaggcctgccagcaggcccaggtgcacgccaacctgaaggtgaacaacgtgcccagaagcggcaacagcgccctgccccaggaccccctgcaccccggctgccccgagaacctggagggcatcctgaccaacgacgtgggcaagaccggcgagccccagagcgaccagcagatgagacaggaggagcccctgcccgagcacccccaggacggcgccaagctgagcagaaagcagctggtgctgagaagaggcctgctgctgctgggcgtgttcctgatcctgctggtgggcatcctggtgagattctacgtgagaatccagtag

SEQ ID NO: 100125 - DNA, 1761 bp, synthetic construct
  misc_feature 1..1761: note = Description of Artificial Sequence: Synthetic coding sequence
  source 1..1761: mol_type = other DNA
atggaggcccccgaggagcccgcccccgtgagaggcggccccgaggccaccctggaggtgagaggcagcagatgcctgagactgagcgccttcagagaggagctgagagccctgctggtgctggccggccccgccttcctggtgcagctgatggtgttcctgatcagcttcatcagcagcgtgttctgcggccacctgggcaagctggagctggacgccgtgaccctggccatcgccgtgatcaacgtgaccggcgtgagcgtgggcttcggcctgagcagcgcctgcgacaccctgatcagccagacctacggcagccagaacctgaagcacgtgggcgtgatcctgcagagaagcgccctggtgctgctgctgtgctgcttcccctgctgggccctgttcctgaacacccagcacatcctgctgctgttcagacaggaccccgacgtgagcagactgacccagacctacgtgaccatcttcatccccgccctgcccgccaccttcctgtacatgctgcaggtgaagtacctgctgaaccagggcatcgtgctgccccagatcgtgaccggcgtggccgccaacctggtgaacgccctggccaactacctgttcctgcaccagctgcacctgggcgtgatcggcagcgccctggccaacctgatcagccagtacaccctggccctgctgctgttcctgtacatcctgggcaagaagctgcaccaggccacctggggcggctggagcctggagtgcctgcaggactgggccagcttcctgagactggccatccccagcatgctgatgctgtgcatggagtggtgggcctacgaggtgggcagcttcctgagcggcatcctgggcatggtggagctgggcgcccagagcatcgtgtacgagctggccatcatcgtgtacatggtgcccgccggcttcagcgtggccgccagcgtgagagtgggcaacgccctgggcgccggcgacatggagcaggccagaaagagcagcaccgtgagcctgctgatcaccgtgctgttcgccgtggccttcagcgtgctgctgctgagctgcaaggaccacgtgggctacatcttcaccaccgacagagacatcatcaacctggtggcccaggtggtgcccatctacgccgtgagccacctgttcgaggccctggcctgcaccagcggcggcgtgctgagaggcagcggcaaccagaaggtgggcgccatcgtgaacaccatcggctactacgtggtgggcctgcccatcggcatcgccctgatgttcgccaccaccctgggcgtgatgggcctgtggagcggcatcatcatctgcaccgtgttccaggccgtgtgcttcctgggcttcatcatccagctgaactggaagaaggcctgccagcaggcccaggtgcacgccaacctgaaggtgaacaacgtgcccagaagcggcaacagcgccctgccccaggaccccctgcaccccggctgccccgagaacctggagggcatcctgaccaacgacgtgggcaagaccggcgagccccagagcgaccagcagatgagacaggaggagcccctgcccgagcacccccaggacggcgccaagctgagcagaaagcagctggtgctgagaagaggcctgctgctgctgggcgtgttcctgatcctgctggccggcgtgagatggtgcgaccacagcagcctgcagcccagaaccctgggcctgcaggccatcctgctgtgccagccccccgagtag

SEQ ID NO: 100126 - DNA, 849 bp, synthetic construct
  misc_feature 1..849: note = Description of Artificial Sequence: Synthetic coding sequence
  source 1..849: mol_type = other DNA
atggtggagctgggcgcccagagcatcgtgtacgagctggccatcatcgtgtacatggtgcccgccggcttcagcgtggccgccagcgtgagagtgggcaacgccctgggcgccggcgacatggagcaggccagaaagagcagcaccgtgagcctgctgatcaccgtgctgttcgccgtggccttcagcgtgctgctgctgagctgcaaggaccacgtgggctacatcttcaccaccgacagagacatcatcaacctggtggcccaggtggtgcccatctacgccgtgagccacctgttcgaggccctggcctgcaccagcggcggcgtgctgagaggcagcggcaaccagaaggtgggcgccatcgtgaacaccatcggctactacgtggtgggcctgcccatcggcatcgccctgatgttcgccaccaccctgggcgtgatgggcctgtggagcggcatcatcatctgcaccgtgttccaggccgtgtgcttcctgggcttcatcatccagctgaactggaagaaggcctgccagcaggcccaggtgcacgccaacctgaaggtgaacaacgtgcccagaagcggcaacagcgccctgccccaggaccccctgcaccccggctgccccgagaacctggagggcatcctgaccaacgacgtgggcaagaccggcgagccccagagcgaccagcagatgagacaggaggagcccctgcccgagcacccccaggacggcgccaagctgagcagaaagcagctggtgctgagaagaggcctgctgctgctgggcgtgttcctgatcctgctggtgggcatcctggtgagattctacgtgagaatccagtag

SEQ ID NO: 100127 - DNA, 1332 bp, synthetic construct
  misc_feature 1..1332: note = Description of Artificial Sequence: Synthetic coding sequence
  source 1..1332: mol_type = other DNA
atggaggcccccgaggagcccgcccccgtgagaggcggccccgaggccaccctggaggtgagaggcagcagatgcctgagactgagcgccttcagagaggagctgagagccctgctggtgctggccggccccgccttcctggtgcagctgatggtgttcctgatcagcttcatcagcagcgtgttctgcggccacctgggcaagctggagctggacgccgtgaccctggccatcgccacctacggcagccagaacctgaagcacgtgggcgtgatcctgcagagaagcgccctggtgctgctgctgtgctgcttcccctgctgggccctgttcctgaacacccagcacatcctgctgctgttcagacaggaccccgacgtgagcagactgacccagacctacgtgaccatcttcatccccgccctgcccgccaccttcctgtacatgctgcaggtgaagtacctgctgaaccagggcatcgtgctgccccagatcgtgaccggcgtggccgccaacctggtgaacgccctggccaactacctgttcctgcaccagctgcacctgggcgtgatcggcagcgccctggccaacctgatcagccagtacaccctggccctgctgctgttcctgtacatcctgggcaagaagctgcaccaggccacctggggcggctggagcctggagtgcctgcaggactgggccagcttcctgagactggccatccccagcatgctgatgctgtgcatggagtggtgggcctacgaggtgggcagcttcctgagcggcatcctgggcatggtggagctgggcgcccagagcatcgtgtacgagctggccatcatcgtgtacatggtgcccgccggcttcagcgtggccgccagcgtgagagtgggcaacgccctgggcgccggcgacatggagcaggccagaaagagcagcaccgtgagcctgctgatcaccgtgctgttcgccgtggccttcagcgtgctgctgctgagctgcaaggaccacgtgggctacatcttcaccaccgacagagacatcatcaacctggtggcccaggtggtgcccatctacgccgtgagccacctgttcgaggccctggcctgcaccagcggcggcgtgctgagaggcagcggcaaccagaaggtgggcgccatcgtgaacaccatcggctactacgtggtgggcctgcccatcggcatcgccctgatgttcgccaccaccctgggcgtgatgggcagcggcaccagacagttcgagagcaagcagagagccagcgagtgggagttctgcagccccagcggcagcgccagccccagagtgccctag

SEQ ID NO: 100128 - DNA, 738 bp, synthetic construct
  misc_feature 1..738: note = Description of Artificial Sequence: Synthetic coding sequence
  source 1..738: mol_type = other DNA
atgctgatgctgtgcatggagtggtgggcctacgaggtgggcagcttcctgagcggcatcctgggcatggtggagctgggcgcccagagcatcgtgtacgagctggccatcatcgtgtacatggtgcccgccggcttcagcgtggccgccagcgtgagagtgggcaacgccctgggcgccggcgacatggagcaggccagaaagagcagcaccgtgagcctgctgatcaccgtgctgttcgccgtggccttcagcgtgctgctgctgagctgcaaggaccacgtgggctacatcttcaccaccgacagagacatcatcaacctggtggcccaggtggtgcccatctacgccgtgagccacctgttcgaggccctggcctgcaccagcggcggcgtgctgagaggcagcggcaaccagaaggtgggcgccatcgtgaacaccatcggctactacgtggtgggcctgcccatcggcatcgccctgatgttcgccaccaccctgggcgtgatgggctgccccgagaacctggagggcatcctgaccaacgacgtgggcaagaccggcgagccccagagcgaccagcagatgagacaggaggagcccctgcccgagcacccccaggacggcgccaagctgagcagaaagcagctggtgctgagaagaggcctgctgctgctgggcgtgttcctgatcctgctggtgggcatcctggtgagattctacgtgagaatccagtag

SEQ ID NO: 100129 - DNA, 1761 bp, synthetic construct; identical to SEQ ID NO: 100125
  misc_feature 1..1761: note = Description of Artificial Sequence: Synthetic coding sequence
  source 1..1761: mol_type = other DNA

SEQ ID NO: 100130 - DNA, 735 bp, synthetic construct
  misc_feature 1..735: note = Description of Artificial Sequence: Synthetic coding sequence
  source 1..735: mol_type = other DNA
atggaggcccccgaggagcccgcccccgtgagaggcggccccgaggccaccctggaggtgagaggcagcagatgcctgagactgagcgccttcagagaggagctgagagccctgctggtgctggccggccccgccttcctggtgcagctgatggtgttcctgatcagcttcatcagcagcgtgttctgcggccacctgggcaagctggagctggacgccgtgaccctggccatcgccgtgatcaacgtgaccggcgtgagcgtgggcttcggcctgagcagcgcctgcgacaccctgatcagccagacctacggcagccagaacctgaagcacgtgggcgtgatcctgcagagaagcgccctggtgctgctgctgtgctgcttcccctgctgggccctgttcctgaacacccagcacatcctgctgctgttcagacaggaccccgacgtgagcagactgacccagacctacgtgaccatcttcatccccgccctgcccgccaccttcctgtacatgctgcaggtgaagtacctgctgaaccagagactgtgcaccggcaagctggacttccccgtgcaccccggcagcacccccctgagcctgcaccccagagagaagaccgccagcagctacatgggcagactggtgcccagagtgcccgccggcctgggcctgctgcccccccccggccacccccagcacgcccacgccgtgcacggcgtggtgggcctgtag

SEQ ID NO: 100131 - DNA, 1809 bp, synthetic construct
  misc_feature 1..1809: note = Description of Artificial Sequence: Synthetic coding sequence
  source 1..1809: mol_type = other DNA
atggacagcctgcaggacaccgtggccctggaccacggcggctgctgccccgccctgagcagactggtgcccagaggcttcggcaccgagatgtggaccctgttcgccctgagcggccccctgttcctgttccaggtgctgaccttcatgatctacatcgtgagcaccgtgttctgcggccacctgggcaaggtggagctggccagcgtgaccctggccgtggccttcgtgaacgtgtgcggcgtgagcgtgggcgtgggcctgagcagcgcctgcgacaccctgatgagccagagcttcggcagccccaacaagaagcacgtgggcgtgatcctgcagagaggcgccctggtgctgctgctgtgctgcctgccctgctgggccctgttcctgaacacccagcacatcctgctgctgttcagacaggaccccgacgtgagcagactgacccaggactacgtgatgatcttcatccccggcctgcccgtgatcttcctgtacaacctgctggccaagtacctgcagaaccagggctggctgaagggccaggaggaggagagccccttccagacccccggcctgagcatcctgcaccccagccacagccacctgagcagagccagcttccacctgttccagaagatcacctggccccaggtgctgagcggcgtggtgggcaactgcgtgaacggcgtggccaactacgccctggtgagcgtgctgaacctgggcgtgagaggcagcgcctacgccaacatcatcagccagttcgcccagaccgtgttcctgctgctgtacatcgtgctgaagaagctgcacctggagacctgggccggctggagcagccagtgcctgcaggactggggccccttcttcagcctggccgtgcccagcatgctgatgatctgcgtggagtggtgggcctacgagatcggcagcttcctgatgggcctgctgagcgtggtggacctgagcgcccaggccgtgatctacgaggtggccaccgtgacctacatgatccccctgggcctgagcatcggcgtgtgcgtgagagtgggcatggccctgggcgccgccgacaccgtgcaggccaagagaagcgccgtgagcggcgtgctgagcatcgtgggcatcagcctggtgctgggcaccctgatcagcatcctgaagaaccagctgggccacatcttcaccaacgacgaggacgtgatcgccctggtgagccaggtgctgcccgtgtacagcgtgttccacgtgttcgaggccatctgctgcgtgtacggcggcgtgctgagaggcaccggcaagcaggccttcggcgccgccgtgaacgccatcacctactacatcatcggcctgcccctgggcatcctgctgaccttcgtggtgagaatgagaatcatgggcctgtggctgggcatgctggcctgcgtgttcctggccaccgccgccttcgtggcctacaccgccagactggactggaagctggccgccgaggaggccaagaagcacagcggcagacagcagcagcagagagccgagagcaccgccaccagacccggccccgagaaggccgtgctgagcagcgtggccaccggcagcagccccggcatcaccctgaccacctacagcagaagcgagtgccacgtggacttcttcagaacccccgaggaggcccacgccctgagcgcccccaccagcagactgagcgtgaagcagctggtgatcagaagaggcgccgccctgggcgccgccagcgccaccctgatggtgggcctgaccgtgagaatcctggccaccagacactag

SEQ ID NO: 100132 - DNA, 1743 bp, synthetic construct
  misc_feature 1..1743: note = Description of Artificial Sequence: Synthetic coding sequence
  source 1..1743: mol_type = other DNA
atggacagcctgcaggacaccgtggccctggaccacggcggctgctgccccgccctgagcagactggtgcccagaggcttcggcaccgagatgtggaccctgttcgccctgagcggccccctgttcctgttccaggtgctgaccttcatgatctacatcgtgagcaccgtgttctgcggccacctgggcaaggtggagctggccagcgtgaccctggccgtggccttcgtgaacgtgtgcggcgtgagcgtgggcgtgggcctgagcagcgcctgcgacaccctgatgagccagagcttcggcagccccaacaagaagcacgtgggcgtgatcctgcagagaggcgccctggtgctgctgctgtgctgcctgccctgctgggccctgttcctgaacacccagcacatcctgctgctgttcagacaggaccccgacgtgagcagactgacccaggactacgtgatgatcttcatccccggcctgcccgtgatcttcctgtacaacctgctggccaagtacctgcagaaccagaagatcacctggccccaggtgctgagcggcgtggtgggcaactgcgtgaacggcgtggccaactacgccctggtgagcgtgctgaacctgggcgtgagaggcagcgcctacgccaacatcatcagccagttcgcccagaccgtgttcctgctgctgtacatcgtgctgaagaagctgcacctggagacctgggccggctggagcagccagtgcctgcaggactggggccccttcttcagcctggccgtgcccagcatgctgatgatctgcgtggagtggtgggcctacgagatcggcagcttcctgatgggcctgctgagcgtggtggacctgagcgcccaggccgtgatctacgaggtggccaccgtgacctacatgagacacagccacagactggcctacgccgcccacgtgaccagaatccccctgggcctgagcatcggcgtgtgcgtgagagtgggcatggccctgggcgccgccgacaccgtgcaggccaagagaagcgccgtgagcggcgtgctgagcatcgtgggcatcagcctggtgctgggcaccctgatcagcatcctgaagaaccagctgggccacatcttcaccaacgacgaggacgtgatcgccctggtgagccaggtgctgcccgtgtacagcgtgttccacgtgttcgaggccatctgctgcgtgtacggcggcgtgctgagaggcaccggcaagcaggccttcggcgccgccgtgaacgccatcacctactacatcatcggcctgcccctgggcatcctgctgaccttcgtggtgagaatgagaatcatgggcctgtggctgggcatgctggcctgcgtgttcctggccaccgccgccttcgtggcctacaccgccagactggactggaagctggccgccgaggaggccaagaagcacagcggcagacagcagcagcagagagccgagagcaccgccaccagacccggccccgagaaggccgtgctgagcagcgtggccaccggcagcagccccggcatcaccctgaccacctacagcagaagcgagtgccacgtggacttcttcagaacccccgaggaggcccacgccctgagcgcccccaccagcagactgagcgtgaagcagctggtgatcagaagaggcgccgccctgggcgccgccagcgccaccctgatggtgggcctgaccgtgagaatcctggccaccagacactag

SEQ ID NO: 100133 - DNA, 1092 bp, synthetic construct
  misc_feature 1..1092: note = Description of Artificial Sequence: Synthetic coding sequence
  source 1..1092: mol_type = other DNA
atggacagcctgcaggacaccgtggccctggaccacggcggctgctgccccgccctgagcagactggtgcccagaggcttcggcaccgagatgtggaccctgttcgccctgagcggccccctgttcctgttccaggtgctgaccttcatgatctacatcgtgagcaccgtgttctgcggccacctgggcaaggtggagctggccagcgtgaccctggccgtggccttcgtgaacgtgtgcggcgtgagcgtgggcgtgggcctgagcagcgcctgcgacaccctgatgagccagagcttcggcagccccaacaagaagcacgtgggcgtgatcctgcagagaggcgccctggtgctgctgctgtgctgcctgccctgctgggccctgttcctgaacacccagcacatcctgctgctgttcagacaggaccccgacgtgagcagactgacccaggactacgtgatgatcttcatccccggcctgcccgtgatcttcctgtacaacctgctggccaagtacctgcagaaccagaagatcacctggccccaggtgctgagcggcgtggtgggcaactgcgtgaacggcgtggccaactacgccctggtgagcgtgctgaacctgggcgtgagaggcagcgcctacgccaacatcatcagccagttcgcccagaccgtgttcctgctgctgtacatcgtgctgaagaagctgcacctggagacctgggccggctggagcagccagtgcctgcaggactggggccccttcttcagcctggccgtgcccagcatgctgatgatctgcgtggagtggtgggcctacgagatcggcagcttcctgatgggcctgctgagcgtggtggacctgagcgcccaggccgtgatctacgaggtggccaccgtgacctacatgatccccctgggcctgagcatcggcgtgtgcgtgagagtgggcatggccctgggcgccgccgacaccgtgcaggccaagagaagcgccgtgagcggcgtgctgagcatcgtgggcatcagcctggtgctgggcaccctgatcagcatcctgaagaaccagctgggccacatcttcaccaactag

SEQ ID NO: 100134 - DNA, 891 bp, synthetic construct
  misc_feature 1..891: note = Description of Artificial Sequence: Synthetic coding sequence
  source 1..891: mol_type = other DNA
atgatctacatcgtgagcaccgtgttctgcggccacctgggcaaggtggagctggccagcgtgaccctggccgtggccttcgtgaacgtgtgcggcgtgagcgtgggcgtgggcctgagcagcgcctgcgacaccctgatgagccagagcttcggcagccccaacaagaagcacgtgggcgtgatcctgcagagaggcgccctggtgctgctgctgtgctgcctgccctgctgggccctgttcctgaacacccagcacatcctgctgctgttcagacaggaccccgacgtgagcagactgacccaggactacgtgatgatcttcatccccggcctgcccgtgatcttcctgtacaacctgctggccaagtacctgcagaaccagaagatcacctggccccaggtgctgagcggcgtggtgggcaactgcgtgaacggcgtggccaactacgccctggtgagcgtgctgaacctgggcgtgagaggcagcgcctacgccaacatcatcagccagttcgcccagaccgtgttcctgctgctgtacatcgtgctgaagaagctgcacctggagacctgggccggctggagcagccagtgcctgcaggactggggccccttcttcagcctggccgtgcccagcatgctgatgatctgcgtggagtggtgggcctacgagatcggcagcttcctgatgggcctgctgagcgtggtggacctgagcgcccaggccgtgatctacgaggtggccaccgtgacctacatgatccccctgggcctgagcatcggcgtgtgcgtgagagtgggcatggccctgggcgccgccgacaccgtgcaggccaagagaagcgccgtgagcggcgtgctgagcatcgccagaagcgacccctggtag

SEQ ID NO: 100135 - DNA, 531 bp, synthetic construct
  misc_feature 1..531: note = Description of Artificial Sequence: Synthetic coding sequence
  source 1..531: mol_type = other DNA
atgaaggccagcggcaccctgagagagtacaaggtggtgggcagatgcctgcccacccccaagtgccacaccccccccctgtacagaatgagaatcttcgcccccaaccacgtggtggccaagagcagattctggtacttcgtgagccagctgaagaagatgaagaagagcagcggcgagatcgtgtactgcggccaggtgttcgagaagagccccctgagagtgaagaacttcggcatctggctgagatacgacagcagaagcggcacccacaacatgtacagagagtacagagacctgaccaccgccggcgccgtgacccagtgctacagagacatgggcgccagacacagagccagagcccacagcatccagatcatgaaggtggaggagatcgccgccagcaagtgcagaagacccgccgtgaagcagttccacgacagcaagatcaagttccccctgccccacagagtgctgagaagacagcacaagcccagattcaccaccaagagacccaacaccttcttctag

SEQ ID NO: 100136 - DNA, 1995 bp, synthetic construct
  misc_feature 1..1995: note = Description of Artificial Sequence: Synthetic coding sequence
  source 1..1995: mol_type = other DNA
atggacagcagcacctggagccccaagaccaccgccgtgaccagacccgtggagacccacgagctgatcagaaacgccgccgacatcagcatcatcgtgatctacttcgtggtggtgatggccgtgggcctgtgggccatgttcagcaccaacagaggcaccgtgggcggcttcttcctggccggcagaagcatggtgtggtggcccatcggcgccagcctgttcgccagcaacatcggcagcggccacttcgtgggcctggccggcaccggcgccgccagcggcatcgccatcggcggcttcgagtggaacgccctggtgctggtggtggtgctgggctggctgttcgtgcccatctacatcaaggccggcgtggtgaccatgcccgagtacctgagaaagagattcggcggccagagaatccaggtgtacctgagcctgctgagcctgctgctgtacatcttcaccaagatcagcgccgacatcttcagcggcgccatcttcatcaacctggccctgggcctgaacctgtacctggccatcttcctgctgctggccatcaccgccctgtacaccatcaccggcggcctggccgccgtgatctacaccgacaccctgcagaccgtgatcatgctggtgggcagcctgatcctgaccggcttcgccttccacgaggtgggcggctacgacgccttcatggagaagtacatgaaggccatccccaccatcgtgagcgacggcaacaccaccttccaggagaagtgctacacccccagagccgacagcttccacatcttcagagaccccctgaccggcgacctgccctggcccggcttcatcttcggcatgagcatcctgaccctgtggtactggtgcaccgaccaggtgatcgtgcagagatgcctgagcgccaagaacatgagccacgtgaagggcggctgcatcctgtgcggctacctgaagctgatgcccatgttcatcatggtgatgcccggcatgatcagcagaatcctgtacaccgagaagatcgcctgcgtggtgcccagcgagtgcgagaagtactgcggcaccaaggtgggctgcaccaacatcgcctaccccaccctggtggtggagctgatgcccaacggcctgagaggcctgatgctgagcgtgatgctggccagcctgatgagcagcctgaccagcatcttcaacagcgccagcaccctgttcaccatggacatctacgccaaggtgagaaagagagccagcgagaaggagctgatgatcgccggcagactgttcatcctggtgctgatcggcatcagcatcgcctgggtgcccatcgtgcagagcgcccagagcggccagctgttcgactacatccagagcatcaccagctacctgggcccccccatcgccgccgtgttcctgctggccatcttctggaagagagtgaacgagcccggcgccttctggggcctgatcctgggcctgctgatcggcatcagcagaatgatcaccgagttcgcctacggcaccggcagctgcatggagcccagcaactgccccaccatcatctgcggcgtgcactacctgtacttcgccatcatcctgttcgccatcagcttcatcaccatcgtggtgatcagcctgctgaccaagcccatccccgacgtgcacctgtacagactgtgctggagcctgagaaacagcaaggaggagagaatcgacctggacgccgaggaggagaacatccaggagggccccaaggagaccatcgagatcgagacccaggtgcccgagaagaagaagggcatcttcagaagagcctacgacctgttctgcggcctggagcagcacggcgcccccaagatgaccgaggaggaggagaaggccatgaagatgaagatgaccgacaccagcgagaagcccctgtggagaaccgtgctgaacgtgaacggcatcatcctggtgaccgtggccgtgttctgccacgcctacttcgcctag

SEQ ID NO: 100137 - DNA, 1614 bp, synthetic construct
  misc_feature 1..1614: note = Description of Artificial Sequence: Synthetic coding sequence
  source 1..1614: mol_type = other DNA
atgcccgagtacctgagaaagagattcggcggccagagaatccaggtgtacctgagcctgctgagcctgctgctgtacatcttcaccaagatcagcgccgacatcttcagcggcgccatcttcatcaacctggccctgggcctgaacctgtacctggccatcttcctgctgctggccatcaccgccctgtacaccatcaccggcggcctggccgccgtgatctacaccgacaccctgcagaccgtgatcatgctggtgggcagcctgatcctgaccggcttcgccttccacgaggtgggcggctacgacgccttcatggagaagtacatgaaggccatccccaccatcgtgagcgacggcaacaccaccttccaggagaagtgctacacccccagagccgacagcttccacatcttcagagaccccctgaccggcgacctgccctggcccggcttcatcttcggcatgagcatcctgaccctgtggtactggtgcaccgaccaggtgatcgtgcagagatgcctgagcgccaagaacatgagccacgtgaagggcggctgcatcctgtgcggctacctgaagctgatgcccatgttcatcatggtgatgcccggcatgatcagcagaatcctgtacaccgagaagatcgcctgcgtggtgcccagcgagtgcgagaagtactgcggcaccaaggtgggctgcaccaacatcgcctaccccaccctggtggtggagctgatgcccaacggcctgagaggcctgatgctgagcgtgatgctggccagcctgatgagcagcctgaccagcatcttcaacagcgccagcaccctgttcaccatggacatctacgccaaggtgagaaagagagccagcgagaaggagctgatgatcgccggcagactgttcatcctggtgctgatcggcatcagcatcgcctgggtgcccatcgtgcagagcgcccagagcggccagctgttcgactacatccagagcatcaccagctacctgggcccccccatcgccgccgtgttcctgctggccatcttctggaagagagtgaacgagcccggcgccttctggggcctgatcctgggcctgctgatcggcatcagcagaatgatcaccgagttcgcctacggcaccggcagctgcatggagcccagcaactgccccaccatcatctgcggcgtgcactacctgtacttcgccatcatcctgttcgccatcagcttcatcaccatcgtggtgatcagcctgctgaccaagcccatccccgacgtgcacctgtacagactgtgctggagcctgagaaacagcaaggaggagagaatcgacctggacgccgaggaggagaacatccaggagggccccaaggagaccatcgagatcgagacccaggtgcccgagaagaagaagggcatcttcagaagagcctacgacctgttctgcggcctggagcagcacggcgcccccaagatgaccgaggaggaggagaaggccatgaagatgaagatgaccgacaccagcgagaagcccctgtggagaaccgtgctgaacgtgaacggcatcatcctggtgaccgtggccgtgttctgccacgcctacttcgcctag

SEQ ID NO: 100138 - DNA, 1191 bp, synthetic construct
  misc_feature 1..1191: note = Description of Artificial Sequence: Synthetic coding sequence
  source 1..1191: mol_type = other DNA
atggaggtgaagaacttcgccgtgtgggactacgtggtgttcgccgccctgttcttcatcagcagcggcatcggcgtgttcttcgccatcaaggagagaaagaaggccaccagcagagagttcctggtgggcggcagacagatgagcttcggccccgtgggcctgagcctgaccgccagcttcatgagcgccgtgaccgtgctgggcacccccagcgaggtgtacagattcggcgccagcttcctggtgttcttcatcgcctacctgttcgtgatcctgctgaccagcgagctgttcctgcccgtgttctacagaagcggcatcaccagcacctacgagtacctgcagctgagattcaacaagcccgtgagatacgccgccaccgtgatctacatcgtgcagaccatcctgtacaccggcgtggtggtgtacgcccccgccctggccctgaaccaggtgaccggcttcgacctgtggggcagcgtgttcgccaccggcatcgtgtgcaccttctactgcaccctgggcggcctgaaggccgtggtgtggaccgacgccttccagatggtggtgatgatcgtgggcttcctgaccgtgctgatccagggcagcacccacgccggcggcttccacaacgtgctggagcagagcaccaacggcagcagactgcacatcttcgacttcgacgtggaccccctgagaagacacaccttctggaccatcaccgtgggcggcaccttcacctggctgggcatctacggcgtgaaccagagcaccatccagagatgcatcagctgcaagaccgagaagcacgccaagctggccctgtacttcaacctgctgggcctgtggatcatcctggtgtgcgccgtgttcagcggcctgatcatgtacagccacttcaaggactgcgacccctggaccagcggcatcatcagcgcccccgaccagctgatgccctacttcgtgatggagatcttcgccaccatgcccggcctgcccggcctgttcgtggcctgcgccttcagcggcaccctgagcaccgtggccagcagcatcaacgccctggccaccgtgaccttcgaggacttcgtgaagagctgcttcccccacctgagcgacaagctgagcacctggatcagcaagggcctgtgcagatacagctggtggaccttctacagcatcagctag

SEQ ID NO: 100139 - DNA, 1857 bp, synthetic construct
  misc_feature 1..1857: note = Description of Artificial Sequence: Synthetic coding sequence
  source 1..1857: mol_type = other DNA
atggaggtgaagaacttcgccgtgtgggactacgtggtgttcgccgccctgttcttcatcagcagcggcatcggcgtgttcttcgccatcaaggagagaaagaaggccaccagcagagagttcctggtgggcggcagacagatgagcttcggccccgtgggcctgagcctgaccgccagcttcatgagcgccgtgaccgtgctgggcacccccagcgaggtgtacagattcggcgccagcttcctggtgttcttcatcgcctacctgttcgtgatcctgctgaccagcgagctgttcctgcccgtgttctacagaagcggcatcaccagcacctacgagtacctgcagctgagattcaacaagcccgtgagatacgccgccaccgtgatctacatcgtgcagaccatcctgtacaccggcgtggtggtgtacgcccccgccctggccctgaaccaggtgaccggcttcgacctgtggggcagcgtgttcgccaccggcatcgtgtgcaccttctactgcaccctgggcggcctgaaggccgtggtgtggaccgacgccttccagatggtggtgatgatcgtgggcttcctgaccgtgctgatccagggcagcacccacgccggcggcttccacaacgtgctggagcagagcaccaacggcagcagactgcacatcttcgacttcgacgtggaccccctgagaagacacaccttctggaccatcaccgtgggcggcaccttcacctggctgggcatctacggcgtgaaccagagcaccatccagagatgcatcagctgcaagaccgagaagcacgccaagctggccctgtacttcaacctgctgggcctgtggatcatcctggtgtgcgccgtgttcagcggcctgatcatgtacagccacttcaaggactgcgacccctggaccagcggcatcatcagcgcccccgaccagctgatgccctacttcgtgatggagatcttcgccaccatgcccggcctgcccggcctgttcgtggcctgcgccttcagcggcaccctgagcaccgtggccagcagcatcaacgccctggccaccgtgaccttcgaggacttcgtgaagagctgcttcccccacctgagcgacaagctgagcacctggatcagcaagggcctgtgcctgctgttcggcgtgatgtgcaccagcatggccgtggccgccagcgtgatgggcggcgtggtgcaggccagcctgagcatccacggcatgtgcggcggccccatgctgggcctgttcagcctgggcatcgtgttccccttcgtgaactggaagggcgccctgggcggcctgctgaccggcatcaccctgagcttctgggtggccatcggcgccttcatctaccccgcccccgccagcaagacctggcccctgcccctgagcaccgaccagtgcatcaagagcaacgtgaccgccaccggcccccccgtgctgagcagcagacccggcatcgccgacacctggtacagcatcagctacctgtactacagcgccgtgggctgcctgggctgcatcgtggccggcgtgatcatcagcctgatcaccggcagacagagaggcgaggacatccagcccctgctgatcagacccgtgtgcaacctgttctgcttctggagcaagaagtacaagaccctgtgctggtgcggcgtgcagcacgacagcggcaccgagcaggagaacctggagaacggcagcgccagaaagcagggcgccgagagcgtgctgcagaacggcctgagaagagagagcctggtgcacgtgcccggctacgaccccaaggacaagagctacaacaacatggccttcgagaccacccacttctag

SEQ ID NO: 100140 - DNA, 834 bp, synthetic construct
  misc_feature 1..834: note = Description of Artificial Sequence: Synthetic coding sequence
  source 1..834: mol_type = other DNA
atggtggtgatgatcgtgggcttcctgaccgtgctgatccagggcagcacccacgccggcggcttccacaacgtgctggagcagagcaccaacggcagcagactgcacatcttcgacttcgacgtggaccccctgagaagacacaccttctggaccatcaccgtgggcggcaccttcacctggctgggcatctacggcgtgaaccagagcaccatccagagatgcatcagctgcaagaccgagaagcacgccaagctggccctgtacttcaacctgctgggcctgtggatcatcctggtgtgcgccgtgttcagcggcctgatcatgtacagccacttcaaggactgcgacccctggaccagcggcatcatcagcgcccccgaccagctgatgccctacttcgtgatggagatcttcgccaccatgcccggcctgcccggcctgttcgtggcctgcgccttcagcggcaccctgagcaccgtggccagcagcatcaacgccctggccaccgtgaccttcgaggacttcgtgaagagctgcttcccccacctgagcgacaagctgagcacctggatcagcaagggcctgtgcagaagcctgatctggagagacgtgtacctgtacggctgcggctgcatctgccacggcagatgctgcgccggcttcccccagcacagcagacacgtgtggagaaccaacgccggcctgatcctgcccggcaacagagtgcccttctgcgagctggagggctgcaccagaagaagcagctactggaaccacctggtgatcctgggcggccactggggcctgcacctgccctgcaccagcctgtag

SEQ ID NO: 100141 - DNA, 2019 bp, synthetic construct
  misc_feature 1..2019: note = Description of Artificial Sequence: Synthetic coding sequence
  source 1..2019: mol_type = other DNA
atggaggagcacaccgaggccggcagcgcccccgagatgggcgcccagaaggccctgatcgacaaccccgccgacatcctggtgatcgccgcctacttcctgctggtgatcggcgtgggcctgtggagcatgtgcagaaccaacagaggcaccgtgggcggctacttcctggccggcagaagcatggtgtggtggcccgtgggcgccagcctgttcgccagcaacatcggcagcggccacttcgtgggcctggccggcaccggcgccgccagcggcctggccgtggccggcttcgagtggaacgccctgttcgtggtgctgctgctgggctggctgttcgcccccgtgtacctgaccgccggcgtgatcaccatgccccagtacctgagaaagagattcggcggcagaagaatcagactgtacctgagcgtgctgagcctgttcctgtacatcttcaccaagatcagcgtggacatgttcagcggcgccgtgttcatccagcaggccctgggctggaacatctacgccagcgtgatcgccctgctgggcatcaccatgatctacaccgtgaccggcggcctggccgccctgatgtacaccgacaccgtgcagaccttcgtgatcctgggcggcgcctgcatcctgatgggctacgccttccacgaggtgggcggctacagcggcctgttcgacaagtacctgggcgccgccaccagcctgaccgtgagcgaggaccccgccgtgggcaacatcagcagcttctgctacagacccagacccgacagctaccacctgctgagacaccccgtgaccggcgacctgccctggcccgccctgctgctgggcctgaccatcgtgagcggctggtactggtgcagcgaccaggtgatcgtgcagagatgcctggccggcaagagcctgacccacatcaaggccggctgcatcctgtgcggctacctgaagctgacccccatgttcctgatggtgatgcccggcatgatcagcagaatcctgtaccccgacgaggtggcctgcgtggtgcccgaggtgtgcagaagagtgtgcggcaccgaggtgggctgcagcaacatcgcctaccccagactggtggtgaagctgatgcccaacggcctgagaggcctgatgctggccgtgatgctggccgccctgatgagcagcctggccagcatcttcaacagcagcagcaccctgttcaccatggacatctacaccagactgagacccagagccggcgacagagagctgctgctggtgggcagactgtgggtggtgttcatcgtggtggtgagcgtggcctggctgcccgtggtgcaggccgcccagggcggccagctgttcgactacatccaggccgtgagcagctacctggccccccccgtgagcgccgtgttcgtgctggccctgttcgtgcccagagtgaacgagcagggcgccttctggggcctgatcggcggcctgctgatgggcctggccagactgatccccgagttcagcttcggcagcggcagctgcgtgcagcccagcgcctgccccgccttcctgtgcggcgtgcactacctgtacttcgccatcgtgctgttcttctgcagcggcctgctgaccctgaccgtgagcctgtgcaccgcccccatccccagaaagcacctgcacagactggtgttcagcctgagacacagcaaggaggagagagaggacctggacgccgacgagcagcagggcagcagcctgcccgtgcagaacggctgccccgagagcgccatggagatgaacgagccccaggcccccgcccccagcctgttcagacagtgcctgctgtggttctgcggcatgagcagaggcggcgtgggcagccccccccccctgacccaggaggaggccgccgccgccgccagaagactggaggacatcagcgaggaccccagctgggccagagtggtgaacctgaacgccctgctgatgatggccgtggccgtgttcctgtggggcttctacgcctag

SEQ ID NO: 100142 - DNA, 1377 bp, synthetic construct
  misc_feature 1..1377: note = Description of Artificial Sequence: Synthetic coding sequence
  source 1..1377: mol_type = other DNA
atggaggagcacaccgaggccggcagcgcccccgagatgggcgcccagaaggccctgatcgacaaccccgccgacatcctggtgatcgccgcctacttcctgctggtgatcggcgtgggcctgtggagcatgtgcagaaccaacagaggcaccgtgggcggctacttcctggccggcagaagcatggtgtggtggcccgtgggcgccagcctgttcgccagcaacatcggcagcggccacttcgtgggcctggccggcaccggcgccgccagcggcctggccgtggccggcttcgagtggaacgccctgttcgtggtgctgctgctgggctggctgttcgcccccgtgtacctgaccgccggcgtgatcaccatgccccagtacctgagaaagagattcggcggcagaagaatcagactgtacctgagcgtgctgagcctgttcctgtacatcttcaccaagatcagcgtggacatgttcagcggcgccgtgttcatccagcaggccctgggctggaacatctacgccagcgtgatcgccctgctgggcatcaccatgatctacaccgtgaccggcggcctggccgccctgatgtacaccgacaccgtgcagaccttcgtgatcctgggcggcgcctgcatcctgatgggctacgccttccacgaggtgggcggctacagcggcctgttcgacaagtacctgggcgccgccaccagcctgaccgtgagcgaggaccccgccgtgggcaacatcagcagcttctgctacagacccagacccgacagctaccacctgctgagacaccccgtgaccggcgacctgccctggcccgccctgctgctgggcctgaccatcgtgagcggctggtactggtgcagcgaccaggtgatcgtgcagagatgcctggccggcaagagcctgacccacatcaaggccggctgcatcctgtgcggctacctgaagctgacccccatgttcctgatggtgatgcccggcatgatcagcagaatcctgtaccccgacgaggtggcctgcgtggtgcccgaggtgtgcagaagagtgtgcggcaccgaggtgggctgcagcaacatcgcctaccccagactggtggtgaagctgatgcccaacggcagactgctgggcacccacagaggccccgccgacggccccggcacccccgacagcagagtgctgctgagactgggccagctgtgcgccgccctgggcgtgcccagcttccccctgagaagagccctgcccctgctgagacactgcgccgtgctgctgctgtggcccccccacccccacggcctgcccgtgcacagagcccacccccagaaggccccccccccccccggcctgcagagccccgcctag

SEQ ID NO: 100143 - DNA, 2157 bp, synthetic construct
  misc_feature 1..2157: note = Description of Artificial Sequence: Synthetic coding sequence
  source 1..2157: mol_type = other DNA
atgagagccgtgctggacaccgccgacatcgccatcgtggccctgtacttcatcctggtgatgtgcatcggcttcttcgccatgtggaagagcaacagaagcaccgtgagcggctacttcctggccggcagaagcatgacctgggtgaccatcggcgccagcctgttcgtgagcaacatcggcagcgagcacttcatcggcctggccggcagcggcgccgccagcggcttcgccgtgggcgcctgggagttcaacgccctgctgctgctgcagctgctgggctgggtgttcatccccatctacatcagaagcggcgtgtacaccatgcccgagtacctgagcaagagattcggcggccacagaatccaggtgtacttcgccgccctgagcctgatcctgtacatcttcaccaagctgagcgtggacctgtacagcggcgccctgttcatccaggagagcctgggctggaacctgtacgtgagcgtgatcctgctgatcggcatgaccgccctgctgaccgtgaccggcggcctggtggccgtgatctacaccgacaccctgcaggccctgctgatgatcatcggcgccctgaccctgatgatcatcagcatcatggagatcggcggcttcgaggaggtgaagagaagatacatgctggccagccccgacgtgaccagcatcctgctgacctacaacctgagcaacaccaacagctgcaacgtgagccccaagaaggaggccctgaagatgctgagaaaccccaccgacgaggacgtgccctggcccggcttcatcctgggccagacccccgccagcgtgtggtactggtgcgccgaccaggtgatcgtgcagagagtgctggccgccaagaacatcgcccacgccaagggcagcaccctgatggccggcttcctgaagctgctgcccatgttcatcatcgtggtgcccggcatgatcagcagaatcctgttcaccgacgacatcgcctgcatcaaccccgagcactgcatgctggtgtgcggcagcagagccggctgcagcaacatcgcctaccccagactggtgatgaagctggtgcccgtgggcctgagaggcctgatgatggccgtgatgatcgccgccctgatgagcgacctggacagcatcttcaacagcgccagcaccatcttcaccctggacgtgtacaagctgatcagaaagagcgccagcagcagagagctgatgatcgtgggcagaatcttcgtggccttcatggtggtgatcagcatcgcctgggtgcccatcatcgtggagatgcagggcggccagatgtacctgtacatccaggaggtggccgactacctgaccccccccgtggccgccctgttcctgctggccatcttctggaagagatgcaacgagcagggcgccttctacggcggcatggccggcttcgtgctgggcgccgtgagactgatcctggccttcgcctacagagcccccgagtgcgaccagcccgacaacagacccggcttcatcaaggacatccactacatgtacgtggccaccggcctgttctgggtgaccggcctgatcaccgtgatcgtgagcctgctgacccccccccccaccaaggagcagatcagaaccaccaccttctggagcaagaagaacctggtggtgaaggagaactgcagccccaaggaggagccctaccagatgcaggagaagagcatcctgagatgcagcgagaacaacgagaccatcaaccacatcatccccaacggcaagagcgaggacagcatcaagggcctgcagcccgaggacgtgaacctgctggtgacctgcagagaggagggcaaccccgtggccagcctgggccacagcgaggccgagacccccgtggacgcctacagcaacggccaggccgccctgatgggcgagaaggagagaaagaaggagaccgacgacggcggcagatactggaagttcatcgactggttctgcggcttcaagagcaagagcctgagcaagagaagcctgagagacctgatggaggaggaggccgtgtgcctgcagatgctggaggagaccagacaggtgaaggtgatcctgaacatcggcctgttcgccgtgtgcagcctgggcatcttcatgttcgtgtacttcagcctgtag

SEQ ID NO: 100144 - DNA, 504 bp, synthetic construct
  misc_feature 1..504: note = Description of Artificial Sequence: Synthetic coding sequence
  source 1..504: mol_type = other DNA
atggaggccggcggcttcctggacagcctgatctacggcgcctgcgtggtgttcaccctgggcatgttcagcgccggcctgagcgacctgagacacatgagaatgaccagaagcgtggacaacgtgcagttcctgcccttcctgaccaccgaggtgaacaacctgggctggctgagctacggcgccctgaagggcgacggcatcctgatcgtggtgaacaccgtgggcgccgccctgcagaccctgtacatcctggcctacctgcactactgccccagaaaggccaaggtgatccagaccaagagcacccagtgcctgagctaccccctgaccatcgccaccctgctgaccagcgccagctggtgcctgtacggcttcagactgagagacccctacatcatggtgagcaacttccccggcatcgtgaccagcttcatcagattctggctgttctggaagtacccccaggagcaggacagaaactactggctgctgcagacctag

SEQ ID NO: 100145 - DNA, 501 bp, synthetic construct
  misc_feature 1..501: note = Description of Artificial Sequence: Synthetic coding sequence
  source 1..501: mol_type = other DNA
atgagaggcctgcacccctggcacgtgctgagaagacccctgggcccccaggcccacgccaacgaccccgagtgcggccagagacccgtgcccgccctgagccaccacggcagccagagagtggtgctgctgcagaccgccaccctgctgggcgtgctgctgctgggctacggctacttctggctgctggtgcccaaccccgaggccagactgcagcagctgggcctgttctgcagcgtgttcaccatcagcatgtacctgagccccctggccgacctggccaaggtgatccagaccaagagcacccagtgcctgagctaccccctgaccatcgccaccctgctgaccagcgccagctggtgcctgtacggcttcagactgagagacccctacatcatggtgagcaacttccccggcatcgtgaccagcttcatcagattctggctgttctggaagtacccccaggagcaggacagaaactactggctgctgcagacctag

SEQ ID NO: 100146 - DNA, 666 bp, synthetic construct
  misc_feature 1..666: note = Description of Artificial Sequence: Synthetic coding sequence
  source 1..666: mol_type = other DNA
atggaggccggcggcttcctggacagcctgatctacggcgcctgcgtggtgttcaccctgggcatgttcagcgccggcctgagcgacctgagacacatgagaatgaccagaagcgtggacaacgtgcagttcctgcccttcctgaccaccgaggtgaacaacctgggctggctgagctacggcgccctgaagggcgacggcatcctgatcgtggtgaacaccgtgggcgccgccctgcagaccctgtacatcctggcctacctgcactactgccccagaaagagagtggtgctgctgcagaccgccaccctgctgggcgtgctgctgctgggctacggctacttctggctgctggtgcccaaccccgaggccagactgcagcagctgggcctgttctgcagcgtgttcaccatcagcatgtacctgagccccctggccgacctggccaaggtgatccagaccaagagcacccagtgcctgagctaccccctgaccatcgccaccctgctgaccagcgccagctggtgcctgtacggcttcagactgagagacccctacatcatggtgagcaacttccccggcatcgtgaccagcttcatcagattctggctgttctggaagtacccccaggagcaggacagaaactactggctgctgcagacctag

SEQ ID NO: 100147 - DNA, 471 bp, synthetic construct
  misc_feature 1..471: note = Description of Artificial Sequence: Synthetic coding sequence
  source 1..471: mol_type = other DNA
atggaggagctgggcccccaggcccacgccaacgaccccgagtgcggccagagacccgtgcccgccctgagccaccacggcagccagagagtggtgctgctgcagaccgccaccctgctgggcgtgctgctgctgggctacggctacttctggctgctggtgcccaaccccgaggccagactgcagcagctgggcctgttctgcagcgtgttcaccatcagcatgtacctgagccccctggccgacctggccaaggtgatccagaccaagagcacccagtgcctgagctaccccctgaccatcgccaccctgctgaccagcgccagctggtgcctgtacggcttcagactgagagacccctacatcatggtgagcaacttccccggcatcgtgaccagcttcatcagattctggctgttctggaagtacccccaggagcaggacagaaactactggctgctgcagacctag

SEQ ID NO: 100148 - DNA, 1929 bp, synthetic construct
  misc_feature 1..1929: note = Description of Artificial Sequence: Synthetic coding sequence
  source 1..1929: mol_type = other DNA
atggacaagctgaagtgccccagcttcttcaagtgcagagagaaggagaaggtgagcgccagcagcgagaacttccacgtgggcgagaacgacgagaaccaggacagaggcaactggagcaagaagagcgactacctgctgagcatgatcggctacgccgtgggcctgggcaacgtgtggagattcccctacctgacctacagcaacggcggcggcgccttcctgatcccctacgccatcatgctggccctggccggcctgcccctgttcttcctggagtgcagcctgggccagttcgccagcctgggccccgtgagcgtgtggagaatcctgcccctgttccagggcgtgggcatcaccatggtgctgatcagcatcttcgtgaccatctactacaacgtgatcatcgcctacagcctgtactacatgttcgccagcttccagagcgagctgccctggaagaactgcagcagctggagcgacaagaactgcagcagaagccccatcgtgacccactgcaacgtgagcaccgtgaacaagggcatccaggagatcatccagatgaacaagagctgggtggacatcaacaacttcacctgcatcaacggcagcgagatctaccagcccggccagctgcccagcgagcagtactggaacaaggtggccctgcagagaagcagcggcatgaacgagaccggcgtgatcgtgtggtacctggccctgtgcctgctgctggcctggctgatcgtgggcgccgccctgttcaagggcatcaagagcagcggcaaggtggtgtacttcaccgccctgttcccctacgtggtgctgctgatcctgctggtgagaggcgccaccctggagggcgccagcaagggcatcagctactacatcggcgcccagagcaacttcaccaagctgaaggaggccgaggtgtggaaggacgccgccacccagatcttctacagcctgagcgtggcctggggcggcctggtggccctgagcagctacaacaagttcaagaacaactgcttcagcgacgccatcgtggtgtgcctgaccaactgcctgaccagcgtgttcgccggcttcgccatcttcagcatcctgggccacatggcccacatcagcggcaaggaggtgagccaggtggtgaagagcggcttcgacctggccttcatcgcctaccccgaggccctggcccagctgcccggcggccccttctggagcatcctgttcttcttcatgctgctgaccctgggcctggacagccagttcgccagcatcgagaccatcaccaccaccatccaggacctgttccccaaggtgatgaagaagatgagagtgcccatcaccctgggctgctgcctggtgctgttcctgctgggcctggtgtgcgtgacccaggccggcatctactgggtgcacctgatcgaccacttctgcgccggctggggcatcctgatcgccgccatcctggagctggtgggcatcatctggatctacggcggcaacagattcatcgaggacaccgagatgatgatcggcgccaagagatggatcttctggctgtggtggagagcctgctggttcgtgatcacccccatcctgctgatcgccatcttcatctggagcctggtgcagttccacagacccaactacggcgccatcccctaccccgactggggcgtggccctgggctggtgcatgatcgtgttctgcatcatctggatccccatcatggccatcatcaagatcatccaggccaagggcaacatcttccagagactgatcagctgctgcagacccgccagcaactggggcccctacctggagcagcacagaggcgagagatacaaggacatggtggaccccaagaaggaggccgaccacgagatccccaccgtgagcggcagcagaaagcccgagtag

SEQ ID NO: 100149 - DNA, 1539 bp, synthetic construct
  misc_feature 1..1539: note = Description of Artificial Sequence: Synthetic coding sequence
  source 1..1539: mol_type = other DNA
atgggcgtgcagtggtggagccacacccagggcgaggtggccgtgggcctgggcctgggcgacagctacctgaccccctgcccctgccccggcgtgggctacgccgtgatcctgatcgccctgtacgtgggcttctactacaacgtgatcatcgcctggagcctgtactacctgttcagcagcttcaccctgaacctgccctggaccgactgcggccacacctggaacagccccaactgcaccgaccccaagctgctgaacggcagcgtgctgggcaaccacaccaagtacagcaagtacaagttcacccccgccgccgagttctacgagagaggcgtgctgcacctgcacgagagcagcggcatccacgacatcggcctgccccagtggcagctgctgctgtgcctgatggtggtggtgatcgtgctgtacttcagcctgtggaagggcgtgaagaccagcggcaaggtggtgtggatcaccgccaccctgccctacttcgtgctgttcgtgctgctggtgcacggcgtgaccctgcccggcgccagcaacggcatcaacgcctacctgcacatcgacttctacagactgaaggaggccaccgtgtggatcgacgccgccacccagatcttcttcagcctgggcgccggcttcggcgtgctgatcgccttcgccagctacaacaagttcgacaacaactgctacagagacgccctgctgaccagcagcatcaactgcatcaccagcttcgtgagcggcttcgccatcttcagcatcctgggctacatggcccacgagcacaaggtgaacatcgaggacgtggccaccgagggcgccggcctggtgttcatcctgtaccccgaggccatcagcaccctgagcggcagcaccttctgggccgtggtgttcttcgtgatgctgctggccctgggcctggacagcagcatgggcggcatggaggccgtgatcaccggcctggccgacgacttccaggtgctgaagagacacagaaagctgttcaccttcggcgtgaccttcagcaccttcctgctggccctgttctgcatcaccaagggcggcatctacgtgctgaccctgctggacaccttcgccgccggcaccagcatcctgttcgccgtgctgatggaggccatcggcgtgagctggttctacggcgtggacagattcagcaacgacatccagcagatgatgggcttcagacccggcctgtactggagactgtgctggaagttcgtgagccccgccttcctgctgttcgtggtggtggtgagcatcatcaacttcaagcccctgacctacgacgactacatcttccccccctgggccaactgggtgggctggggcatcgccctgagcagcatggtgctggtgcccatctacgtgatctacaagttcctgagcacccagggcagcctgtgggagagactggcctacggcatcacccccgagaacgagcaccacctggtggcccagagagacatcagacagttccagctgcagcactggctggccatctag

SEQ ID NO: 100150 - DNA, 1845 bp, synthetic construct
  misc_feature 1..1845: note = Description of Artificial Sequence: Synthetic coding sequence
  source 1..1845: mol_type = other DNA
atggacggcaaggtggccgtgcaggagtgcggcccccccgccgtgagctgggtgcccgaggagggcgagaagctggaccaggaggacgaggaccaggtgaaggacagaggccagtggaccaacaagatggagttcgtgctgagcgtggccggcgagatcatcggcctgggcaacgtgtggagattcccctacctgtgctacaagaacggcggcggcgccttcttcatcccctacttcatcttcttcttcgtgtgcggcatccccgtgttcttcctggaggtggccctgggccagtacaccagccagggcagcgtgaccgcctggagaaagatctgccccctgttccagggcatcggcctggccagcgtggtgatcgagagctacctgaacgtgtactacatcatcatcctggcctgggccctgttctacctgttcagcagcttcaccagcgagctgccctggaccacctgcaacaacttctggaacaccgagcactgcaccgacttcctgaaccacagcggcgccggcaccgtgacccccttcgagaacttcaccagccccgtgatggagttctgggagagaagagtgctgggcatcaccagcggcatccacgacctgggcagcctgagatgggagctggccctgtgcctgctgctggcctgggtgatctgctacttctgcatctggaagggcgtgaagagcaccggcaaggtggtgtacttcaccgccaccttcccctacctgatgctggtgatcctgctgatcagaggcgtgaccctgcccggcgcctaccagggcatcatctactacctgaagcccgacctgttcagactgaaggacccccaggtgtggatggacgccggcacccagatcttcttcagcttcgccatctgccagggctgcctgaccgccctgggcagctacaacaagtaccacaacaactgctacaaggactgcatcgccctgtgcttcctgaacagcgccaccagcttcgtggccggcttcgtggtgttcagcatcctgggcttcatgagccaggagcagggcgtgcccatcagcgaggtggccgagagcggccccggcctggccttcatcgccttccccaaggccgtgaccatgatgcccctgagccagctgtggagctgcctgttcttcatcatgctgatcttcctgggcctggacagccagttcgtgtgcgtggagtgcctggtgaccgccagcatcgacatgttccccagacagctgagaaagagcggcagaagagagctgctgatcctgaccatcgccgtgatgtgctacctgatcggcctgttcctggtgaccgagggcggcatgtacatcttccagctgttcgactactacgccagcagcggcatctgcctgctgttcctgagcctgttcgaggtggtgtgcatcagctgggtgtacggcgccgacagattctacgacaacatcgaggacatgatcggctacagaccctggcccctggtgaagatcagctggctgttcctgacccccggcctgtgcctggccaccttcctgttcagcctgagcaagtacacccccctgaagtacaacaacgtgtacgtgtaccccccctggggctacagcatcggctggttcctggccctgagcagcatggtgtgcgtgcccctgttcgtggtgatcaccctgctgaagaccagaggccccttcagaaagagactgagacagctgatcacccccgacagcagcctgccccagcccaagcagcacccctgcctggacggcagcgccggcagaaacttcggccccagccccaccagagagggcctgatcgccggcgagaaggagacccacctgtag

SEQ ID NO: 100151 - DNA, 1845 bp, synthetic construct; identical to SEQ ID NO: 100150
  misc_feature 1..1845: note = Description of Artificial Sequence: Synthetic coding sequence
  source 1..1845: mol_type = other DNA

SEQ ID NO: 100152 - DNA, 1845 bp, synthetic construct; identical to SEQ ID NO: 100150
  misc_feature 1..1845: note = Description of Artificial Sequence: Synthetic coding sequence
  source 1..1845: mol_type = other DNA

SEQ ID NO: 100153 - DNA, 1845 bp, synthetic construct; identical to SEQ ID NO: 100150
  misc_feature 1..1845: note = Description of Artificial Sequence: Synthetic coding sequence
  source 1..1845: mol_type = other DNA

SEQ ID NO: 100154 - DNA, 1845 bp, synthetic construct; identical to SEQ ID NO: 100150
  misc_feature 1..1845: note = Description of Artificial Sequence: Synthetic coding sequence
  source 1..1845: mol_type = other DNA

SEQ ID NO: 100155 - DNA, 441 bp, synthetic construct
  misc_feature 1..441: note = Description of Artificial Sequence: Synthetic coding sequence
  source 1..441: mol_type = other DNA
atggacggcaaggtggccgtgcaggagtgcggcccccccgccgtgagctgggtgcccgaggagggcgagaagctggaccaggaggacgaggaccaggtgaaggacagaggccagtggaccaacaagatggagttcgtgctgagcgtggccggcgagatcatcggcctgggcaacgtgtggagattcccctacctgtgctacaagaacggcggcggcgccttcttcatcccctacttcatcttcttcttcgtgtgcggcatccccgtgttcttcctggaggtggccctgggccagtacaccagccagggcagcgtgaccgcctggagaaagatctgccccctgttccagggcatcggcctggccagcgtggtgatcgagagctacctgaacgtgtactacatcatcatcctggcctgggccctgttctacctgttcagctag

SEQ ID NO: 100156 - DNA, 1908 bp, synthetic construct
  misc_feature 1..1908: note = Description of Artificial Sequence: Synthetic coding sequence
  source 1..1908: mol_type = other DNA
atggccaagaagagcgccgagaacggcatctacagcgtgagcggcgacgagaagaagggccccctgatcgcccccggccccgacggcgcccccgccaagggcgacggccccgtgggcctgggcacccccggcggcagactggccgtgccccccagagagacctggaccagacagatggacttcatcatgagctgcgtgggcttcgccgtgggcctgggcaacgtgtggagattcccctacctgtgctacaagaacggcggcggcgtgttcctgatcccctacgtgctgatcgccctggtgggcggcatccccatcttcttcctggagatcagcctgggccagttcatgaaggccggcagcatcaacgtgtggaacatctgccccctgttcaagggcctgggctacgccagcatggtgatcgtgttctactgcaacacctactacatcatggtgctggcctggggcttctactacctggtgaagagcttcaccaccaccctgccctgggccacctgcggccacacctggaacacccccgactgcgtggagatcttcagacacgaggactgcgccaacgccagcctggccaacctgacctgcgaccagctggccgacagaagaagccccgtgatcgagttctgggagaacaaggtgctgagactgagcggcggcctggaggtgcccggcgccctgaactgggaggtgaccctgtgcctgctggcctgctgggtgctggtgtacttctgcgtgtggaagggcgtgaagagcaccggcaagatcgtgtacttcaccgccaccttcccctacgtggtgctggtggtgctgctggtgagaggcgtgctgctgcccggcgccctggacggcatcatctactacctgaagcccgactggagcaagctgggcagcccccaggtgtggatcgacgccggcacccagatcttcttcagctacgccatcggcctgggcgccctgaccgccctgggcagctacaacagattcaacaacaactgctacaaggacgccatcatcctggccctgatcaacagcggcaccagcttcttcgccggcttcgtggtgttcagcatcctgggcttcatggccgccgagcagggcgtgcacatcagcaaggtggccgagagcggccccggcctggccttcatcgcctaccccagagccgtgaccctgatgcccgtggcccccctgtgggccgccctgttcttcttcatgctgctgctgctgggcctggacagccagttcgtgggcgtggagggcttcatcaccggcctgctggacctgctgcccgccagctactacttcagattccagagagagatcagcgtggccctgtgctgcgccctgtgcttcgtgatcgacctgagcatggtgaccgacggcggcatgtacgtgttccagctgttcgactactacagcgccagcggcaccaccctgctgtggcaggccttctgggagtgcgtggtggtggcctgggtgtacggcgccgacagattcatggacgacatcgcctgcatgatcggctacagaccctgcccctggatgaagtggtgctggagcttcttcacccccctggtgtgcatgggcatcttcatcttcaacgtggtgtactacgagcccctggtgtacaacaacacctacgtgtacccctggtggggcgaggccatgggctgggccttcgccctgagcagcatgctgtgcgtgcccctgcacctgctgggctgcctgctgagagccaagggcaccatggccgagagatggcagcacctgacccagcccatctggggcctgcaccacctggagtacagagcccaggacgccgacgtgagaggcctgaccaccctgacccccgtgagcgagagcagcaaggtggtggtggtggagagcgtgatgtag

SEQ ID NO: 100157 - DNA, 2190 bp, synthetic construct
  misc_feature 1..2190: note = Description of Artificial Sequence: Synthetic coding sequence
  source 1..2190: mol_type = other DNA
atgctgcccaccctgcagatccagggccccgccgccttcgcccccggcgacagaggccccggcagacactgccccttccccgtgcccatcacccccaccggcgccctgctgcccgtgagcgacagctgcgacagcctggtggacctggtgtggcccagcgtgacctacctggccctgggcacccagagcagagtgtggccccaccccctgggcgcccccggccaggccggcgagagccccgagcagagaagacagtgcctggagctgtgggacatggccagcagcctgggcgacaaggtgcccagagccgcctgcggcaagagaggccagaccgtgtggcagctgcacctggcctgcctgtgcctggcccagttccacagcccccccgcccagcccccccccctgagcagaagaggcggcggccccgaccccgaccccatcagcagaagcctgcccggcccccccacccccgccctgcccacccacagctacagcagccacagccccagagcccccagactgctgagccccctgagaagagcccccagaggcagccccgccccccacagacacgccagcctgcagaccaacgaggcccccagagagctgccccactgcacctggcccggcctgcccggcagaagcctggcccccagcttcctgtggagagagccctggctgggcggccagtggggccccctgaacatccccgccagaaagggcgacagaagaagatgggagtggggctgcgagggcggcggcgccaccgccagcgccgagcagcccggcccccagatcgtgtacttcaccgccaccttcccctacgtggtgctggtggtgctgctggtgagaggcgtgctgctgcccggcgccctggacggcatcatctactacctgaagcccgactggagcaagctgggcagcccccaggtgtggatcgacgccggcacccagatcttcttcagctacgccatcggcctgggcgccctgaccgccctgggcagctacaacagattcaacaacaactgctacaaggacgccatcatcctggccctgatcaacagcggcaccagcttcttcgccggcttcgtggtgttcagcatcctgggcttcatggccgccgagcagggcgtgcacatcagcaaggtggccgagagcggccccggcctggccttcatcgcctaccccagagccgtgaccctgatgcccgtggcccccctgtgggccgccctgttcttcttcatgctgctgctgctgggcctggacagccaggtgtgcatgggcctgtgggacagagagcccggcggcggcagaagagagggctgcagacagggcaagggctggagaagatgcggcgccagacccgagctgccctggccccagttcgtgggcgtggagggcttcatcaccggcctgctggacctgctgcccgccagctactacttcagattccagagagagatcagcgtggccctgtgctgcgccctgtgcttcgtgatcgacctgagcatggtgaccgacgtgagcggcgtgggcggcctgcccgtgaccagcggcggcagactgcccagcagcctgaccggcctgtgcccccagggcggcatgtacgtgttccagctgttcgactactacagcgccagcggcaccaccctgctgtggcaggccttctgggagtgcgtggtggtggcctgggtgtacggcagaagctggctgagagccggcctgggcgacggcggcggcgagggcagaagccccgcctggcccgccagccccagaggcgccgacagattcatggacgacatcgcctgcatgatcggctacagaccctgcccctggatgaagtggtgctggagcttcttcacccccctggtgtgcatgggcatcttcatcttcaacgtggtgtactacgagcccctggtgtacaacaacacctacgtgtacccctggtggggcgaggccatgggctgggccttcgccctgagcagcatgctgtgcgtgcccctgcacctgctgggctgcctgctgagagccaagggcaccatggccgagagatggcagcacctgacccagcccatctggggcctgcaccacctggagtacagagcccaggacgccgacgtgagaggcctgaccaccctgacccccgtgagcgagagcagcaaggtggtggtggtggagagcgtgatgtag

SEQ ID NO: 100158 - DNA, 471 bp, synthetic construct
  misc_feature 1..471: note = Description of Artificial Sequence: Synthetic coding sequence
  source 1..471: mol_type = other DNA
ctgctgcacagccccacctggagctggagctgctgctggtgcgtggagtgctgctgcctggccccctggatggccagcttcaccatcagcagcctgaccggccagagctggggccccctgagccccggccagctgcagcccctgcagcagcagctgctgcagtgggaccagctgctgtgctggctgagaggcctgctgcaccccggcctgcacggctgcagagccggcagagcccacctgcagggcggcagagtgagagagatcagcgtggccctgtgctgcgccctgtgcttcgtgatcgacctgagcatggtgaccgacggcggcatgtacgtgttccagctgttcgactactacagcgccagcggcaccaccctgctgtggcaggccttctgggagtgcgtggtggtggcctgggtgtacggcgccgacagattcatggacgacatcgcctgcatgatcggctactag

SEQ ID NO: 100159 - DNA, 339 bp, synthetic construct
  misc_feature 1..339: note = Description of Artificial Sequence: Synthetic coding sequence
  source 1..339: mol_type = other DNA
tgattcagacacgaggactgcgccaacgccagcctggccaacctgacctgcgaccagctggccgacagaagaagccccgtgatcgagttctgggagaacaaggtgctgagactgagcggcggcctggaggtgcccggcgccctgaactgggaggtgaccctgtgcctgctggcctgctgggtgctggtgtacttctgcgtgtggaagggcgtgaagagcaccggcaaggtgcccctggaggcctgcagcggcgagggcggcagcgccctgggcgccggctgcctgtgccaggcccacctgtggcagagagaggtgaccagacagagcctggccctgtag

SEQ ID NO: 100160 - DNA, 1563 bp, synthetic construct
  misc_feature 1..1563: note = Description of Artificial Sequence: Synthetic coding sequence
  source 1..1563: mol_type = other DNA
atgaaggccggcagcatcaacgtgtggaacatctgccccctgttcaagggcctgggctacgccagcatggtgatcgtgttctactgcaacacctactacatcatggtgctggcctggggcttctactacctggtgaagagcttcaccaccaccctgccctgggccacctgcggccacacctggaacacccccgactgcgtggagatcttcagacacgaggactgcgccaacgccagcctggccaacctgacctgcgaccagctggccgacagaagaagccccgtgatcgagttctgggagaacaaggtgctgagactgagcggcggcctggaggtgcccggcgccctgaactgggaggtgaccctgtgcctgctggcctgctgggtgctggtgtacttctgcgtgtggaagggcgtgaagagcaccggcaagatcgtgtacttcaccgccaccttcccctacgtggtgctggtggtgctgctggtgagaggcgtgctgctgcccggcgccctggacggcatcatctactacctgaagcccgactggagcaagctgggcagcccccaggtgtggatcgacgccggcacccagatcttcttcagctacgccatcggcctgggcgccctgaccgccctgggcagctacaacagattcaacaacaactgctacaaggacgccatcatcctggccctgatcaacagcggcaccagcttcttcgccggcttcgtggtgttcagcatcctgggcttcatggccgccgagcagggcgtgcacatcagcaaggtggccgagagcggccccggcctggccttcatcgcctaccccagagccgtgaccctgatgcccgtggcccccctgtgggccgccctgttcttcttcatgctgctgctgctgggcctggacagccagttcgtgggcgtggagggcttcatcaccggcctgctggacctgctgcccgccagctactacttcagattccagagagagatcagcgtggccctgtgctgcgccctgtgcttcgtgatcgacctgagcatggtgaccgacggcggcatgtacgtgttccagctgttcgactactacagcgccagcggcaccaccctgctgtggcaggccttctgggagtgcgtggtggtggcctgggtgtacggcgccgacagattcatggacgacatcgcctgcatgatcggctacagaccctgcccctggatgaagtggtgctggagcttcttcacccccctggtgtgcatgggcatcttcatcttcaacgtggtgtactacgagcccctggtgtacaacaacacctacgtgtacccctggtggggcgaggccatgggctgggccttcgccctgagcagcatgctgtgcgtgcccctgcacctgctgggctgcctgctgagagccaagggcaccatggccgagagatggcagcacctgacccagcccatctggggcctgcaccacctggagtacagagcccaggacgccgacgtgagaggcctgaccaccctgacccccgtgagcgagagcagcaaggtggtggtggtggagagcgtgatgtag

SEQ ID NO: 100161 - DNA, 525 bp, synthetic construct
  misc_feature 1..525: note = Description of Artificial Sequence: Synthetic coding sequence
  source 1..525: mol_type = other DNA
tgaatcgacgccggcacccagatcttcttcagctacgccatcggcctgggcgccctgaccgccctgggcagctacaacagattcaacaacaactgctacaacggcaccagcttcttcgccggcttcgtggtgttcagcatcctgggcttcatggccgccgagcagggcgtgcacatcagcaaggtggccgagagcggccccggcctggccttcatcgcctaccccagagccgtgaccctgatgcccgtggcccccctgtgggccgccctgttcttcttcatgctgctgctgctgggcctggacagccagttcgtgggcgtggagggcttcatcaccggcctgctggacctgctgcccgccagctactacttcagattccagagagagatcagcgtggccctgtgctgcgccctgtgcttcgtgatcgacctgagcatggtgaccgacggcggcatgtacgtgttccagctgttcgactactacagcgccagcggcaccaccctgctgtggcaggccttctggtag

SEQ ID NO: 100162 - DNA, 270 bp, synthetic construct
  misc_feature 1..270: note = Description of Artificial Sequence: Synthetic coding sequence
  source 1..270: mol_type = other DNA
ggcagacaccaccccggcagccaccagcagtgggaccagctgctgtgctggctgagaggcctgctgcaccccggcctgcacggctgcagagccggcagagcccacctgcagggcggcagagtgagagccggccccggcctgcacagactgcccgccggctgccacgccgacgccagcggccccaccctgggctgccccgtgctgctgcacgccgtggccgcctggagcagacagcccggcgtggagggcttcatcaccggcctgctgtag

SEQ ID NO: 100163 - DNA, 1863 bp, synthetic construct
  misc_feature 1..1863: note = Description of Artificial Sequence: Synthetic coding sequence
  source 1..1863: mol_type = other DNA
atgagcaagagcaagtgcagcgtgggcctgatgagcagcgtggtggcccccgccaaggagcccaacgccgtgggccccaaggaggtggagctgatcctggtgaaggagcagaacggcgtgcagctgaccagcagcaccctgaccaaccccagacagagccccgtggaggcccaggacagagagacctggggcaagaagatcgacttcctgctgagcgtgatcggcttcgccgtggacctggccaacgtgtggagattcccctacctgtgctacaagaacggcggcggcgccttcctggtgccctacctgctgttcatggtgatcgccggcatgcccctgttctacatggagctggccctgggccagttcaacagagagggcgccgccggcgtgtggaagatctgccccatcctgaagggcgtgggcttcaccgtgatcctgatcagcctgtacgtgggcttcttctacaacgtgatcatcgcctgggccctgcactacctgttcagcagcttcaccaccgagctgccctggatccactgcaacaacagctggaacagccccaactgcagcgacgcccaccccggcgacagcagcggcgacagcagcggcctgaacgacaccttcggcaccacccccgccgccgagtacttcgagagaggcgtgctgcacctgcaccagagccacggcatcgacgacctgggcccccccagatggcagctgaccgcctgcctggtgctggtgatcgtgctgctgtacttcagcctgtggaagggcgtgaagaccagcggcaaggtggtgtggatcaccgccaccatgccctacgtggtgctgaccgccctgctgctgagaggcgtgaccctgcccggcgccatcgacggcatcagagcctacctgagcgtggacttctacagactgtgcgaggccagcgtgtggatcgacgccgccacccaggtgtgcttcagcctgggcgtgggcttcggcgtgctgatcgccttcagcagctacaacaagttcaccaacaactgctacagagacgccatcgtgaccaccagcatcaacagcctgaccagcttcagcagcggcttcgtggtgttcagcttcctgggctacatggcccagaagcacagcgtgcccatcggcgacgtggccaaggacggccccggcctgatcttcatcatctaccccgaggccatcgccaccctgcccctgagcagcgcctgggccgtggtgttcttcatcatgctgctgaccctgggcatcgacagcgccatgggcggcatggagagcgtgatcaccggcctgatcgacgagttccagctgctgcacagacacagagagctgttcaccctgttcatcgtgctggccaccttcctgctgagcctgttctgcgtgaccaacggcggcatctacgtgttcaccctgctggaccacttcgccgccggcaccagcatcctgttcggcgtgctgatcgaggccatcggcgtggcctggttctacggcgtgggccagttcagcgacgacatccagcagatgaccggccagagacccagcctgtactggagactgtgctggaagctggtgagcccctgcttcctgctgttcgtggtggtggtgagcatcgtgaccttcagacccccccactacggcgcctacatcttccccgactgggccaacgccctgggctgggtgatcgccaccagcagcatggccatggtgcccatctacgccgcctacaagttctgcagcctgcccggcagcttcagagagaagctggcctacgccatcgcccccgagaaggacagagagctggtggacagaggcgaggtgagacagttcaccctgagacactggctgaaggtgtag

SEQ ID NO: 100164 - DNA, 1863 bp, synthetic construct; identical to SEQ ID NO: 100163
  misc_feature 1..1863: note = Description of Artificial Sequence: Synthetic coding sequence
  source 1..1863: mol_type = other DNA

SEQ ID NO: 100165 - DNA, 1800 bp, synthetic construct
  misc_feature 1..1800: note = Description of Artificial Sequence: Synthetic coding sequence
  source 1..1800: mol_type = other DNA
atggccaccaacggcagcaaggtggccgacggccagatcagcaccgaggtgagcgaggcccccgtggccaacgacaagcccaagaccctggtggtgaaggtgcagaagaaggccgccgacctgcccgacagagacacctggaagggcagattcgacttcctgatgagctgcgtgggctacgccatcggcctgggcaacgtgtggagattcccctacctgtgcggcaagaacggcggcggcgccttcctgatcccctacttcctgaccctgatcttcgccggcgtgcccctgttcctgctggagtgcagcctgggccagtacaccagcatcggcggcctgggcgtgtggaagctggcccccatgttcaagggcgtgggcctggccgccgccgtgctgagcttctggctgaacatctactacatcgtgatcatcagctgggccatctactacctgtacaacagcttcaccaccaccctgccctggaagcagtgcgacaacccctggaacaccgacagatgcttcagcaactacagcatggtgaacaccaccaacatgaccagcgccgtggtggagttctgggagagaaacatgcaccagatgaccgacggcctggacaagcccggccagatcagatggcccctggccatcaccctggccatcgcctggatcctggtgtacttctgcatctggaagggcgtgggctggaccggcaaggtggtgtacttcagcgccacctacccctacatcatgctgatcatcctgttcttcagaggcgtgaccctgcccggcgccaaggagggcatcctgttctacatcacccccaacttcagaaagctgagcgacagcgaggtgtggctggacgccgccacccagatcttcttcagctacggcctgggcctgggcagcctgatcgccctgggcagctacaacagcttccacaacaacgtgtacagagacagcatcatcgtgtgctgcatcaacagctgcaccagcatgttcgccggcttcgtgatcttcagcatcgtgggcttcatggcccacgtgaccaagagaagcatcgccgacgtggccgccagcggccccggcctggccttcctggcctaccccgaggccgtgacccagctgcccatcagccccctgtgggccatcctgttcttcagcatgctgctgatgctgggcatcgacagccagttctgcaccgtggagggcttcatcaccgccctggtggacgagtaccccagactgctgagaaacagaagagagctgttcatcgccgccgtgtgcatcatcagctacctgatcggcctgagcaacatcacccagggcggcatctacgtgttcaagctgttcgactactacagcgccagcggcatgagcctgctgttcctggtgttcttcgagtgcgtgagcatcagctggttctacggcgtgaacagattctacgacaacatccaggagatggtgggcagcagaccctgcatctggtggaagctgtgctggagcttcttcacccccatcatcgtggccggcgtgttcatcttcagcgccgtgcagatgacccccctgaccatgggcaactacgtgttccccaagtggggccagggcgtgggctggctgatggccctgagcagcatggtgctgatccccggctacatggcctacatgttcctgaccctgaagggcagcctgaagcagagaatccaggtgatggtgcagcccagcgaggacatcgtgagacccgagaacggccccgagcagccccaggccggcagcagcaccagcaaggaggcctacatctag

SEQ ID NO: 100166 - DNA, 120 bp, synthetic construct
  misc_feature 1..120: note = Description of Artificial Sequence: Synthetic coding sequence
  source 1..120: mol_type = other DNA
atggccaccaacggcagcaaggtggccgacggccagatcagcaccgaggtgagcgaggcccccgtggccaacgacaagcccaagaccctggtggtgaaggtgcagaagaaggccgcctag

SEQ ID NO: 100167 - DNA, 1266 bp, synthetic construct
  misc_feature 1..1266: note = Description of Artificial Sequence: Synthetic coding sequence
  source 1..1266: mol_type = other DNA
atggtgaacaccaccaacatgaccagcgccgtggtggagttctgggagagaaacatgcaccagatgaccgacggcctggacaagcccggccagatcagatggcccctggccatcaccctggccatcgcctggatcctggtgtacttctgcatctggaagggcgtgggctggaccggcaaggtggtgtacttcagcgccacctacccctacatcatgctgatcatcctgttcttcagaggcgtgaccctgcccggcgccaaggagggcatcctgttctacatcacccccaacttcagaaagctgagcgacagcgaggtgtggctggacgccgccacccagatcttcttcagctacggcctgggcctgggcagcctgatcgccctgggcagctacaacagcttccacaacaacgtgtacagagacagcatcatcgtgtgctgcatcaacagctgcaccagcatgttcgccggcttcgtgatcttcagcatcgtgggcttcatggcccacgtgaccaagagaagcatcgccgacgtggccgccagcggccccggcctggccttcctggcctaccccgaggccgtgacccagctgcccatcagccccctgtgggccatcctgttcttcagcatgctgctgatgctgggcatcgacagccagttctgcaccgtggagggcttcatcaccgccctggtggacgagtaccccagactgctgagaaacagaagagagctgttcatcgccgccgtgtgcatcatcagctacctgatcggcctgagcaacatcacccagggcggcatctacgtgttcaagctgttcgactactacagcgccagcggcatgagcctgctgttcctggtgttcttcgagtgcgtgagcatcagctggttctacggcgtgaacagattctacgacaacatccaggagatggtgggcagcagaccctgcatctggtggaagctgtgctggagcttcttcacccccatcatcgtggccggcgtgttcatcttcagcgccgtgcagatgacccccctgaccatgggcaactacgtgttccccaagtggggccagggcgtgggctggctgatggccctgagcagcatggtgctgatccccggctacatggcctacatgttcctgaccctgaagggcagcctgaagcagagaatccaggtgatggtgcagcccagcgaggacatcgtgagacccgagaacggccccgagcagccccaggccggcagcagcaccagcaaggaggcctacatctag

SEQ ID NO: 100168 - DNA, 1899 bp, synthetic construct
  misc_feature 1..1899: note = Description of Artificial Sequence: Synthetic coding sequence
  source 1..1899: mol_type = other DNA
atgaccgccgagaaggccctgcccctgggcaacggcaaggccgccgaggaggccagagagagcgaggcccccggcggcggctgcagcagcggcggcgccgcccccgccagacaccccagagtgaagagagacaaggccgtgcacgagagaggccactggaacaacaaggtggagttcgtgctgagcgtggccggcgagatcatcggcctgggcaacgtgtggagattcccctacctgtgctacaagaacggcggcggcgccttcctgatcccctacgtggtgttcttcatctgctgcggcatccccgtgttcttcctggagaccgccctgggccagttcaccagcgagggcggcatcacctgctggagaaaggtgtgccccctgttcgagggcatcggctacgccacccaggtgatcgaggcccacctgaacgtgtactacatcatcatcctggcctgggccatcttctacctgagcaactgcttcaccaccgagctgccctgggccacctgcggccacgagtggaacaccgagaactgcgtggagttccagaagctgaacgtgagcaactacagccacgtgagcctgcagaacgccaccagccccgtgatggagttctgggagcacagagtgctggccatcagcgacggcatcgagcacatcggcaacctgagatgggagctggccctgtgcctgctggccgcctggaccatctgctacttctgcatctggaagggcaccaagagcaccggcaaggtggtgtacgtgaccgccaccttcccctacatcatgctgctgatcctgctgatcagaggcgtgaccctgcccggcgccagcgagggcatcaagttctacctgtaccccgacctgagcagactgagcgacccccaggtgtgggtggacgccggcacccagatcttcttcagctacgccatctgcctgggctgcctgaccgccctgggcagctacaacaactacaacaacaactgctacagagactgcatcatgctgtgctgcctgaacagcggcaccagcttcgtggccggcttcgccatcttcagcgtgctgggcttcatggcctacgagcagggcgtgcccatcgccgaggtggccgagagcggccccggcctggccttcatcgcctaccccaaggccgtgaccatgatgcccctgagccccctgtgggccaccctgttcttcatgatgctgatcttcctgggcctggacagccagttcgtgtgcgtggagagcctggtgaccgccgtggtggacatgtaccccaaggtgttcagaagaggctacagaagagagctgctgatcctggccctgagcgtgatcagctacttcctgggcctggtgatgctgaccgagggcggcatgtacatcttccagctgttcgacagctacgccgccagcggcatgtgcctgctgttcgtggccatcttcgagtgcatctgcatcggctgggtgtacggcagcaacagattctacgacaacatcgaggacatgatcggctacagaccccccagcctgatcaagtggtgctggatgatcatgacccccggcatctgcgccggcatcttcatcttcttcctgatcaagtacaagcccctgaagtacaacaacatctacacctaccccgcctggggctacggcatcggctggctgatggccctgagcagcatgctgtgcatccccctgtggatctgcatcaccgtgtggaagaccgagggcaccctgcccgagaagctgcagaagctgaccacccccagcaccgacctgaagatgagaggcaagctgggcgtgagccccagaatggtgaccgtgaacgactgcgacgccaagctgaagagcgacggcaccatcgccgccatcaccgagaaggagacccacttctag

SEQ ID NO: 100169 - DNA, 627 bp, synthetic construct
  misc_feature 1..627: note = Description of Artificial Sequence: Synthetic coding sequence
  source 1..627: mol_type = other DNA
atgaccgccgagaaggccctgcccctgggcaacggcaaggccgccgaggaggccagagagagcgaggcccccggcggcggctgcagcagcggcggcgccgcccccgccagacaccccagagtgaagagagacaaggccgtgcacgagagaggccactggaacaacaaggtggagttcgtgctgagcgtggccggcgagatcatcggcctgggcaacgtgtggagattcccctacctgtgctacaagaacggcggcggcgccttcctgatcccctacgtggtgttcttcatctgctgcggcatccccgtgttcttcctggagaccgccctgggccagttcaccagcgagggcggcatcacctgctggagaaaggtgtgccccctgttcgagggcatcggctacgccacccaggtgatcgaggcccacctgaacgtgtactacatcatcatcctggcctgggccatcttctacctgagcaactgcttcaccaccgagctgccctgggccacctgcggccacgagtggaacaccgagaactgcgtggagttccagaagctgaacgtgagcaactacagccacgtgagcctgcagaacgccaccagccccgtgatggagttctgggagtag

SEQ ID NO: 100170 - DNA, 2394 bp, synthetic construct
  misc_feature 1..2394: note = Description of Artificial Sequence: Synthetic coding sequence
  source 1..2394: mol_type = other DNA
atggactgcagcgcccccaaggagatgaacaagctgcccgccaacagccccgaggccgccgccgcccagggccaccccgacggcccctgcgcccccagaaccagccccgagcaggagctgcccgccgccgccgccccccccccccccagagtgcccagaagcgccagcaccggcgcccagaccttccagagcgccgacgccagagcctgcgaggccgagagacccggcgtgggcagctgcaagctgagcagccccagagcccaggccgccagcgccgccctgagagacctgagagaggcccagggcgcccaggccagccccccccccggcagcagcggccccggcaacgccctgcactgcaagatccccttcctgagaggccccgagggcgacgccaacgtgagcgtgggcaagggcaccctggagagaaacaacacccccgtggtgggctgggtgaacatgagccagagcaccgtggtgctggccaccgacggcatcaccagcgtgctgcccggcagcgtggccaccgtggccacccaggaggacgagcagggcgacgagaacaaggccagaggcaactggagcagcaagctggacttcatcctgagcatggtgggctacgccgtgggcctgggcaacgtgtggagattcccctacctggccttccagaacggcggcggcgccttcctgatcccctacctgatgatgctggccctggccggcctgcccatcttcttcctggaggtgagcctgggccagttcgccagccagggccccgtgagcgtgtggaaggccatccccgccctgcagggctgcggcatcgccatgctgatcatcagcgtgctgatcgccatctactacaacgtgatcatctgctacaccctgttctacctgttcgccagcttcgtgagcgtgctgccctggggcagctgcaacaacccctggaacacccccgagtgcaaggacaagaccaagctgctgctggacagctgcgtgatcagcgaccaccccaagatccagatcaagaacagcaccttctgcatgaccgcctaccccaacgtgaccatggtgaacttcaccagccaggccaacaagaccttcgtgagcggcagcgaggagtacttcaagtacttcgtgctgaagatcagcgccggcatcgagtaccccggcgagatcagatggcccctggccctgtgcctgttcctggcctgggtgatcgtgtacgccagcctggccaagggcatcaagaccagcggcaaggtggtgtacttcaccgccaccttcccctacgtggtgctggtgatcctgctgatcagaggcgtgaccctgcccggcgccggcgccggcatctggtacttcatcacccccaagtgggagaagctgaccgacgccaccgtgtggaaggacgccgccacccagatcttcttcagcctgagcgccgcctggggcggcctgatcaccctgagcagctacaacaagttccacaacaactgctacagagacaccctgatcgtgacctgcaccaacagcgccaccagcatcttcgccggcttcgtgatcttcagcgtgatcggcttcatggccaacgagagaaaggtgaacatcgagaacgtggccgaccagggccccggcatcgccttcgtggtgtaccccgaggccctgaccagactgcccctgagccccttctgggccatcatcttcttcctgatgctgctgaccctgggcctggacaccatgttcgccaccatcgagaccatcgtgaccagcatcagcgacgagttccccaagtacctgagaacccacaagcccgtgttcaccctgggctgctgcatctgcttcttcatcatgggcttccccatgatcacccagggcggcatctacatgttccagctggtggacacctacgccgccagctacgccctggtgatcatcgccatcttcgagctggtgggcatcagctacgtgtacggcctgcagagattctgcgaggacatcgagatgatgatcggcttccagcccaacatcttctggaaggtgtgctgggccttcgtgacccccaccatcctgaccttcatcctgtgcttcagcttctaccagtgggagcccatgacctacggcagctacagataccccaactggagcatggtgctgggctggctgatgctggcctgcagcgtgatctggatccccatcatgttcgtgatcaagatgcacctggcccccggcagattcatcgagagactgaagctggtgtgcagcccccagcccgactggggccccttcctggcccagcacagaggcgagagatacaagaacatgatcgaccccctgggcaccagcagcctgggcctgaagctgcccgtgaaggacctggagctgggcacccagtgctag

SEQ ID NO: 100171 - DNA, 1959 bp, synthetic construct
  misc_feature 1..1959: note = Description of Artificial Sequence: Synthetic coding sequence
  source 1..1959: mol_type = other DNA
atgagcggcggcgacaccagagccgccatcgccagacccagaatggccgccgcccacggccccgtggcccccagcagccccgagcagaacggcgccgtgcccagcgaggccaccaagagagaccagaacctgaagagaggcaactggggcaaccagatcgagttcgtgctgaccagcgtgggctacgccgtgggcctgggcaacgtgtggagattcccctacctgtgctacagaaacggcggcggcgccttcatgttcccctacttcatcatgctgatcttctgcggcatccccctgttcttcatggagctgagcttcggccagttcgccagccagggctgcctgggcgtgtggagaatcagccccatgttcaagggcgtgggctacggcatgatggtggtgagcacctacatcggcatctactacaacgtggtgatctgcatcgccttctactacttcttcagcagcatgacccacgtgctgccctgggcctactgcaacaacccctggaacacccacgactgcgccggcgtgctggacgccagcaacctgaccaacggcagcagacccgccgccctgcccagcaacctgagccacctgctgaaccacagcctgcagagaaccagccccagcgaggagtactggagactgtacgtgctgaagctgagcgacgacatcggcaacttcggcgaggtgagactgcccctgctgggctgcctgggcgtgagctggctggtggtgttcctgtgcctgatcagaggcgtgaagagcagcggcaaggtggtgtacttcaccgccaccttcccctacgtggtgctgaccatcctgttcgtgagaggcgtgaccctggagggcgccttcgacggcatcatgtactacctgaccccccagtgggacaagatcctggaggccaaggtgtggggcgacgccgccagccagatcttctacagcctgggctgcgcctggggcggcctgatcaccatggccagctacaacaagttccacaacaactgctacagagacagcgtgatcatcagcatcaccaactgcgccaccagcgtgtacgccggcttcgtgatcttcagcatcctgggcttcatggccaaccacctgggcgtggacgtgagcagagtggccgaccacggccccggcctggccttcgtggcctaccccgaggccctgaccctgctgcccatcagccccctgtggagcctgctgttcttcttcatgctgatcctgctgggcctgggcacccagttctgcctgctggagaccctggtgaccgccatcgtggacgaggtgggcaacgagtggatcctgcagaagaagacctacgtgaccctgggcgtggccgtggccggcttcctgctgggcatccccctgaccagccaggccggcatctactggctgctgctgatggacaactacgccgccagcttcagcctggtggtgatcagctgcatcatgtgcgtggccatcatgtacatctacggccacagaaactacttccaggacatccagatgatgctgggcttccccccccccctgttcttccagatctgctggagattcgtgagccccgccatcatcttcttcatcctggtgttcaccgtgatccagtaccagcccatcacctacaaccactaccagtaccccggctgggccgtggccatcggcttcctgatggccctgagcagcgtgctgtgcatccccctgtacgccatgttcagactgtgcagaaccgacggcgacaccctgctgcagagactgaagaacgccaccaagcccagcagagactggggccccgccctgctggagcacagaaccggcagatacgcccccaccatcgcccccagccccgaggacggcttcgaggtgcagcccctgcaccccgacaaggcccagatccccatcgtgggcagcaacggcagcagcagactgcaggacagcagaatctag

SEQ ID NO: 100172 - DNA, 2121 bp, synthetic construct
  misc_feature 1..2121: note = Description of Artificial Sequence: Synthetic coding sequence
  source 1..2121: mol_type = other DNA
atgagcggcggcgacaccagagccgccatcgccagacccagaatggccgccgcccacggccccgtggcccccagcagccccgagcaggtgaccctgctgcccgtgcagagaagcttcttcctgccccccttcagcggcgccacccccagcaccagcctggccgagagcgtgctgaaggtgtggcacggcgcctacaacagcggcctgctgccccagctgatggcccagcacagcctggccatggcccagaacggcgccgtgcccagcgaggccaccaagagagaccagaacctgaagagaggcaactggggcaaccagatcgagttcgtgctgaccagcgtgggctacgccgtgggcctgggcaacgtgtggagattcccctacctgtgctacagaaacggcggcggcgccttcatgttcccctacttcatcatgctgatcttctgcggcatccccctgttcttcatggagctgagcttcggccagttcgccagccagggctgcctgggcgtgtggagaatcagccccatgttcaagggcgtgggctacggcatgatggtggtgagcacctacatcggcatctactacaacgtggtgatctgcatcgccttctactacttcttcagcagcatgacccacgtgctgccctgggcctactgcaacaacccctggaacacccacgactgcgccggcgtgctggacgccagcaacctgaccaacggcagcagacccgccgccctgcccagcaacctgagccacctgctgaaccacagcctgcagagaaccagccccagcgaggagtactggagactgtacgtgctgaagctgagcgacgacatcggcaacttcggcgaggtgagactgcccctgctgggctgcctgggcgtgagctggctggtggtgttcctgtgcctgatcagaggcgtgaagagcagcggcaaggtggtgtacttcaccgccaccttcccctacgtggtgctgaccatcctgttcgtgagaggcgtgaccctggagggcgccttcgacggcatcatgtactacctgaccccccagtgggacaagatcctggaggccaaggtgtggggcgacgccgccagccagatcttctacagcctgggctgcgcctggggcggcctgatcaccatggccagctacaacaagttccacaacaactgctacagagacagcgtgatcatcagcatcaccaactgcgccaccagcgtgtacgccggcttcgtgatcttcagcatcctgggcttcatggccaaccacctgggcgtggacgtgagcagagtggccgaccacggccccggcctggccttcgtggcctaccccgaggccctgaccctgctgcccatcagccccctgtggagcctgctgttcttcttcatgctgatcctgctgggcctgggcacccagttctgcctgctggagaccctggtgaccgccatcgtggacgaggtgggcaacgagtggatcctgcagaagaagacctacgtgaccctgggcgtggccgtggccggcttcctgctgggcatccccctgaccagccaggccggcatctactggctgctgctgatggacaactacgccgccagcttcagcctggtggtgatcagctgcatcatgtgcgtggccatcatgtacatctacggccacagaaactacttccaggacatccagatgatgctgggcttccccccccccctgttcttccagatctgctggagattcgtgagccccgccatcatcttcttcatcctggtgttcaccgtgatccagtaccagcccatcacctacaaccactaccagtaccccggctgggccgtggccatcggcttcctgatggccctgagcagcgtgctgtgcatccccctgtacgccatgttcagactgtgcagaaccgacggcgacaccctgctgcagagactgaagaacgccaccaagcccagcagagactggggccccgccctgctggagcacagaaccggcagatacgcccccaccatcgcccccagccccgaggacggcttcgaggtgcagcccctgcaccccgacaaggcccagatccccatcgtgggcagcaacggcagcagcagactgcaggacagcagaatctag

SEQ ID NO: 100173 - DNA, 1725 bp, synthetic construct
  misc_feature 1..1725: note = Description of Artificial Sequence: Synthetic coding sequence
  source 1..1725: mol_type = other DNA
atgttcccctacttcatcatgctgatcttctgcggcatccccctgttcttcatggagctgagcttcggccagttcgccagccagggctgcctgggcgtgtggagaatcagccccatgttcaagggcgtgggctacggcatgatggtggtgagcacctacatcggcatctactacaacgtggtgatctgcatcgccttctactacttcttcagcagcatgacccacgtgctgccctgggcctactgcaacaacccctggaacacccacgactgcgccggcgtgctggacgccagcaacctgaccaacggcagcagacccgccgccctgcccagcaacctgagccacctgctgaaccacagcctgcagagaaccagccccagcgaggagtactggagactgtacgtgctgaagctgagcgacgacatcggcaacttcggcgaggtgagactgcccctgctgggctgcctgggcgtgagctggctggtggtgttcctgtgcctgatcagaggcgtgaagagcagcggcaaggtggtgtacttcaccgccaccttcccctacgtggtgctgaccatcctgttcgtgagaggcgtgaccctggagggcgccttcgacggcatcatgtactacctgaccccccagtgggacaagatcctggaggccaaggtgtggggcgacgccgccagccagatcttctacagcctgggctgcgcctggggcggcctgatcaccatggccagctacaacaagttccacaacaactgctacagagacagcgtgatcatcagcatcaccaactgcgccaccagcgtgtacgccggcttcgtgatcttcagcatcctgggcttcatggccaaccacctgggcgtggacgtgagcagagtggccgaccacggccccggcctggccttcgtggcctaccccgaggccctgaccctgctgcccatcagccccctgtggagcctgctgttcttcttcatgctgatcctgctgggcctgggcacccagttctgcctgctggagaccctggtgaccgccatcgtggacgaggtgggcaacgagtggatcctgcagaagaagacctacgtgaccctgggcgtggccgtggccggcttcctgctgggcatccccctgaccagccaggccggcatctactggctgctgctgatggacaactacgccgccagcttcagcctggtggtgatcagctgcatcatgtgcgtggccatcatgtacatctacggccacagaaactacttccaggacatccagatgatgctgggcttccccccccccctgttcttccagatctgctggagattcgtgagccccgccatcatcttcctgcaggcccaggtgcacagaagactgccccagaaccccctgcacttcgccagcctgcccgagagaaacgtgctgctgcaccagctgccccagagaggcggcgtgcccgagcacgacccccccaccccccccagccccgccagaacctacggcccccaggtgagagtgagagaggtgcccagagccagaagacagagaagccccaaccccgcccccctgtgggccccccccagccccaagccccacccctgcagcgccgccggccccctgggctgggactgccccttcagaaactgccagagcctggccctgagcagcgccagactgctggccgacagcgacgccggcggccccgagaccagacagtgggagcccggcccctag

SEQ ID NO: 100174 - DNA, 1902 bp, synthetic construct
  misc_feature 1..1902: note = Description of Artificial Sequence: Synthetic coding sequence
  source 1..1902: mol_type = other DNA
atggtgggcaagggcgccaagggcatgctgaacggcgccgtgcccagcgaggccaccaagagagaccagaacctgaagagaggcaactggggcaaccagatcgagttcgtgctgaccagcgtgggctacgccgtgggcctgggcaacgtgtggagattcccctacctgtgctacagaaacggcggcggcgccttcatgttcccctacttcatcatgctgatcttctgcggcatccccctgttcttcatggagctgagcttcggccagttcgccagccagggctgcctgggcgtgtggagaatcagccccatgttcaagggcgtgggctacggcatgatggtggtgagcacctacatcggcatctactacaacgtggtgatctgcatcgccttctactacttcttcagcagcatgacccacgtgctgccctgggcctactgcaacaacccctggaacacccacgactgcgccggcgtgctggacgccagcaacctgaccaacggcagcagacccgccgccctgcccagcaacctgagccacctgctgaaccacagcctgcagagaaccagccccagcgaggagtactggagactgtacgtgctgaagctgagcgacgacatcggcaacttcggcgaggtgagactgcccctgctgggctgcctgggcgtgagctggctggtggtgttcctgtgcctgatcagaggcgtgaagagcagcggcaaggtggtgtacttcaccgccaccttcccctacgtggtgctgaccatcctgttcgtgagaggcgtgaccctggagggcgccttcgacggcatcatgtactacctgaccccccagtgggacaagatcctggaggccaaggtgtggggcgacgccgccagccagatcttctacagcctgggctgcgcctggggcggcctgatcaccatggccagctacaacaagttccacaacaactgctacagagacagcgtgatcatcagcatcaccaactgcgccaccagcgtgtacgccggcttcgtgatcttcagcatcctgggcttcatggccaaccacctgggcgtggacgtgagcagagtggccgaccacggccccggcctggccttcgtggcctaccccgaggccctgaccctgctgcccatcagccccctgtggagcctgctgttcttcttcatgctgatcctgctgggcctgggcacccagttctgcctgctggagaccctggtgaccgccatcgtggacgaggtgggcaacgagtggatcctgcagaagaagacctacgtgaccctgggcgtggccgtggccggcttcctgctgggcatccccctgaccagccaggccggcatctactggctgctgctgatggacaactacgccgccagcttcagcctggtggtgatcagctgcatcatgtgcgtggccatcatgtacatctacggccacagaaactacttccaggacatccagatgatgctgggcttccccccccccctgttcttccagatctgctggagattcgtgagccccgccatcatcttcttcatcctggtgttcaccgtgatccagtaccagcccatcacctacaaccactaccagtaccccggctgggccgtggccatcggcttcctgatggccctgagcagcgtgctgtgcatccccctgtacgccatgttcagactgtgcagaaccgacggcgacaccctgctgcagagactgaagaacgccaccaagcccagcagagactggggccccgccctgctggagcacagaaccggcagatacgcccccaccatcgcccccagccccgaggacggcttcgaggtgcagcccctgcaccccgacaaggcccagatccccatcgtgggcagcaacggcagcagcagactgcaggacagcagaatctag

SEQ ID NO: 100175 - DNA, 1569 bp, synthetic construct
  misc_feature 1..1569: note = Description of Artificial Sequence: Synthetic coding sequence
  source 1..1569: mol_type = other DNA
atgatggtggtgagcacctacatcggcatctactacaacgtggtgatctgcatcgccttctactacttcttcagcagcatgacccacgtgctgccctgggcctactgcaacaacccctggaacacccacgactgcgccggcgtgctggacgccagcaacctgaccaacggcagcagacccgccgccctgcccagcaacctgagccacctgctgaaccacagcctgcagagaaccagccccagcgaggagtactggagactgtacgtgctgaagctgagcgacgacatcggcaacttcggcgaggtgagactgcccctgctgggctgcctgggcgtgagctggctggtggtgttcctgtgcctgatcagaggcgtgaagagcagcggcaaggtggtgtacttcaccgccaccttcccctacgtggtgctgaccatcctgttcgtgagaggcgtgaccctggagggcgccttcgacggcatcatgtactacctgaccccccagtgggacaagatcctggaggccaaggtgtggggcgacgccgccagccagatcttctacagcctgggctgcgcctggggcggcctgatcaccatggccagctacaacaagttccacaacaactgctacagagacagcgtgatcatcagcatcaccaactgcgccaccagcgtgtacgccggcttcgtgatcttcagcatcctgggcttcatggccaaccacctgggcgtggacgtgagcagagtggccgaccacggccccggcctggccttcgtggcctaccccgaggccctgaccctgctgcccatcagccccctgtggagcctgctgttcttcttcatgctgatcctgctgggcctgggcacccagttctgcctgctggagaccctggtgaccgccatcgtggacgaggtgggcaacgagtggatcctgcagaagaagacctacgtgaccctgggcgtggccgtggccggcttcctgctgggcatccccctgaccagccaggccggcatctactggctgctgctgatggacaactacgccgccagcttcagcctggtggtgatcagctgcatcatgtgcgtggccatcatgtacatctacggccacagaaactacttccaggacatccagatgatgctgggcttccccccccccctgttcttccagatctgctggagattcgtgagccccgccatcatcttcttcatcctggtgttcaccgtgatccagtaccagcccatcacctacaaccactaccagtaccccggctgggccgtggccatcggcttcctgatggccctgagcagcgtgctgtgcatccccctgtacgccatgttcagactgtgcagaaccgacggcgacaccctgctgcagagactgaagaacgccaccaagcccagcagagactggggccccgccctgctggagcacagaaccggcagatacgcccccaccatcgcccccagccccgaggacggcttcgaggtgcagcccctgcaccccgacaaggcccagatccccatcgtgggcagcaacggcagcagcagactgcaggacagcagaatctag

SEQ ID NO: 100176 - DNA, 405 bp, synthetic construct
  misc_feature 1..405: note = Description of Artificial Sequence: Synthetic coding sequence
  source 1..405: mol_type = other DNA
atgagcggcggcgacaccagagccgccatcgccagacccagaatggccgccgcccacggccccgtggcccccagcagccccgagcagaacggcgccgtgcccagcgaggccaccaagagagaccagaacctgaagagaggcaactggggcaaccagatcgagttcgtgctgaccagcgtgggctacgccgtgggcctgggcaacgtgtggagattcccctacctgtgctacagaaacggcggcggcgccttcatgttcccctacttcatcatgctgatcttctgcggcatccccctgttcttcatggagctgagcttcggccagttcgccagccagggctgcctgggcgtgtggagaatcagccccatgttcaagggcgtgggctacggcatgatggtggtgtag

SEQ ID NO: 100177 - DNA, 1161 bp, synthetic construct
  misc_feature 1..1161: note = Description of Artificial Sequence: Synthetic coding sequence
  source 1..1161: mol_type = other DNA
atgttcccctacttcatcatgctgatcttctgcggcatccccctgttcttcatggagctgagcttcggccagttcgccagccagggctgcctgggcgtgtggagaatcagccccatgttcaagggcgtgggctacggcatgatggtggtgagcacctacatcggcatctactacaacgtggtgatctgcatcgccttctactacttcttcagcagcatgacccacgtgctgccctgggcctactgcaacaacccctggaacacccacgactgcgccggcgtgctggacgccagcaacctgaccaacggcagcagacccgccgccctgcccagcaacctgagccacctgctgaaccacagcctgcagagaaccagccccagcgaggagtactggagactgtacgtgctgaagctgagcgacgacatcggcaacttcggcgaggtgagactgcccctgctgggctgcctgggcgtgagctggctggtggtgttcctgtgcctgatcagaggcgtgaagagcagcggcaaggtggtgtacttcaccgccaccttcccctacgtggtgctgaccatcctgttcgtgagaggcgtgaccctggagggcgccttcgacggcatcatgtactacctgaccccccagtgggacaagatcctggaggccaaggtgtggggcgacgccgccagccagatcttctacagcctgggctgcgcctggggcggcctgatcaccatggccagctacaacaagttccacaacaactgctacagagacagcgtgatcatcagcatcaccaactgcgccaccagcgtgtacgccggcttcgtgatcttcagcatcctgggcttcatggccaaccacctgggcgtggacgtgagcagagtggccgaccacggccccggcctggccttcgtggcctaccccgaggccctgaccctgctgcccatcagccccctgtggagcctgctgttcttcttcatgctgatcctgctgggcctgggcacccagttctgcctgctggagaccctggtgaccgccatcgtggacgaggtgggcaacgagtggatcctgcagaagaagacctacgtgaccctgggcgtggccgtggccggcttcctgctgggcatccccctgaccagccaggccagcatcggctgctgctag

SEQ ID NO: 100178 - DNA, 1050 bp, synthetic construct
  misc_feature 1..1050: note = Description of Artificial Sequence: Synthetic coding sequence
  source 1..1050: mol_type = other DNA
atgggcgacatgggcgacccccccaagaagaagagactgatcagcctgtgcgtgggctgcggcaaccagatccacgaccagtacatcctgagagtgagccccgacctggagtggcacgccgcctgcctgaagtgcgccgagtgcaaccagtacctggacgagagctgcacctgcttcgtgagagacggcaagacctactgcaagagagactacatcagactgtacggcatcaagtgcgccaagtgcagcatcggcttcagcaagaacgacttcgtgatgagagccagaagcaaggtgtaccacatcgagtgcttcagatgcgtggcctgcagcagacagctgatccccggcgacgagttcgccctgagagaggacggcctgttctgcagagccgaccacgacgtggtggagagagccagcctgggcgccggcgaccccctgagccccctgcaccccgccagacccctgcagatggccgccgagcccatcagcgccagacagcccgccctgagaccccacgtgcacaagcagcccgagaagaccaccagagtgagaaccgtgctgaacgagaagcagctgcacaccctgagaacctgctacgccgccaaccccagacccgacgccctgatgaaggagcagctggtggagatgaccggcctgagccccagagtgatcagagtgtggttccagaacaagagatgcaaggacaagaagagaagcatcatgatgaagcagctgcagcagcagcagcccaacgacaagaccaacatccagggcatgaccggcacccccatggtggccgccagccccgagagacacgacggcggcctgcaggccaaccccgtggaggtgcagagctaccagcccccctggaaggtgctgagcgacttcgccctgcagagcgacatcgaccagcccgccttccagcagctggtgaacttcagcgagggcggccccggcagcaacagcaccggcagcgaggtggccagcatgagcagccagctgcccgacacccccaacagcatggtggccagccccatcgaggcctag

SEQ ID NO: 100179 - DNA, 2283 bp, synthetic construct
  misc_feature 1..2283: note = Description of Artificial Sequence: Synthetic coding sequence
  source 1..2283: mol_type = other DNA
atgctgagcgacgaccacgtgaacgagatcatcatccaggtggagaacgtgagcagcggcgtgcagagccaccccagcagcaaccagatcttccaggagaaggtgctgctggacagcagcatcaacatggtgctgagcatcagcgacatcgacgtgatcgacagccagaccgtgagcaagagaaacgaccagaagggcaaccaggtgctgagattcagcaccagcctgaacgagagcatgagccagaccctgcacagcctggagtgcatgggcatcgacacccccggcagcagccacgagaccgtgcagggccagaagctgatcgccagcctgatccccatgaccagcagagacagaatcaaggccatcagaaaccagcccagaaccatggaggagaagagaaacctgagaaagatcgtggacaaggagaagagcaagcagacccacagaatcctgcagctgaactgctgcatccagtgcctgaacagcatcagcagagcctacagaagaagcaagaacagcctgagcgagatcctgaacagcatcagcctgtggcagaagaccctgaagatcatcggcggcaagttcggcaccagcgtgctgagctacttcaacttcctgagatggctgctgaagttcaacatcttcagcttcatcctgaacttcagcttcatcatcatcccccagttcaccgtggccaagaagaacaccctgcagttcaccggcctggagttcttcaccggcgtgggctacttcagagacaccgtgatgtactacggcttctacaccaacagcaccatccagcacggcaacagcggcgccagctacaacatgcagctggcctacatcttcaccatcggcgcctgcctgaccacctgcttcttcagcctgctgttcagcatggccaagtacttcagaaacaacttcatcaacccccacatctacagcggcggcatcaccaagctgatcttctgctgggacttcaccgtgacccacgagaaggccgtgaagctgaagcagaagaacctgagcaccgagatcagagagaacctgagcgagctgagacaggagaacagcaagctgaccttcaaccagctgctgaccagattcagcgcctacatggtggcctgggtggtgagcaccggcgtggccatcgcctgctgcgccgccgtgtactacctggccgagtacaacctggagttcctgaagacccacagcaaccccggcgccgtgctgctgctgcccttcgtggtgagctgcatcaacctggccgtgccctgcatctacagcatgttcagactggtggagagatacgagatgcccagacacgaggtgtacgtgctgctgatcagaaacatcttcctgaagatcagcatcatcggcatcctgtgctactactggctgaacaccgtggccctgagcggcgaggagtgctgggagaccctgatcggccaggacatctacagactgctgctgatggacttcgtgttcagcctggtgaacagcttcctgggcgagttcctgagaagaatcatcggcatgcagctgatcaccagcctgggcctgcaggagttcgacatcgccagaaacgtgctggagctgatctacgcccagaccctggtgtggatcggcatcttcttctgccccctgctgcccttcatccagatgatcatgctgttcatcatgttctacagcaagaacatcagcctgatgatgaacttccagccccccagcaaggcctggagagccagccagatgatgaccttcttcatcttcctgctgttcttccccagcttcaccggcgtgctgtgcaccctggccatcaccatctggagactgaagcccagcgccgactgcggccccttcagaggcctgcccctgttcatccacagcatctacagctggatcgacaccctgagcaccagacccggctacctgtgggtggtgtggatctacagaaacctgatcggcagcgtgcacttcttcttcatcctgaccctgatcgtgctgatcatcacctacctgtactggcagatcaccgagggcagaaagatcatgatcagactgctgcacgagcagatcatcaacgagggcaaggacaagatgttcctgatcgagaagctgatcaagctgcaggacatggagaagaaggccaaccccagcagcctggtgctggagagaagagaggtggagcagcagggcttcctgcacctgggcgagcacgacggcagcctggacctgagaagcagaagaagcgtgcaggagggcaaccccagagcctag

SEQ ID NO: 100180 - DNA, 1854 bp, synthetic construct
  misc_feature 1..1854: note = Description of Artificial Sequence: Synthetic coding sequence
  source 1..1854: mol_type = other DNA
atgctgctggccagaatgaacccccaggtgcagcccgagaacaacggcgccgacaccggccccgagcagcccctgagagccagaaagaccgccgagctgctggtggtgaaggagagaaacggcgtgcagtgcctgctggcccccagagacggcgacgcccagcccagagagacctggggcaagaagatcgacttcctgctgagcgtggtgggcttcgccgtggacctggccaacgtgtggagattcccctacctgtgctacaagaacggcggcggcgccttcctgatcccctacaccctgttcctgatcatcgccggcatgcccctgttctacatggagctggccctgggccagtacaacagagagggcgccgccaccgtgtggaagatctgccccttcttcaagggcgtgggctacgccgtgatcctgatcgccctgtacgtgggcttctactacaacgtgatcatcgcctggagcctgtactacctgttcagcagcttcaccctgaacctgccctggaccgactgcggccacacctggaacagccccaactgcaccgaccccaagctgctgaacggcagcgtgctgggcaaccacaccaagtacagcaagtacaagttcacccccgccgccgagttctacgagagaggcgtgctgcacctgcacgagagcagcggcatccacgacatcggcctgccccagtggcagctgctgctgtgcctgatggtggtggtgatcgtgctgtacttcagcctgtggaagggcgtgaagaccagcggcaaggtggtgtggatcaccgccaccctgccctacttcgtgctgttcgtgctgctggtgcacggcgtgaccctgcccggcgccagcaacggcatcaacgcctacctgcacatcgacttctacagactgaaggaggccaccgtgtggatcgacgccgccacccagatcttcttcagcctgggcgccggcttcggcgtgctgatcgccttcgccagctacaacaagttcgacaacaactgctacagagacgccctgctgaccagcagcatcaactgcatcaccagcttcgtgagcggcttcgccatcttcagcatcctgggctacatggcccacgagcacaaggtgaacatcgaggacgtggccaccgagggcgccggcctggtgttcatcctgtaccccgaggccatcagcaccctgagcggcagcaccttctgggccgtggtgttcttcgtgatgctgctggccctgggcctggacagcagcatgggcggcatggaggccgtgatcaccggcctggccgacgacttccaggtgctgaagagacacagaaagctgttcaccttcggcgtgaccttcagcaccttcctgctggccctgttctgcatcaccaagggcggcatctacgtgctgaccctgctggacaccttcgccgccggcaccagcatcctgttcgccgtgctgatggaggccatcggcgtgagctggttctacggcgtggacagattcagcaacgacatccagcagatgatgggcttcagacccggcctgtactggagactgtgctggaagttcgtgagccccgccttcctgctgttcgtggtggtggtgagcatcatcaacttcaagcccctgacctacgacgactacatcttccccccctgggccaactgggtgggctggggcatcgccctgagcagcatggtgctggtgcccatctacgtgatctacaagttcctgagcacccagggcagcctgtgggagagactggcctacggcatcacccccgagaacgagcaccacctggtggcccagagagacatcagacagttccagctgcagcactggctggccatctag

SEQ ID NO: 100181 - DNA, 1854 bp, synthetic construct; identical to SEQ ID NO: 100180
  misc_feature 1..1854: note = Description of Artificial Sequence: Synthetic coding sequence
  source 1..1854: mol_type = other DNA

SEQ ID NO: 100182 - DNA, 996 bp, synthetic construct
  misc_feature 1..996: note = Description of Artificial Sequence: Synthetic coding sequence
  source 1..996: mol_type = other DNA
atggtggtggtgatcgtgctgtacttcagcctgtggaagggcgtgaagaccagcggcaaggtgtggatcgacgccgccacccagatcttcttcagcctgggcgccggcttcggcgtgctgatcgccttcgccagctacaacaagttcgacaacaactgctacagagacgccctgctgaccagcagcatcaactgcatcaccagcttcgtgagcggcttcgccatcttcagcatcctgggctacatggcccacgagcacaaggtgaacatcgaggacgtggccaccgagggcgccggcctggtgttcatcctgtaccccgaggccatcagcaccctgagcggcagcaccttctgggccgtggtgttcttcgtgatgctgctggccctgggcctggacagcagcatgggcggcatggaggccgtgatcaccggcctggccgacgacttccaggtgctgaagagacacagaaagctgttcaccttcggcgtgaccttcagcaccttcctgctggccctgttctgcatcaccaagggcggcatctacgtgctgaccctgctggacaccttcgccgccggcaccagcatcctgttcgccgtgctgatggaggccatcggcgtgagctggttctacggcgtggacagattcagcaacgacatccagcagatgatgggcttcagacccggcctgtactggagactgtgctggaagttcgtgagccccgccttcctgctgttcgtggtggtggtgagcatcatcaacttcaagcccctgacctacgacgactacatcttccccccctgggccaactgggtgggctggggcatcgccctgagcagcatggtgctggtgcccatctacgtgatctacaagttcctgagcacccagggcagcctgtgggagagactggcctacggcatcacccccgagaacgagcaccacctggtggcccagagagacatcagacagttccagctgcagcactggctggccatctag

SEQ ID NO: 100183 - DNA, 1893 bp, synthetic construct
  misc_feature 1..1893: note = Description of Artificial Sequence: Synthetic coding sequence
  source 1..1893: mol_type = other DNA
atggagaccacccccctgaacagccagaagcagctgagcgcctgcgaggacggcgaggactgccaggagaacggcgtgctgcagaaggtggtgcccacccccggcgacaaggtggagagcggccagatcagcaacggctacagcgccgtgcccagccccggcgccggcgacgacaccagacacagcatccccgccaccaccaccaccctggtggccgagctgcaccagggcgagagagagacctggggcaagaaggtggacttcctgctgagcgtgatcggctacgccgtggacctgggcaacgtgtggagattcccctacatctgctaccagaacggcggcggcgccttcctgctgccctacaccatcatggccatcttcggcggcatccccctgttctacatggagctggccctgggccagtaccacagaaacggctgcatcagcatctggagaaagatctgccccatcttcaagggcatcggctacgccatctgcatcatcgccttctacatcgccagctactacaacaccatcatggcctgggccctgtactacctgatcagcagcttcaccgaccagctgccctggaccagctgcaagaacagctggaacaccggcaactgcaccaactacttcagcgaggacaacatcacctggaccctgcacagcaccagccccgccgaggagttctacaccagacacgtgctgcagatccacagaagcaagggcctgcaggacctgggcggcatcagctggcagctggccctgtgcatcatgctgatcttcaccgtgatctacttcagcatctggaagggcgtgaagaccagcggcaaggtggtgtgggtgaccgccaccttcccctacatcatcctgagcgtgctgctggtgagaggcgccaccctgcccggcgcctggagaggcgtgctgttctacctgaagcccaactggcagaagctgctggagaccggcgtgtggatcgacgccgccgcccagatcttcttcagcctgggccccggcttcggcgtgctgctggccttcgccagctacaacaagttcaacaacaactgctaccaggacgccctggtgaccagcgtggtgaactgcatgaccagcttcgtgagcggcttcgtgatcttcaccgtgctgggctacatggccgagatgagaaacgaggacgtgagcgaggtggccaaggacgccggccccagcctgctgttcatcacctacgccgaggccatcgccaacatgcccgccagcaccttcttcgccatcatcttcttcctgatgctgatcaccctgggcctggacagcaccttcgccggcctggagggcgtgatcaccgccgtgctggacgagttcccccacgtgtgggccaagagaagagagagattcgtgctggccgtggtgatcacctgcttcttcggcagcctggtgaccctgaccttcggcggcgcctacgtggtgaagctgctggaggagtacgccaccggccccgccgtgctgaccgtggccctgatcgaggccgtggccgtgagctggttctacggcatcacccagttctgcagagacgtgaaggagatgctgggcttcagccccggctggttctggagaatctgctgggtggccatcagccccctgttcctgctgttcatcatctgcagcttcctgatgagccccccccagctgagactgttccagtacaactacccctactggagcatcatcctgggctactgcatcggcaccagcagcttcatctgcatccccacctacatcgcctacagactgatcatcacccccggcaccttcaaggagagaatcatcaagagcatcacccccgagacccccaccgagatcccctgcggcgacatcagactgaacgccgtgtag

SEQ ID NO: 100184 - DNA, 2019 bp, synthetic construct
  misc_feature 1..2019: note = Description of Artificial Sequence: Synthetic coding sequence
  source 1..2019: mol_type = other DNA
atgagccagagcagaagagtgaaccccgacgacagagagctgggcggcgacccccagatccaggcccccagagaccagctgggcagcctggccgacggccaccagtgccacctgctgaccagcagaatggagaccacccccctgaacagccagaagcagctgagcgcctgcgaggacggcgaggactgccaggagaacggcgtgctgcagaaggtggtgcccacccccggcgacaaggtggagagcggccagatcagcaacggctacagcgccgtgcccagccccggcgccggcgacgacaccagacacagcatccccgccaccaccaccaccctggtggccgagctgcaccagggcgagagagagacctggggcaagaaggtggacttcctgctgagcgtgatcggctacgccgtggacctgggcaacgtgtggagattcccctacatctgctaccagaacggcggcggcgccttcctgctgccctacaccatcatggccatcttcggcggcatccccctgttctacatggagctggccctgggccagtaccacagaaacggctgcatcagcatctggagaaagatctgccccatcttcaagggcatcggctacgccatctgcatcatcgccttctacatcgccagctactacaacaccatcatggcctgggccctgtactacctgatcagcagcttcaccgaccagctgccctggaccagctgcaagaacagctggaacaccggcaactgcaccaactacttcagcgaggacaacatcacctggaccctgcacagcaccagccccgccgaggagttctacaccagacacgtgctgcagatccacagaagcaagggcctgcaggacctgggcggcatcagctggcagctggccctgtgcatcatgctgatcttcaccgtgatctacttcagcatctggaagggcgtgaagaccagcggcaaggtggtgtgggtgaccgccaccttcccctacatcatcctgagcgtgctgctggtgagaggcgccaccctgcccggcgcctggagaggcgtgctgttctacctgaagcccaactggcagaagctgctggagaccggcgtgtggatcgacgccgccgcccagatcttcttcagcctgggccccggcttcggcgtgctgctggccttcgccagctacaacaagttcaacaacaactgctaccaggacgccctggtgaccagcgtggtgaactgcatgaccagcttcgtgagcggcttcgtgatcttcaccgtgctgggctacatggccgagatgagaaacgaggacgtgagcgaggtggccaaggacgccggccccagcctgctgttcatcacctacgccgaggccatcgccaacatgcccgccagcaccttcttcgccatcatcttcttcctgatgctgatcaccctgggcctggacagcaccttcgccggcctggagggcgtgatcaccgccgtgctggacgagttcccccacgtgtgggccaagagaagagagagattcgtgctggccgtggtgatcacctgcttcttcggcagcctggtgaccctgaccttcggcggcgcctacgtggtgaagctgctggaggagtacgccaccggccccgccgtgctgaccgtggccctgatcgaggccgtggccgtgagctggttctacggcatcacccagttctgcagagacgtgaaggagatgctgggcttcagccccggctggttctggagaatctgctgggtggccatcagccccctgttcctgctgttcatcatctgcagcttcctgatgagccccccccagctgagactgttccagtacaactacccctactggagcatcatcctgggctactgcatcggcaccagcagcttcatctgcatccccacctacatcgcctacagactgatcatcacccccggcaccttcaaggagagaatcatcaagagcatcacccccgagacccccaccgagatcccctgcggcgacatcagactgaacgccgtgtag

SEQ ID NO: 100185 - DNA, 1893 bp, synthetic construct; identical to SEQ ID NO: 100183
  misc_feature 1..1893: note = Description of Artificial Sequence: Synthetic coding sequence
  source 1..1893: mol_type = other DNA

SEQ ID NO: 100186 - DNA, 1863 bp, synthetic construct
  misc_feature 1..1863: note = Description of Artificial Sequence: Synthetic coding sequence
  source 1..1863: mol_type = other DNA
atggccaccaaggagaagctgcagtgcctgaaggacttccacaaggacatcctgaagcccagccccggcaagagccccggcaccagacccgaggacgaggccgagggcaagcccccccagagagagaagtggagcagcaagatcgacttcgtgctgagcgtggccggcggcttcgtgggcctgggcaacgtgtggagattcccctacctgtgctacaagaacggcggcggcgccttcctgatcccctacttcatcttcctgttcggcagcggcctgcccgtgttcttcctggagatcatcatcggccagtacaccagcgagggcggcatcacctgctgggagaagatctgccccctgttcagcggcatcggctacgccagcgtggtgatcgtgagcctgctgaacgtgtactacatcgtgatcctggcctgggccacctactacctgttccagagcttccagaaggagctgccctgggcccactgcaaccacagctggaacaccccccactgcatggaggacaccatgagaaagaacaagagcgtgtggatcaccatcagcagcaccaacttcaccagccccgtgatcgagttctgggagagaaacgtgctgagcctgagccccggcatcgaccaccccggcagcctgaagtgggacctggccctgtgcctgctgctggtgtggctggtgtgcttcttctgcatctggaagggcgtgagaagcaccggcaaggtggtgtacttcaccgccaccttccccttcgccatgctgctggtgctgctggtgagaggcctgaccctgcccggcgccggcgccggcatcaagttctacctgtaccccgacatcaccagactggaggacccccaggtgtggatcgacgccggcacccagatcttcttcagctacgccatctgcctgggcgccatgaccagcctgggcagctacaacaagtacaagtacaacagctacagagactgcatgctgctgggctgcctgaacagcggcaccagcttcgtgagcggcttcgccatcttcagcatcctgggcttcatggcccaggagcagggcgtggacatcgccgacgtggccgagagcggccccggcctggccttcatcgcctaccccaaggccgtgaccatgatgcccctgcccaccttctggagcatcctgttcttcatcatgctgctgctgctgggcctggacagccagttcgtggaggtggagggccagatcaccagcctggtggacctgtaccccagcttcctgagaaagggctacagaagagagatcttcatcgccttcgtgtgcagcatcagctacctgctgggcctgaccatggtgaccgagggcggcatgtacgtgttccagctgttcgactactacgccgccagcggcgtgtgcctgctgtgggtggccttcttcgagtgcttcgtgatcgcctggatctacggcggcgacaacctgtacgacggcatcgaggacatgatcggctacagacccggcccctggatgaagtacagctgggccgtgatcacccccgtgctgtgcgtgggctgcttcatcttcagcctggtgaagtacgtgcccctgacctacaacaagacctacgtgtaccccaactgggccatcggcctgggctggagcctggccctgagcagcatgctgtgcgtgcccctggtgatcgtgatcagactgtgccagaccgagggccccttcctggtgagagtgaagtacctgctgacccccagagagcccaacagatgggccgtggagagagagggcgccaccccctacaacagcagaaccgtgatgaacggcgccctggtgaagcccacccacatcatcgtggagaccatgatgtag

SEQ ID NO: 100187 - DNA, 603 bp, synthetic construct
  misc_feature 1..603: note = Description of Artificial Sequence: Synthetic coding sequence
  source 1..603: mol_type = other DNA
atggccaccaaggagaagctgcagtgcctgaaggacttccacaaggacatcctgaagcccagccccggcaagagccccggcaccagacccgaggacgaggccgagggcaagcccccccagagagagaagtggagcagcaagatcgacttcgtgctgagcgtggccggcggcttcgtgggcctgggcaacgtgtggagattcccctacctgtgctacaagaacggcggcggcgccttcctgatcccctacttcatcttcctgttcggcagcggcctgcccgtgttcttcctggagatcatcatcggccagtacaccagcgagggcggcatcacctgctgggagaagatctgccccctgttcagcggcatcggctacgccagcgtggtgatcgtgagcctgctgaacgtgtactacatcgtgatcctggcctgggccacctactacctgttccagagcttccagaaggagctgccctgggcccactgcaaccacagctggaacaccccccactgcatggaggacaccatgagaaagaacaagagcgtgtggatcaccatcagcagcaccaacttcaccagccccgtgatcgagttctgggagtag

SEQ ID NO: 100188 - DNA, 1080 bp, synthetic construct
  misc_feature 1..1080: note = Description of Artificial Sequence: Synthetic coding sequence
  source 1..1080: mol_type = other DNA
atggccaccaaggagaagctgcagtgcctgaaggacttccacaaggacatcctgaagcccagccccggcaagagccccggcaccagacccgaggacgaggccgagggcaagcccccccagagagagaagtggagcagcaagatcgacttcgtgctgagcgtggccggcggcttcgtgggcctgggcaacgtgtggagattcccctacctgtgctacaagaacggcggcggcgccttcctgatcccctacttcatcttcctgttcggcagcggcctgcccgtgttcttcctggagatcatcatcggccagtacaccagcgagggcggcatcacctgctgggagaagatctgccccctgttcagcggcatcggctacgccagcgtggtgatcgtgagcctgctgaacgtgtactacatcgtgatcctggcctgggccacctactacctgttccagagcttccagaaggagctgccctgggcccactgcaaccacagctggaacaccccccactgcatggaggacaccatgagaaagaacaagagcgtgtggatcaccatcagcagcaccaacttcaccagccccgtgatcgagttctgggagagaaacgtgctgagcctgagccccggcatcgaccaccccggcagcctgaagtgggacctggccctgtgcctgctgctggtgtggctggtgtgcttcttctgcatctggaagggcgtgagaagcaccggcaaggtggtgtacttcaccgccaccttccccttcgccatgctgctggtgctgctggtgagaggcctgaccctgcccggcgccggcgccggcatcaagttctacctgtaccccgacatcaccagactggaggacccccaggtgtggatcgacgccggcacccagatcttcttcagctacgccatctgcctgggcgccatgaccagcctgggcagctacaacaagtacaagtacaacagctacagaagctggcccggcctgcactgcctgcccaagagctgcgacaacgacgccgccgcccacatcctggtgcacagcttcttctactacgccagcctggcctggaccggctag

SEQ ID NO: 100189 - DNA, 330 bp, synthetic construct
  misc_feature 1..330: note = Description of Artificial Sequence: Synthetic coding sequence
  source 1..330: mol_type = other DNA
atggccaccaaggagaagctgcagtgcctgaaggacttccacaaggacatcctgaagcccagccccggcaagagccccggcaccagacccgaggacgaggccgagggcaagcccccccagagagagaagtggagcagcaagatcgacttcgtgctgagcgtggccggcggcttcgtgggcctgggcaacgtgtggagattcccctacctgtgctacaagaacggcggcggcgccttcctgatcccctacttcatcttcctgttcggcagcggcctgcccgtgttcttcctggagatcatcatcggccagtacaccagcgagggcggctag

SEQ ID NO: 100190 - DNA, 1863 bp, synthetic construct; identical to SEQ ID NO: 100186
  misc_feature 1..1863: note = Description of Artificial Sequence: Synthetic coding sequence
  source 1..1863: mol_type = other DNA

SEQ ID NO: 100191 - DNA, 1080 bp, synthetic construct; identical to SEQ ID NO: 100188
  misc_feature 1..1080: note = Description of Artificial Sequence: Synthetic coding sequence
  source 1..1080: mol_type = other DNA

SEQ ID NO: 100192 - DNA, 1905 bp, synthetic construct
  misc_feature 1..1905: note = Description of Artificial Sequence: Synthetic coding sequence
  source 1..1905: mol_type = other DNA
atggtgagactggtgctgcccaaccccggcctggacgccagaatccccagcctggccgagctggagaccatcgagcaggaggaggccagcagcagacccaagtgggacaacaaggcccagtacatgctgacctgcctgggcttctgcgtgggcctgggcaacgtgtggagattcccctacctgtgccagagccacggcggcggcgccttcatgatccccttcctgatcctgctggtgctggagggcatccccctgctgtacctggagttcgccatcggccagagactgagaagaggcagcctgggcgtgtggagcagcatccaccccgccctgaagggcctgggcctggccagcatgctgaccagcttcatggtgggcctgtactacaacaccatcatcagctggatcatgtggtacctgttcaacagcttccaggagcccctgccctggagcgactgccccctgaacgagaaccagaccggctacgtggacgagtgcgccagaagcagccccgtggactacttctggtacagagagaccctgaacatcagcaccagcatcagcgacagcggcagcatccagtggtggatgctgctgtgcctggcctgcgcctggagcgtgctgtacatgtgcaccatcagaggcatcgagaccaccggcaaggccgtgtacatcaccagcaccctgccctacgtggtgctgaccatcttcctgatcagaggcctgaccctgaagggcgccaccaacggcatcgtgttcctgttcacccccaacgtgaccgagctggcccagcccgacacctggctggacgccggcgcccaggtgttcttcagcttcagcctggccttcggcggcctgatcagcttcagcagctacaacagcgtgcacaacaactgcgagaaggacagcgtgatcgtgagcatcatcaacggcttcaccagcgtgtacgtggccatcgtggtgtacagcgtgatcggcttcagagccacccagagatacgacgactgcttcagcaccaacatcctgaccctgatcaacggcttcgacctgcccgagggcaacgtgacccaggagaacttcgtggacatgcagcagagatgcaacgccagcgaccccgccgcctacgcccagctggtgttccagacctgcgacatcaacgccttcctgagcgaggccgtggagggcaccggcctggccttcatcgtgttcaccgaggccatcaccaagatgcccctgagccccctgtggagcgtgctgttcttcatcatgctgttctgcctgggcctgagcagcatgttcggcaacatggagggcgtggtggtgcccctgcaggacctgagagtgatcccccccaagtggcccaaggaggtgctgaccggcctgatctgcctgggcaccttcctgatcggcttcatcttcaccctgaacagcggccagtactggctgagcctgctggacagctacgccggcagcatccccctgctgatcatcgccttctgcgagatgttcagcgtggtgtacgtgtacggcgtggacagattcaacaaggacatcgagttcatgatcggccacaagcccaacatcttctggcaggtgacctggagagtggtgagccccctgctgatgctgatcatcttcctgttcttcttcgtggtggaggtgagccaggagctgacctacagcatctgggaccccggctacgaggagttccccaagagccagaagatcagctaccccaactgggtgtacgtggtggtggtgatcgtggccggcgtgcccagcctgaccatccccggctacgccatctacaagctgatcagaaaccactgccagaagcccggcgaccaccagggcctggtgagcaccctgagcaccgccagcatgaacggcgacctgaagtactag

SEQ ID NO: 100193 - DNA, 1668 bp, synthetic construct
  misc_feature 1..1668: note = Description of Artificial Sequence: Synthetic coding sequence
  source 1..1668: mol_type = other DNA
atggagaaggccagacccctgtgggccaacagcctgcagttcgtgttcgcctgcatcagctacgccgtgggcctgggcaacgtgtggagattcccctacctgtgccagatgtacggcggcggcagcttcctggtgccctacatcatcatgctgatcgtggagggcatgcccctgctgtacctggagctggccgtgggccagagaatgagacagggcagcatcggcgcctggagaaccatcagcccctacctgagcggcgtgggcgtggccagcgtggtggtgagcttcttcctgagcatgtactacaacgtgatcaacgcctgggccttctggtacctgttccacagcttccaggaccccctgccctggagcgtgtgccccctgaacggcaaccacaccggctacgacgaggagtgcgagaaggccagcagcacccagtacttctggtacagaaagaccctgaacatcagccccagcctgcaggagaacggcggcgtgcagtgggagcccgccctgtgcctgctgctggcctggctggtggtgtacctgtgcatcctgagaggcaccgagagcaccggcaagatcgagcagctggccaaccccaaggcctggatcaacgccgccacccagatcttcttcagcctgggcctgggcttcggcagcctgatcgccttcgccagctacaacgagcccagcaacaactgccagaagcacgccatcatcgtgagcctgatcaacagcttcaccagcatcttcgccagcatcgtgaccttcagcatctacggcttcaaggccaccttcaactacgagaactgcctgaagaaggtgagcctgctgctgaccaacaccttcgacctggaggacggcttcctgaccgccagcaacctggagcaggtgaagggctacctggccagcgcctaccccagcaagtacagcgagatgttcccccagatcaagaactgcagcctggagagcgagctggacaccgccgtgcagggcaccggcctggccttcatcgtgtacaccgaggccatcaagaacatggaggtgagccagctgtggagcgtgctgtacttcttcatgctgctgatgctgggcatcggcagcatgctgggcaacaccgccgccatcctgacccccctgaccgacagcaagatcatcagcagccacctgcccaaggaggccatcagcggcctggtgtgcctggtgaactgcgccatcggcatggtgttcaccatggaggccggcaactactggttcgacatcttcaacgactacgccgccaccctgagcctgctgctgatcgtgctggtggagaccatcgccgtgtgctacgtgtacggcctgagaagattcgagagcgacctgaaggccatgaccggcagagccgtgagctggtactggaaggtgatgtgggccggcgtgagccccctgctgatcgtgagcctgttcgtgttctacctgagcgactacatcctgaccggcaccctgaagtaccaggcctgggacgccagccagggccagctggtgaccaaggactaccccgcctacgccctggccgtgatcggcctgctggtggccagcagcaccatgtgcatccccctggccgccctgggcaccttcgtgcagagaagactgaagagaggcgacgccgaccccgtggcctag

SEQ ID NO: 100194 - DNA, 1779 bp, synthetic construct
  misc_feature 1..1779: note = Description of Artificial Sequence: Synthetic coding sequence
  source 1..1779: mol_type = other DNA
atggagaaggccagacccctgtgggccaacagcctgcagttcgtgttcgcctgcatcagctacgccgtgggcctgggcaacgtgtggagattcccctacctgtgccagatgtacggcggcggcagcttcctggtgccctacatcatcatgctgatcgtggagggcatgcccctgctgtacctggagctggccgtgggccagagaatgagacagggcagcatcggcgcctggagaaccatcagcccctacctgagcggcgtgggcgtggccagcgtggtggtgagcttcttcctgagcatgtactacaacgtgatcaacgcctgggccttctggtacctgttccacagcttccaggaccccctgccctggagcgtgtgccccctgaacggcaaccacaccggctacgacgaggagtgcgagaaggccagcagcacccagtacttctggtacagaaagaccctgaacatcagccccagcctgcaggagaacggcggcgtgcagtgggagcccgccctgtgcctgctgctggcctggctggtggtgtacctgtgcatcctgagaggcaccgagagcaccggcaaggtggtgtacttcaccgccagcctgccctactgcgtgctgatcatctacctgatcagaggcctgaccctgcacggcgccaccaacggcctgatgtacatgttcacccccaagatcgagcagctggccaaccccaaggcctggatcaacgccgccacccagatcttcttcagcctgggcctgggcttcggcagcctgatcgccttcgccagctacaacgagcccagcaacaactgccagaagcacgccatcatcgtgagcctgatcaacagcttcaccagcatcttcgccagcatcgtgaccttcagcatctacggcttcaaggccaccttcaactacgagaactgcctgaagaaggtgagcctgctgctgaccaacaccttcgacctggaggacggcttcctgaccgccagcaacctggagcaggtgaagggctacctggccagcgcctaccccagcaagtacagcgagatgttcccccagatcaagaactgcagcctggagagcgagctggacaccgccgtgcagggcaccggcctggccttcatcgtgtacaccgaggccatcaagaacatggaggtgagccagctgtggagcgtgctgtacttcttcatgctgctgatgctgggcatcggcagcatgctgggcaacaccgccgccatcctgacccccctgaccgacagcaagatcatcagcagccacctgcccaaggaggccatcagcggcctggtgtgcctggtgaactgcgccatcggcatggtgttcaccatggaggccggcaactactggttcgacatcttcaacgactacgccgccaccctgagcctgctgctgatcgtgctggtggagaccatcgccgtgtgctacgtgtacggcctgagaagattcgagagcgacctgaaggccatgaccggcagagccgtgagctggtactggaaggtgatgtgggccggcgtgagccccctgctgatcgtgagcctgttcgtgttctacctgagcgactacatcctgaccggcaccctgaagtaccaggcctgggacgccagccagggccagctggtgaccaaggactaccccgcctacgccctggccgtgatcggcctgctggtggccagcagcaccatgtgcatccccctggccgccctgggcaccttcgtgcagagaagactgaagagaggcgacgccgaccccgtggcctag

SEQ ID NO: 100195 - DNA, 1644 bp, synthetic construct
  misc_feature 1..1644: note = Description of Artificial Sequence: Synthetic coding sequence
  source 1..1644: mol_type = other DNA
atggagaaggccagacccctgtgggccaacagcctgcagttcgtgttcgcctgcatcagctacgccgtgggcctgggcaacgtgtggagattcccctacctgtgccagatgtacggcggcggcagcttcctggtgccctacatcatcatgctgatcgtggagggcatgcccctgctgtacctggagctggccgtgggccagagaatgagacagggcagcatcggcgcctggagaaccatcagcccctacctgagcggcgtgggcgtggccagcgtggtggtgagcttcttcctgagcatgtactacaacgtgatcaacgcctgggccttctggtacctgttccacagcttccaggaccccctgccctggagcgtgtgccccctgaacggcaaccacaccggctacgacgaggagtgcgagaaggccagcagcacccagtacttctggtacagaaagaccctgaacatcagccccagcctgcaggagaacggcggcgtgcagtgggagcccgccctgtgcctgctgctggcctggctggtggtgtacctgtgcatcctgagaggcaccgagagcaccggcaaggtggtgtacttcaccgccagcctgccctactgcgtgctgatcatctacctgatcagaggcctgaccctgcacggcgccaccaacggcctgatgtacatgttcacccccaagatcgagcagctggccaaccccaaggcctggatcaacgccgccacccagatcttcttcagcctgggcctgggcttcggcagcctgatcgccttcgccagctacaacgagcccagcaacaactgccagaagcacgccatcatcgtgagcctgatcaacagcttcaccagcatcttcgccagcatcgtgaccttcagcatctacggcttcaaggccaccttcaactacgagaactgcctgaagaaggtgagcctgctgctgaccaacaccttcgacctggaggacggcttcctgaccgccagcaacctggagcaggtgaagggctacctggccagcgcctaccccagcaagtacagcgagatgttcccccagatcaagaactgcagcctggagagcgagctggacaccgccgtgcagggcaccggcctggccttcatcgtgtacaccgaggccatcaagaacatggaggtgagccagctgtggagcgtgctgtacttcttcatgctgctgatgctgggcatcggcagcatgctgggcaacaccgccgccatcctgacccccctgaccgacagcaagatcatcagcagccacctgcccaaggaggccatcagcggcctggtgtgcctggtgaactgcgccatcggcatggtgttcaccatggaggccggcaactactggttcgacatcttcaacgactacgccgccaccctgagcctgctgctgatcgtgctggtggagaccatcgccgtgtgctacgtgtacggcctgagaagattcgagagcgacctgaaggccatgaccggcagagccgtgagctggtactggaaggtgatgtgggccggcgtgagccccctgctgatcgtgagcctgttcgtgttctacctgagcgactacatcctgaccggcaccctgaagtaccaggcctgggacgccagccaggacgacaagctgtag

SEQ ID NO: 100196 - DNA, 1194 bp, synthetic construct
  misc_feature 1..1194: note = Description of Artificial Sequence: Synthetic coding sequence
  source 1..1194: mol_type = other DNA
atggcccacgcccccgagcccgaccccgccgcctgcgacctgggcgacgagagacccaagtgggacaacaaggcccagtacctgctgagctgcaccggcttcgccgtgggcctgggcaacatctggagattcccctacctgtgccagacctacggcggcggcgccttcctgatcccctacgtgatcgccctggtgttcgagggcatccccatcttccacgtggagctggccatcggccagagactgagaaagggcagcgtgggcgtgtggaccgccatcagcccctacctgagcggcgtgggcctgggctgcgtgaccctgagcttcctgatcagcctgtactacaacaccatcgtggcctgggtgctgtggtacctgctgaacagcttccagcaccccctgccctggagcagctgcccccccgacctgaacagaaccggcttcgtggaggagtgccagggcagcagcgccgtgagctacttctggtacagacagaccctgaacatcaccgccgacatcaacgacagcggcagcatccagtggtggctgctgatctgcctggccgccagctgggccgtggtgtacatgtgcgtgatcagaggcatcgagaccaccggcaaggtgatctacttcaccgccctgttcccctacctggtgctgaccatcttcctgatcagaggcctgaccctgcccggcgccaccaagggcctgatctacctgttcacccccaacaaccccagagtgtggctggacgccgccacccagatcttcttcagcctgagcctggccttcggcggccacatcgccttcgccagctacaacagccccagaaacgactgccagaaggacgccgtggtgatcgccctggtgaacagaatgaccagcctgtacgccagcatcgccgtgttcagcgtgctgggcgccagcggccccggcctggccttcgtggtgttcaccgagaccgacctgcacatgcccggcgcccccgtgtgggccatgctgttcttcggcatgctgttcaccctgggcctgagcaccatgttcggcaccgtggaggccgtgatcacccccctgctggacagcggcaactactggctggagatcttcgacaacttcgccgccagccccaacctgctgatgctggccttcctggaggtggtgggcgtggtgtacgtgtacggcatgaagagatag

SEQ ID NO: 100197 - DNA, 1887 bp, synthetic construct
  misc_feature 1..1887: note = Description of Artificial Sequence: Synthetic coding sequence
  source 1..1887: mol_type = other DNA
atggcccacgcccccgagcccgaccccgccgcctgcgacctgggcgacgagagacccaagtgggacaacaaggcccagtacctgctgagctgcaccggcttcgccgtgggcctgggcaacatctggagattcccctacctgtgccagacctacggcggcggcgccttcctgatcccctacgtgatcgccctggtgttcgagggcatccccatcttccacgtggagctggccatcggccagagactgagaaagggcagcgtgggcgtgtggaccgccatcagcccctacctgagcggcgtgggcctgggctgcgtgaccctgagcttcctgatcagcctgtactacaacaccatcgtggcctgggtgctgtggtacctgctgaacagcttccagcaccccctgccctggagcagctgcccccccgacctgaacagaaccggcttcgtggaggagtgccagggcagcagcgccgtgagctacttctggtacagacagaccctgaacatcaccgccgacatcaacgacagcggcagcatccagtggtggctgctgatctgcctggccgccagctgggccgtggtgtacatgtgcgtgatcagaggcatcgagaccaccggcaaggtgatctacttcaccgccctgttcccctacctggtgctgaccatcttcctgatcagaggcctgaccctgcccggcgccaccaagggcctgatctacctgttcacccccaacatgcacatcctgcagaaccccagagtgtggctggacgccgccacccagatcttcttcagcctgagcctggccttcggcggccacatcgccttcgccagctacaacagccccagaaacgactgccagaaggacgccgtggtgatcgccctggtgaacagaatgaccagcctgtacgccagcatcgccgtgttcagcgtgctgggcttcaaggccaccaacgactacgagcactgcctggacagaaacatcctgagcctgatcaacgacttcgacttccccgagcagagcatcagcagagacgactaccccgccgtgctgatgcacctgaacgccacctggcccaagagagtggcccagctgcccctgaaggcctgcctgctggaggacttcctggacaagagcgccagcggccccggcctggccttcgtggtgttcaccgagaccgacctgcacatgcccggcgcccccgtgtgggccatgctgttcttcggcatgctgttcaccctgggcctgagcaccatgttcggcaccgtggaggccgtgatcacccccctgctggacgtgggcgtgctgcccagatgggtgcccaaggaggccctgaccggcctggtgtgcctggtgtgcttcctgagcgccacctgcttcaccctgcagagcggcaactactggctggagatcttcgacaacttcgccgccagccccaacctgctgatgctggccttcctggaggtggtgggcgtggtgtacgtgtacggcatgaagagattctgcgacgacatcgcctggatgaccggcagaagacccagcccctactggagactgacctggagagtggtgagccccctgctgctgaccatcttcgtggcctacatcatcctgctgttctggaagcccctgagatacaaggcctggaaccccaagtacgagctgttccccagcagacaggagaagctgtaccccggctgggccagagccgcctgcgtgctgctgagcctgctgcccgtgctgtgggtgcccgtggccgccctggcccagctgctgaccagaagaagaagaacctggagagacagagacgccagacccgacaccgacatgagacccgacaccgacaccagacccgacaccgacatgagacccgacaccgacatgagatag

SEQ ID NO: 100198 - DNA, 1548 bp, synthetic construct
  misc_feature 1..1548: note = Description of Artificial Sequence: Synthetic coding sequence
  source 1..1548: mol_type = other DNA
atggaggccagagagcccggcagacccacccccacctaccacctggtgcccaacaccagccagagccaggtggaggaggacgtgagcagccccccccagagaagcagcgagaccatgcagctgaagaaggagatcagcctgctgaacggcgtgagcctggtggtgggcaacatgatcggcagcggcatcttcgtgagccccaagggcgtgctggtgcacaccgccagctacggcatgagcctgatcgtgtgggccatcggcggcctgttcagcgtggtgggcgccctgtgctacgccgagctgggcaccaccatcaccaagagcggcgccagctacgcctacatcctggaggccttcggcggcttcatcgccttcatcagactgtgggtgagcctgctggtggtggagcccaccggccaggccatcatcgccatcaccttcgccaactacatcatccagcccagcttccccagctgcgaccccccctacctggcctgcagactgctggccgccgcctgcatctgcctgctgaccttcgtgaactgcgcctacgtgaagtggggcaccagagtgcaggacaccttcacctacgccaaggtggtggccctgatcgccatcatcgtgatgggcctggtgaagctgtgccagggccacagcgagcacttccaggacgccttcgagggcagcagctgggacatgggcaacctgagcctggccctgtacagcgccctgttcagctacagcggctgggacaccctgaacttcgtgaccgaggagatcaagaaccccgagagaaacctgcccctggccatcggcatcagcatgcccatcgtgaccctgatctacatcctgaccaacgtggcctactacaccgtgctgaacatcagcgacgtgctgagcagcgacgccgtggccgtgaccttcgccgaccagaccttcggcatgttcagctggaccatccccatcgccgtggccctgagctgcttcggcggcctgaacgccagcatcttcgccagcagcagactgttcttcgtgggcagcagagagggccacctgcccgacctgctgagcatgatccacatcgagagattcacccccatccccgccctgctgttcaactgcaccatggccctgatctacctgatcgtggaggacgtgttccagctgatcaactacttcagcttcagctactggttcttcgtgggcctgagcgtggtgggccagctgtacctgagatggaaggagcccaagagacccagacccctgaagctgagcgtgttcttccccatcgtgttctgcatctgcagcgtgttcctggtgatcgtgcccctgttcaccgacaccatcaacagcctgatcggcatcggcatcgccctgagcggcgtgcccttctacttcatgggcgtgtacctgcccgagagcagaagacccctgttcatcagaaacgtgctggccgccatcaccagaggcacccagcagctgtgcttctgcgtgctgaccgagctggacgtggccgaggagaagaaggacgagagaaagaccgactag

SEQ ID NO: 100199 - DNA, 1524 bp, synthetic construct
  misc_feature 1..1524: note = Description of Artificial Sequence: Synthetic coding sequence
  source 1..1524: mol_type = other DNA
atggccggcgccggccccaagagaagagccctggccgcccccgccgccgaggagaaggaggaggccagagagaagatgctggccgccaagagcgccgacggcagcgcccccgccggcgagggcgagggcgtgaccctgcagagaaacatcaccctgctgaacggcgtggccatcatcgtgggcaccatcatcggcagcggcatcttcgtgacccccaccggcgtgctgaaggaggccggcagccccggcctggccctggtggtgtgggccgcctgcggcgtgttcagcatcgtgggcgccctgtgctacgccgagctgggcaccaccatcagcaagagcggcggcgactacgcctacatgctggaggtgtacggcagcctgcccgccttcctgaagctgtggatcgagctgctgatcatcagacccagcagccagtacatcgtggccctggtgttcgccacctacctgctgaagcccctgttccccacctgccccgtgcccgaggaggccgccaagctggtggcctgcctgtgcgtgctgctgctgaccgccgtgaactgctacagcgtgaaggccgccaccagagtgcaggacgccttcgccgccgccaagctgctggccctggccctgatcatcctgctgggcttcgtgcagatcggcaagggcgacgtgagcaacctggaccccaacttcagcttcgagggcaccaagctggacgtgggcaacatcgtgctggccctgtacagcggcctgttcgcctacggcggctggaactacctgaacttcgtgaccgaggagatgatcaacccctacagaaacctgcccctggccatcatcatcagcctgcccatcgtgaccctggtgtacgtgctgaccaacctggcctacttcaccaccctgagcaccgagcagatgctgagcagcgaggccgtggccgtggacttcggcaactaccacctgggcgtgatgagctggatcatccccgtgttcgtgggcctgagctgcttcggcagcgtgaacggcagcctgttcaccagcagcagactgttcttcgtgggcagcagagagggccacctgcccagcatcctgagcatgatccacccccagctgctgacccccgtgcccagcctggtgttcacctgcgtgatgaccctgctgtacgccttcagcaaggacatcttcagcgtgatcaacttcttcagcttcttcaactggctgtgcgtggccctggccatcatcggcatgatctggctgagacacagaaagcccgagctggagagacccatcaaggtgaacctggccctgcccgtgttcttcatcctggcctgcctgttcctgatcgccgtgagcttctggaagacccccgtggagtgcggcatcggcttcaccatcatcctgagcggcctgcccgtgtacttcttcggcgtgtggtggaagaacaagcccaagtggctgctgcagggcatcttcagcaccaccgtgctgtgccagaagctgatgcaggtggtgccccaggagacctag

SEQ ID NO: 100200 - DNA, 846 bp, synthetic construct
  misc_feature 1..846: note = Description of Artificial Sequence: Synthetic coding sequence
  source 1..846: mol_type = other DNA
atgagccacggcacctactacgagtgcgagcccagaggcggccagcagcccctggagttcagcggcggcagagccggccccggcgagctgggcgacatgtgcgagcacgaggccagcatcgacctgagcgcctacatcgagagcggcgaggagcagctgctgagcgacctgttcgccgtgaagcccgcccccgaggccagaggcctgaagggccccggcacccccgccttcccccactacctgccccccgaccccagacccttcgcctaccccccccacaccttcggccccgacagaaaggccctgggccccggcatctacagcagccccggcagctacgaccccagagccgtggccgtgaaggaggagcccagaggccccgagggcagcagagccgccagcagaggcagctacaaccccctgcagtaccaggtggcccactgcggccagaccgccatgcacctgccccccaccctggccgcccccggccagcccctgagagtgctgaaggcccccctggccaccgccgcccccccctgcagccccctgctgaaggcccccagccccgccggccccctgcacaagggcaagaaggccgtgaacaaggacagcctggagtacagactgagaagagagagaaacaacatcgccgtgagaaagagcagagacaaggccaagagaagaatcctggagacccagcagaaggtgctggagtacatggccgagaacgagagactgagaagcagagtggagcagctgacccaggagctggacaccctgagaaacctgttcagacagatccccgaggccgccaacctgatcaagggcgtgggcggctgcagctag

SEQ ID NO: 100201 - DNA, 1608 bp, synthetic construct
  misc_feature 1..1608: note = Description of Artificial Sequence: Synthetic coding sequence
  source 1..1608: mol_type = other DNA
atggaggagggcgccagacacagaaacaacaccgagaagaagcaccccggcggcggcgagagcgacgccagccccgaggccggcagcggcggcggcggcgtggccctgaagaaggagatcggcctggtgagcgcctgcggcatcatcgtgggcaacatcatcggcagcggcatcttcgtgagccccaagggcgtgctggagaacgccggcagcgtgggcctggccctgatcgtgtggatcgtgaccggcttcatcaccgtggtgggcgccctgtgctacgccgagctgggcgtgaccatccccaagagcggcggcgactacagctacgtgaaggacatcttcggcggcctggccggcttcctgagactgtggatcgccgtgctggtgatctaccccaccaaccaggccgtgatcgccctgaccttcagcaactacgtgctgcagcccctgttccccacctgcttcccccccgagagcggcctgagactgctggccgccatctgcctgctgctgctgacctgggtgaactgcagcagcgtgagatgggccaccagagtgcaggacatcttcaccgccggcaagctgctggccctggccctgatcatcatcatgggcatcgtgcagatctgcaagggcgagtacttctggctggagcccaagaacgccttcgagaacttccaggagcccgacatcggcctggtggccctggccttcctgcagggcagcttcgcctacggcggctggaacttcctgaactacgtgaccgaggagctggtggacccctacaagaacctgcccagagccatcttcatcagcatccccctggtgaccttcgtgtacgtgttcgccaacgtggcctacgtgaccgccatgagcccccaggagctgctggccagcaacgccgtggccgtgaccttcggcgagaagctgctgggcgtgatggcctggatcatgcccatcagcgtggccctgagcaccttcggcggcgtgaacggcagcctgttcaccagcagcagactgttcttcgccggcgccagagagggccacctgcccagcgtgctggccatgatccacgtgaagagatgcacccccatccccgccctgctgttcacctgcatcagcaccctgctgatgctggtgaccagcgacatgtacaccctgatcaactacgtgggcttcatcaactacctgttctacggcgtgaccgtggccggccagatcgtgctgagatggaagaagcccgacatccccagacccatcaagatcaacctgctgttccccatcatctacctgctgttctgggccttcctgctggtgttcagcctgtggagcgagcccgtggtgtgcggcatcggcctggccatcatgctgaccggcgtgcccgtgtacttcctgggcgtgtactggcagcacaagcccaagtgcttcagcgacttcatcgagctgctgaccctggtgagccagaagatgtgcgtggtggtgtaccccgaggtggagagaggcagcggcaccgaggaggccaacgaggacatggaggagcagcagcagcccatgtaccagcccacccccaccaaggacaaggacgtggccggccagccccagccctag

SEQ ID NO: 100202 - DNA, 633 bp, synthetic construct
  misc_feature 1..633: note = Description of Artificial Sequence: Synthetic coding sequence
  source 1..633: mol_type = other DNA
atgggcatcgtgcagatctgcaagggcgagtacttctggctggagcccaagaacgccttcgagaacttccaggagcccgacatcggcctggtggccctggccttcctgcagggcagcttcgcctacggcggctggaacttcctgaactacgtgaccgaggagctggtggacccctacaagaacctgcccagagccatcttcatcagcatccccctggtgaccttcgtgtacgtgttcgccaacgtggcctacgtgaccgccatgagcccccaggagctgctggccagcaacgccgtggccgtgaccttcggcgagaagctgctgggcgtgatggcctggatcatgcccatcagcgtggccctgagcaccttcggcggcgtgaacggcagcctgcacctgctgagcgccgtgctgagatggagccccagaggcccccccagccagtgcgtgggccacgaccccagagaggccctgcaccccaaccccagccccgccctgcacatgcacctgcaccccgccgacgccggccaccagagacacgtgcacacccaccagctgtgcggcctgcaccagctgcccctgctgtggggccacggctgctggaccgacagccccagcctggaggaggcctag

SEQ ID NO: 100203 - DNA, 693 bp, synthetic construct
  misc_feature 1..693: note = Description of Artificial Sequence: Synthetic coding sequence
  source 1..693: mol_type = other DNA
tgatgcctgcaggagcacagccagcccagccagctgctgtgcaccctgctgctgtgctggtgcgtgctgggcagagagagacccttcagaaaggcccagagcaccagcagccccctggagggcgtgcccagattcctgaagagactgctgctgacctgggtgaactgcagcagcgtgagatgggccaccagagtgcaggacatcttcaccgccggcaagctgctggccctggccctgatcatcatcatgggcatcgtgcagatctgcaagggcgagtacttctggctggagcccaagaacgccttcgagaacttccaggagcccgacatcggcctggtggccctggccttcctgcagggcagcttcgcctacggcggctggaacttcctgaactacgtgaccgaggagctggtggacccctacaagctgttcttcgccggcgccagagagggccacctgcccagcgtgctggccatgatccacgtgaagagatgcacccccatccccgccctgctgttcacctgcatcagcaccctgctgatgctggtgaccagcgacatgtacaccctgatcaactacgtgggcttcatcaactacctgttctacggcgtgaccgtggccggccagatcgtgctgagatggaagaagcccgacatccccagacccatcaagcccctgccctaccagggctag

SEQ ID NO: 100204 - DNA, 936 bp, synthetic construct
  misc_feature 1..936: note = Description of Artificial Sequence: Synthetic coding sequence
  source 1..936: mol_type = other DNA
atgggccagctgttccagtgcgccgtgggccaccccggcagcagacacctgcacagctgggaggcccccggcctgggccccgactaccaccacggcgactgcaccgacatgcagagaaacctgcccagagccatcttcatcagcatccccctggtgaccttcgtgtacgtgttcgccaacgtggcctacgtgaccgccatgagcccccaggagctgctggccagcaacgccgtggccgtgaccttcggcgagaagctgctgggcgtgatggcctggatcatgcccatcagcgtggccctgagcaccttcggcggcgtgaacggcagcctgttcaccagcagcagactgttcttcgccggcgccagagagggccacctgcccagcgtgctggccatgatccacgtgaagagatgcacccccatccccgccctgctgttcacctgcatcagcaccctgctgatgctggtgaccagcgacatgtacaccctgatcaactacgtgggcttcatcaactacctgttctacggcgtgaccgtggccggccagatcgtgctgagatggaagaagcccgacatccccagacccatcaagatcaacctgctgttccccatcatctacctgctgttctgggccttcctgctggtgttcagcctgtggagcgagcccgtggtgtgcggcatcggcctggccatcatgctgaccggcgtgcccgtgtacttcctgggcgtgtactggcagcacaagcccaagtgcttcagcgacttcatcgagctgctgaccctggtgagccagaagatgtgcgtggtggtgtaccccgaggtggagagaggcagcggcaccgaggaggccaacgaggacatggaggagcagcagcagcccatgtaccagcccacccccaccaaggacaaggacgtggccggccagccccagccctag

SEQ ID NO: 100205 - DNA, 999 bp, synthetic construct
  misc_feature 1..999: note = Description of Artificial Sequence: Synthetic coding sequence
  source 1..999: mol_type = other DNA
atgggcatcgtgcagatctgcaagggcgagtacttctggctggagcccaagaacgccttcgagaacttccaggagcccgacatcggcctggtggccctggccttcctgcagggcagcttcgcctacggcggctggaacttcctgaactacgtgaccgaggagctggtggacccctacaagaacctgcccagagccatcttcatcagcatccccctggtgaccttcgtgtacgtgttcgccaacgtggcctacgtgaccgccatgagcccccaggagctgctggccagcaacgccgtggccgtgaccttcggcgagaagctgctgggcgtgatggcctggatcatgcccatcagcgtggccctgagcaccttcggcggcgtgaacggcagcctgttcaccagcagcagactgttcttcgccggcgccagagagggccacctgcccagcgtgctggccatgatccacgtgaagagatgcacccccatccccgccctgctgttcacctgcatcagcaccctgctgatgctggtgaccagcgacatgtacaccctgatcaactacgtgggcttcatcaactacctgttctacggcgtgaccgtggccggccagatcgtgctgagatggaagaagcccgacatccccagacccatcaagatcaacctgctgttccccatcatctacctgctgttctgggccttcctgctggtgttcagcctgtggagcgagcccgtggtgtgcggcatcggcctggccatcatgctgaccggcgtgcccgtgtacttcctgggcgtgtactggcagcacaagcccaagtgcttcagcgacttcatcgagctgctgaccctggtgagccagaagatgtgcgtggtggtgtaccccgaggtggagagaggcagcggcaccgaggaggccaacgaggacatggaggagcagcagcagcccatgtaccagcccacccccaccaaggacaaggacgtggccggccagccccagccctag

SEQ ID NO: 100206 - DNA, 285 bp, synthetic construct
  misc_feature 1..285: note = Description of Artificial Sequence: Synthetic coding sequence
  source 1..285: mol_type = other DNA
atggaggagggcgccagacacagaaacaacaccgagaagaagcaccccggcggcggcgagagcgacgccagccccgaggccggcagcggcggcggcggcgtggccctgaagaaggagatcggcctggtgagcgcctgcggcatcatcgtgggcaacatcatcggcagcggcatcttcgtgagccccaagggcgtgctggagaacgccggcagcgtgggcctggccctgatcgtgtggatcgtgaccggcttcatcaccgtggtgggcgccctgtgctacgcctag

SEQ ID NO: 100207 - DNA, 237 bp, synthetic construct
  misc_feature 1..237: note = Description of Artificial Sequence: Synthetic coding sequence
  source 1..237: mol_type = other DNA
atggaggagggcgccagacacagaaacaacaccgagaagaagcaccccggcggcggcgagagcgacgccagccccgaggccggcagcggcggcggcggcgtggccctgaagaaggagatcggcctggtgagcgcctgcggcatcatcgtgggcaacatcatcggcagcggcatcttcgtgagccccaagggcgtgctggagaacgccggcagcgtgggcctggccctgatcgtgtag

SEQ ID NO: 100208 - DNA, 1293 bp, synthetic construct
  misc_feature 1..1293: note = Description of Artificial Sequence: Synthetic coding sequence
  source 1..1293: mol_type = other DNA
atgggccagtacggccaggagctgagctggaagtgcctggtgaaggccgtgtgcctgcaggagcacagccagcccagccagctgctgtgcaccctgctgctgtgctggtgcgtgctgggcagagagagacccttcagaaaggcccagagcaccagcagccccctggagggcgtgcccagattcctgaagagactgctgctgacctgggtgaactgcagcagcgtgagatgggccaccagagtgcaggacatcttcaccgccggcaagctgctggccctggccctgatcatcatcatgggcatcgtgcagatctgcaagggcgagtacttctggctggagcccaagaacgccttcgagaacttccaggagcccgacatcggcctggtggccctggccttcctgcagggcagcttcgcctacggcggctggaacttcctgaactacgtgaccgaggagctggtggacccctacaagaacctgcccagagccatcttcatcagcatccccctggtgaccttcgtgtacgtgttcgccaacgtggcctacgtgaccgccatgagcccccaggagctgctggccagcaacgccgtggccgtgaccttcggcgagaagctgctgggcgtgatggcctggatcatgcccatcagcgtggccctgagcaccttcggcggcgtgaacggcagcctgttcaccagcagcagactgttcttcgccggcgccagagagggccacctgcccagcgtgctggccatgatccacgtgaagagatgcacccccatccccgccctgctgttcacctgcatcagcaccctgctgatgctggtgaccagcgacatgtacaccctgatcaactacgtgggcttcatcaactacctgttctacggcgtgaccgtggccggccagatcgtgctgagatggaagaagcccgacatccccagacccatcaagatcaacctgctgttccccatcatctacctgctgttctgggccttcctgctggtgttcagcctgtggagcgagcccgtggtgtgcggcatcggcctggccatcatgctgaccggcgtgcccgtgtacttcctgggcgtgtactggcagcacaagcccaagtgcttcagcgacttcatcgagctgctgaccctggtgagccagaagatgtgcgtggtggtgtaccccgaggtggagagaggcagcggcaccgaggaggccaacgaggacatggaggagcagcagcagcccatgtaccagcccacccccaccaaggacaaggacgtggccggccagccccagccctag

SEQ ID NO: 100209 - DNA, 1968 bp, synthetic construct
  misc_feature 1..1968: note = Description of Artificial Sequence: Synthetic coding sequence
  source 1..1968: mol_type = other DNA
atggtgctgtacaccacccccttccccaacagctgcctgagcgccctgcactgcgtgagctgggccctgatcttcccctgctactggctggtggacagactggccgccagcttcatccccaccacctacgagaagagacagagagccgacgacccctgctgcctgcagctgctgtgcaccgccctgttcacccccatctacctggccctgctggtggccagcctgcccttcgccttcctgggcttcctgttctggagccccctgcagagcgccagaagaccctacatctacagcagactggaggacaagggcctggccggcggcgccgccctgctgagcgagtggaagggcaccggccccggcaagagcttctgcttcgccaccgccaacgtgtgcctgctgcccgacagcctggccagagtgaacaacctgttcaacacccaggccagagccaaggagatcggccagagaatcagaaacggcgccgccagaccccagatcaagatctacatcgacagccccaccaacaccagcatcagcgccgccagcttcagcagcctggtgagcccccagggcggcgacggcgtggccagagccgtgcccggcagcatcaagagaaccgccagcgtggagtacaagggcgacggcggcagacaccccggcgacgaggccgccaacggccccgccagcggcgaccccgtggacagcagcagccccgaggacgcctgcatcgtgagaatcggcggcgaggagggcggcagaccccccgaggccgacgaccccgtgcccggcggccaggccagaaacggcgccggcggcggccccagaggccagacccccaaccacaaccagcaggacggcgacagcggcagcctgggcagccccagcgccagcagagagagcctggtgaagggcagagccggccccgacaccagcgccagcggcgagcccggcgccaacagcaagctgctgtacaaggccagcgtggtgaagaaggccgccgccagaagaagaagacaccccgacgaggccttcgaccacgaggtgagcgccttcttccccgccaacctggacttcctgtgcctgcaggaggtgttcgacaagagagccgccaccaagctgaaggagcagctgcacggctacttcgagtacatcctgtacgacgtgggcgtgtacggctgccagggctgctgcagcttcaagtgcctgaacagcggcctgctgttcgccagcagataccccatcatggacgtggcctaccactgctaccccaacaagtgcaacgacgacgccctggccagcaagggcgccctgttcctgaaggtgcaggtgggcagcaccccccaggaccagagaatcgtgggctacatcgcctgcacccacctgcacgccccccaggaggacagcgccatcagatgcggccagctggacctgctgcaggactggctggccgacttcagaaagagcaccagcagcagcagcgccgccaaccccgaggagctggtggccttcgacgtggtgtgcggcgacttcaacttcgacaactgcagcagcgacgacaagctggagcagcagcacagcctgttcacccactacagagacccctgcagactgggccccggcgaggagaagccctgggccatcggcaccctgctggacaccaacggcctgtacgacgaggacgtgtgcacccccgacaacctgcagaaggtgctggagagcgaggagggcagaagagagtacctggccttccccaccagcaagagcagcggccagaagggcagaaaggagctgctgaagggcaacggcagaagaatcgactacatgctgcacgccgaggagggcctgtgccccgactggaaggccgaggtggaggagttcagcttcatcacccagctgagcggcctgaccgaccacctgcccgtggccatgagactgatggtgagcagcggcgaggaggaggcctag

SEQ ID NO: 100210 - DNA, 690 bp, synthetic construct
  misc_feature 1..690: note = Description of Artificial Sequence: Synthetic coding sequence
  source 1..690: mol_type = other DNA
atggaggccagagagcccggcagacccacccccacctaccacctggtgcccaacaccagccagagccaggtggaggaggacgtgagcagccccccccagagaagcagcgagaccatgcagctgaagaaggagatcagcctgctgaacggcgtgagcctggtggtgggcaacatgatcggcagcggcatcttcgtgagccccaagggcgtgctggtgcacaccgccagctacggcatgagcctgatcgtgtgggccatcggcggcctgttcagcgtggtgggcgccctgtgctacgccgagctgggcaccaccatcaccaagagcggcgccagctacgcctacatcctggaggccttcggcggcttcatcgccttcatcagactgtgggtgagcctgctggtggtggagcccaccggccaggccatcatcgccatcaccttcgccaactacatcatccagcccagcttccccagctgcgaccccccctacctggcctgcagactgctggccgccgcctgcatctgcctgctgaccttcgtgaactgcgcctacgtgaagtggggcaccagagtgcaggacaccttcacctacgccaaggtggtggccctgatcgccatcatcgtgatgggcctggtgaagctgtgccaggagatctgcccctggcccctgggcttcctgtgccagctgtag

SEQ ID NO: 100211 - DNA, 1536 bp, synthetic construct
  misc_feature 1..1536: note = Description of Artificial Sequence: Synthetic coding sequence
  source 1..1536: mol_type = other DNA
atggtggacagcaccgagtacgaggtggccagccagcccgaggtggagaccagccccctgggcgacggcgccagccccggccccgagcaggtgaagctgaagaaggagatcagcctgctgaacggcgtgtgcctgatcgtgggcaacatgatcggcagcggcatcttcgtgagccccaagggcgtgctgatctacagcgccagcttcggcctgagcctggtgatctgggccgtgggcggcctgttcagcgtgttcggcgccctgtgctacgccgagctgggcaccaccatcaagaagagcggcgccagctacgcctacatcctggaggccttcggcggcttcctggccttcatcagactgtggaccagcctgctgatcatcgagcccaccagccaggccatcatcgccatcaccttcgccaactacatggtgcagcccctgttccccagctgcttcgccccctacgccgccagcagactgctggccgccgcctgcatctgcctgctgaccttcatcaactgcgcctacgtgaagtggggcaccctggtgcaggacatcttcacctacgccaaggtgctggccctgatcgccgtgatcgtggccggcatcgtgagactgggccagggcgccagcacccacttcgagaacagcttcgagggcagcagcttcgccgtgggcgacatcgccctggccctgtacagcgccctgttcagctacagcggctgggacaccctgaactacgtgaccgaggagatcaagaaccccgagagaaacctgcccctgagcatcggcatcagcatgcccatcgtgaccatcatctacatcctgaccaacgtggcctactacaccgtgctggacatgagagacatcctggccagcgacgccgtggccgtgaccttcgccgaccagatcttcggcatcttcaactggatcatccccctgagcgtggccctgagctgcttcggcggcctgaacgccagcatcgtggccgccagcagactgttcttcgtgggcagcagagagggccacctgcccgacgccatctgcatgatccacgtggagagattcacccccgtgcccagcctgctgttcaacggcatcatggccctgatctacctgtgcgtggaggacatcttccagctgatcaactactacagcttcagctactggttcttcgtgggcctgagcatcgtgggccagctgtacctgagatggaaggagcccgacagacccagacccctgaagctgagcgtgttcttccccatcgtgttctgcctgtgcaccatcttcctggtggccgtgcccctgtacagcgacaccatcaacagcctgatcggcatcgccatcgccctgagcggcctgcccttctacttcctgatcatcagagtgcccgagcacaagagacccctgtacctgagaagaatcgtgggcagcgccaccagatacctgcaggtgctgtgcatgagcgtggccgccgagatggacctggaggacggcggcgagatgcccaagcagagagaccccaagagcaactag

SEQ ID NO: 100212 - DNA, 1536 bp, synthetic construct; identical to SEQ ID NO: 100211
  misc_feature 1..1536: note = Description of Artificial Sequence: Synthetic coding sequence
  source 1..1536: mol_type = other DNA

SEQ ID NO: 100213 - DNA, 1536 bp, synthetic construct; identical to SEQ ID NO: 100211
  misc_feature 1..1536: note = Description of Artificial Sequence: Synthetic coding sequence
  source 1..1536: mol_type = other DNA

SEQ ID NO: 100214 - DNA, 1536 bp, synthetic construct; identical to SEQ ID NO: 100211
  misc_feature 1..1536: note = Description of Artificial Sequence: Synthetic coding sequence
  source 1..1536: mol_type = other DNA

SEQ ID NO: 100215 - DNA, 1455 bp, synthetic construct
  misc_feature 1..1455: note = Description of Artificial Sequence: Synthetic coding sequence
  source 1..1455: mol_type = other DNA
atggtggacagcaccgagtacgaggtggccagccagcccgaggtggagaccagccccctgggcgacggcgccagccccggccccgagcaggtgaagctgaagaaggagatctacagcgccagcttcggcctgagcctggtgatctgggccgtgggcggcctgttcagcgtgttcggcgccctgtgctacgccgagctgggcaccaccatcaagaagagcggcgccagctacgcctacatcctggaggccttcggcggcttcctggccttcatcagactgtggaccagcctgctgatcatcgagcccaccagccaggccatcatcgccatcaccttcgccaactacatggtgcagcccctgttccccagctgcttcgccccctacgccgccagcagactgctggccgccgcctgcatctgcctgctgaccttcatcaactgcgcctacgtgaagtggggcaccctggtgcaggacatcttcacctacgccaaggtgctggccctgatcgccgtgatcgtggccggcatcgtgagactgggccagggcgccagcacccacttcgagaacagcttcgagggcagcagcttcgccgtgggcgacatcgccctggccctgtacagcgccctgttcagctacagcggctgggacaccctgaactacgtgaccgaggagatcaagaaccccgagagaaacctgcccctgagcatcggcatcagcatgcccatcgtgaccatcatctacatcctgaccaacgtggcctactacaccgtgctggacatgagagacatcctggccagcgacgccgtggccgtgaccttcgccgaccagatcttcggcatcttcaactggatcatccccctgagcgtggccctgagctgcttcggcggcctgaacgccagcatcgtggccgccagcagactgttcttcgtgggcagcagagagggccacctgcccgacgccatctgcatgatccacgtggagagattcacccccgtgcccagcctgctgttcaacggcatcatggccctgatctacctgtgcgtggaggacatcttccagctgatcaactactacagcttcagctactggttcttcgtgggcctgagcatcgtgggccagctgtacctgagatggaaggagcccgacagacccagacccctgaagctgagcgtgttcttccccatcgtgttctgcctgtgcaccatcttcctggtggccgtgcccctgtacagcgacaccatcaacagcctgatcggcatcgccatcgccctgagcggcctgcccttctacttcctgatcatcagagtgcccgagcacaagagacccctgtacctgagaagaatcgtgggcagcgccaccagatacctgcaggtgctgtgcatgagcgtggccgccgagatggacctggaggacggcggcgagatgcccaagcagagagaccccaagagcaactag

SEQ ID NO: 100216 - DNA, 426 bp, synthetic construct
  misc_feature 1..426: note = Description of Artificial Sequence: Synthetic coding sequence
  source 1..426: mol_type = other DNA
atggtggacagcaccgagtacgaggtggccagccagcccgaggtggagaccagccccctgggcgacggcgccagccccggccccgagcaggtgaagctgaagaaggagatcagcctgctgaacggcgtgtgcctgatcgtgggcaacatgatcggcagcggcatcttcgtgagccccaagggcgtgctgatctacagcgccagcttcggcctgagcctggtgatctgggccgtgggcggcctgttcagcgtgttcggcgccctgtgctacgccgagctgggcaccaccatcaagaagagcggcgccagctacgcctacatcctggaggccttcggcggcttcctggccttcatcagactgtggaccagcctgctgatcatcgagcccaccagccaggccatcatcgccatcaccttcgccaactag

SEQ ID NO: 100217 - DNA, 135 bp, synthetic construct
  misc_feature 1..135: note = Description of Artificial Sequence: Synthetic coding sequence
  source 1..135: mol_type = other DNA
atggtggacagcaccgagtacgaggtggccagccagcccgaggtggagaccagccccctgggcgacggcgccagccccggccccgagcaggtgaagctgaagaaggagatcagcctgctgaacggcgtgtgctag

SEQ ID NO: 100218 - DNA, 495 bp, synthetic construct
  misc_feature 1..495: note = Description of Artificial Sequence: Synthetic coding sequence
  source 1..495: mol_type = other DNA
atggtggacagcaccgagtacgaggtggccagccagcccgaggtggagaccagccccctgggcgacggcgccagccccggccccgagcaggtgaagctgaagaaggagatcagcctgctgaacggcgtgtgcctgatcgtgggcaacatgatcggcagcggcatcttcgtgagccccaagggcgtgctgatctacagcgccagcttcggcctgagcctggtgatctgggccgtgggcggcctgttcagcgtgttcggcgccctgtgctacgccgagctgggcaccaccatcaagaagagcggcgccagctacgcctacatcctggaggccttcggcggcttcctggccttcatcagactgtggaccagcctgctgatcatcgagcccaccagccaggccatcatcgccatcaccttcgccaactacatggtgcagcccctgttccccagctgcttcgccccctacgccgccagcagactgctggccgccgcctag

SEQ ID NO: 100219 - DNA, 369 bp, synthetic construct
  misc_feature 1..369: note = Description of Artificial Sequence: Synthetic coding sequence
  source 1..369: mol_type = other DNA
atggtggacagcaccgagtacgaggtggccagccagcccgaggtggagaccagccccctgggcgacggcgccagccccggccccgagcaggtgaagctgaagaaggagatcagcctgctgaacggcgtgtgcctgatcgtgggcaacatgatcggcagcggcatcttcgtgagccccaagggcgtgctgatctacagcgccagcttcggcctgagcctggtgatctgggccgtgggcggcctgttcagcgtgttcggcgccctgtgctacgccgagctgggcaccaccatcaagaagagcggcgccagctacgcctacatcctggaggccttcggcggcttcctggccttcatcagactgtggacctag

SEQ ID NO: 100220 - DNA, 1536 bp, synthetic construct; identical to SEQ ID NO: 100211
  misc_feature 1..1536: note = Description of Artificial Sequence: Synthetic coding sequence
  source 1..1536: mol_type = other DNA

SEQ ID NO: 100221 - DNA, 348 bp, synthetic construct
  misc_feature 1..348: note = Description of Artificial Sequence: Synthetic coding sequence
  source 1..348: mol_type = other DNA
atggtggacagcaccgagtacgaggtggccagccagcccgaggtggagaccagccccctgggcgacggcgccagccccggccccgagcaggtgaagctgaagaaggagatcagcctgctgaacggcgtgtgcctgatcgtgggcaacatgatcggcagcggcatcttcgtgagccccaagggcgtgctgatctacagcgccagcttcggcctgagcctggtgatctgggccgtgggcggcctgttcagcgtgttcggcgccctgtgctacgccgagctgggcaccaccatcaagaagagcggcgccagctacgcctacatcctggaggccttcggcggcttcctgtag

SEQ ID NO: 100222 - DNA, 93 bp, synthetic construct
  misc_feature 1..93: note = Description of Artificial Sequence: Synthetic coding sequence
  source 1..93: mol_type = other DNA
atggtggacagcaccgagtacgaggtggccagccagcccgaggtggagaccagccccctgggcgacggcgccagccccggccccgagcagtag

SEQ ID NO: 100223 - DNA, 933 bp, synthetic construct
  misc_feature 1..933: note = Description of Artificial Sequence: Synthetic coding sequence
  source 1..933: mol_type = other DNA
atggtggacagcaccgagtacgaggtggccagccagcccgaggtggagaccagccccctgggcgacggcgccagccccggccccgagcaggtgaagctgaagaaggagatcagcctgctgaacggcgtgtgcctgatcgtgggcaacatgatcggcagcggcatcttcgtgagccccaagggcgtgctgatctacagcgccagcttcggcctgagcctggtgatctgggccgtgggcggcctgttcagcgtgttcggcgccctgtgctacgccgagctgggcaccaccatcaagaagagcggcgccagctacgcctacatcctggaggccttcggcggcttcctggccttcatcagactgtggaccagcctgctgatcatcgagcccaccagccaggccatcatcgccatcaccttcgccaactacatggtgcagcccctgttccccagctgcttcgccccctacgccgccagcagactgctggccgccgcctgcatctgcctgctgaccttcatcaactgcgcctacgtgaagtggggcaccctggtgcaggacatcttcacctacgccaaggtgctggccctgatcgccgtgatcgtggccggcatcgtgagactgggccagggcgccagcacccacttcgagaacagcttcgagggcagcagcttcgccgtgggcgacatcgccctggccctgtacagcgccctgttcagctacagcggctgggacaccctgaactacgtgaccgaggagatcaagaaccccgagagaaacctgcccctgagcatcggcatcagcatgcccatcgtgaccatcatctacatcctgaccaacgtggcctactacaccgtgctggacatgagagacatcctggccagcgacgccgtggccgtggccttcctgtgcggcctgaagagaagacccagcccctag

SEQ ID NO: 100224 - DNA, 321 bp, synthetic construct
  misc_feature 1..321: note = Description of Artificial Sequence: Synthetic coding sequence
  source 1..321: mol_type = other DNA
atggtggacagcaccgagtacgaggtggccagccagcccgaggtggagaccagccccctgggcgacggcgccagccccggccccgagcaggtgaagctgaagaaggagatcagcctgctgaacggcgtgtgcctgatcgtgggcaacatgatcggcagcggcatcttcgtgagccccaagggcgtgctgatctacagcgccagcttcggcctgagcctggtgatctgggccgtgggcggcctgttcagcgtgttcggcgccctgtgctacgccgagctgggcaccaccatcaagaagagcggcgccagctacgcctactag

SEQ ID NO: 100225 - DNA, 351 bp, synthetic construct
  misc_feature 1..351: note = Description of Artificial Sequence: Synthetic coding sequence
  source 1..351: mol_type = other DNA
atggtggacagcaccgagtacgaggtggccagccagcccgaggtggagaccagccccctgggcgacggcgccagccccggccccgagcaggtgaagctgaagaaggagatcagcctgctgaacggcgtgtgcctgatcgtgggcaacatgatcggcagcggcatcttcgtgagccccaagggcgtgctgatctacagcgccagcttcggcctgagcctggtgatctgggccgtgggcggcctgttcagcgtgttcggcgccctgtgctacgccgagctgggcaccaccatcaagaagagcggcgccagctacgcctacatcctggaggccttcggcggcttcctggcctag

SEQ ID NO: 100226 - DNA, 1890 bp, synthetic construct
  misc_feature 1..1890: note = Description of Artificial Sequence: Synthetic coding sequence
  source 1..1890: mol_type = other DNA
atgggctgcaaggtgctgctgaacatcggccagcagatgctgagaagaaaggtggtggactgcagcagagaggagaccagactgagcagatgcctgaacaccttcgacctggtggccctgggcgtgggcagcaccctgggcgccggcgtgtacgtgctggccggcgccgtggccagagagaacgccggccccgccatcgtgatcagcttcctgatcgccgccctggccagcgtgctggccggcctgtgctacggcgagttcggcgccagagtgcccaagaccggcagcgcctacctgtacagctacgtgaccgtgggcgagctgtgggccttcatcaccggctggaacctgatcctgagctacatcatcggcaccagcagcgtggccagagcctggagcgccaccttcgacgagctgatcggcagacccatcggcgagttcagcagaacccacatgaccctgaacgcccccggcgtgctggccgagaaccccgacatcttcgccgtgatcatcatcctgatcctgaccggcctgctgaccctgggcgtgaaggagagcgccatggtgaacaagatcttcacctgcatcaacgtgctggtgctgggcttcatcatggtgagcggcttcgtgaagggcagcgtgaagaactggcagctgaccgaggaggacttcggcaacaccagcggcagactgtgcctgaacaacgacaccaaggagggcaagcccggcgtgggcggcttcatgcccttcggcttcagcggcgtgctgagcggcgccgccacctgcttctacgccttcgtgggcttcgactgcatcgccaccaccggcgaggaggtgaagaacccccagaaggccatccccgtgggcatcgtggccagcctgctgatctgcttcatcgcctacttcggcgtgagcgccgccctgaccctgatgatgccctacttctgcctggacaacaacagccccctgcccgacgccttcaagcacgtgggctgggagggcgccaagtacgccgtggccgtgggcagcctgtgcgccctgagcgccagcctgctgggcagcatgttccccatgcccagagtgatctacgccatggccgaggacggcctgctgttcaagttcctggccaacgtgaacgacagaaccaagacccccatcatcgccaccctggccagcggcgccgtggccgccgtgatggccttcctgttcgacctgaaggacctggtggacctgatgagcatcggcaccctgctggcctacagcctggtggccgcctgcgtgctggtgctgagataccagcccgagcagcccaacctggtgtaccagatggccagcaccagcgacgagctggaccccgccgaccagaacgagctggccagcaccaacgacagccagctgggcttcctgcccgaggccgagatgttcagcctgaagaccatcctgagccccaagaacatggagcccagcaagatcagcggcctgatcgtgaacatcagcaccagcctgatcgccgtgctgatcatcaccttctgcatcgtgaccgtgctgggcagagaggccctgaccaagggcgccctgtgggccgtgttcctgctggccggcagcgccctgctgtgcgccgtggtgaccggcgtgatctggagacagcccgagagcaagaccaagctgagcttcaaggtgcccttcctgcccgtgctgcccatcctgagcatcttcgtgaacgtgtacctgatgatgcagctggaccagggcacctgggtgagattcgccgtgtggatgctgatcggcttcatcatctacttcggctacggcctgtggcacagcgaggaggccagcctggacgccgaccaggccagaacccccgacggcaacctggaccagtgcaagtag

SEQ ID NO: 100227 - DNA, 366 bp, synthetic construct
  misc_feature 1..366: note = Description of Artificial Sequence: Synthetic coding sequence
  source 1..366: mol_type = other DNA
atgggctgcaaggtgctgctgaacatcggccagcagatgctgagaagaaaggtggtggactgcagcagagaggagaccagactgagcagatgcctgaacaccttcgacctggtggccctgggcgtgggcagcaccctgggcgccggcgtgtacgtgctggccggcgccgtggccagagagaacgccggccccgccatcgtgatcagcttcctgatcgccgccctggccagcgtgctggccggcctgtgctacggcgagttcggcgccagagtgcccaagaccggcagcgcctacctgtacagctacgtgaccgtgggcgagctgtgggccttcatcaccggctggaacctgatcctgagctactag

SEQ ID NO: 100228 - DNA, 2097 bp, synthetic construct
  misc_feature 1..2097: note = Description of Artificial Sequence: Synthetic coding sequence
  source 1..2097: mol_type = other DNA
atgaagatcgagaccagcggctacaacagcgacaagctgatctgcagaggcttcatcggcacccccgccccccccgtgtgcgacagcaagttcctgctgagccccagcagcgacgtgagaatgatcccctgcagagccgccctgaccttcgccagatgcctgatcagaagaaagatcgtgaccctggacagcctggaggacaccaagctgtgcagatgcctgagcaccatggacctgatcgccctgggcgtgggcagcaccctgggcgccggcgtgtacgtgctggccggcgaggtggccaaggccgacagcggccccagcatcgtggtgagcttcctgatcgccgccctggccagcgtgatggccggcctgtgctacgccgagttcggcgccagagtgcccaagaccggcagcgcctacctgtacacctacgtgaccgtgggcgagctgtgggccttcatcaccggctggaacctgatcctgagctacgtgatcggcaccagcagcgtggccagagcctggagcggcaccttcgacgagctgctgagcaagcagatcggccagttcctgagaacctacttcagaatgaactacaccggcctggccgagtaccccgacttcttcgccgtgtgcctgatcctgctgctggccggcctgctgagcttcggcgtgaaggagagcgcctgggtgaacaaggtgttcaccgccgtgaacatcctggtgctgctgttcgtgatggtggccggcttcgtgaagggcaacgtggccaactggaagatcagcgaggagttcctgaagaacatcagcgccagcgccagagagccccccagcgagaacggcaccagcatctacggcgccggcggcttcatgccctacggcttcaccggcaccctggccggcgccgccacctgcttctacgccttcgtgggcttcgactgcatcgccaccaccggcgaggaggtgagaaacccccagaaggccatccccatcggcatcgtgaccagcctgctggtgtgcttcatggcctacttcggcgtgagcgccgccctgaccctgatgatgccctactacctgctggacgagaagagccccctgcccgtggccttcgagtacgtgggctggggccccgccaagtacgtggtggccgccggcagcctgtgcgccctgagcaccagcctgctgggcagcatcttccccatgcccagagtgatctacgccatggccgaggacggcctgctgttcaagtgcctggcccagatcaacagcaagaccaagacccccatcatcgccaccctgagcagcggcgccgtggccgccctgatggccttcctgttcgacctgaaggccctggtggacatgatgagcatcggcaccctgatggcctacagcctggtggccgcctgcgtgctgatcctgagataccagcccggcctgagctacgaccagcccaagtgcagccccgagaaggacggcctgggcagcagccccagagtgaccagcaagagcgagagccaggtgaccatgctgcagagacagggcttcagcatgagaaccctgttctgccccagcctgctgcccacccagcagagcgccagcctggtgagcttcctggtgggcttcctggccttcctggtgctgggcctgagcgtgctgaccacctacggcgtgcacgccatcaccagactggaggcctggagcctggccctgctggccctgttcctggtgctgttcgtggccatcgtgctgaccatctggagacagccccagaaccagcagaaggtggccttcatggtgcccttcctgcccttcctgcccgccttcagcatcctggtgaacatctacctgatggtgcagctgagcgccgacacctgggtgagattcagcatctggatggccatcggcttcctgatctacttcagctacggcatcagacacagcctggagggccacctgagagacgagaacaacgaggaggacgcctaccccgacaacgtgcacgccgccgccgaggagaagagcgccatccaggccaacgaccaccaccccagaaacctgagcagccccttcatcttccacgagaagaccagcgagttctag

SEQ ID NO: 100229 - DNA, 2094 bp, synthetic construct
  misc_feature 1..2094: note = Description of Artificial Sequence: Synthetic coding sequence
  source 1..2094: mol_type = other DNA
atgaagatcgagaccagcggctacaacagcgacaagctgatctgcagaggcttcatcggcacccccgccccccccgtgtgcgacagcaagttcctgctgagccccagcagcgacgtgagaatgatcccctgcagagccgccctgaccttcgccagatgcctgatcagaagaaagatcgtgaccctggacagcctggaggacaccaagctgtgcagatgcctgagcaccatggacctgatcgccctgggcgtgggcagcaccctgggcgccggcgtgtacgtgctggccggcgaggtggccaaggccgacagcggccccagcatcgtggtgagcttcctgatcgccgccctggccagcgtgatggccggcctgtgctacgccgagttcggcgccagagtgcccaagaccggcagcgcctacctgtacacctacgtgaccgtgggcgagctgtgggccttcatcaccggctggaacctgatcctgagctacgtgatcggcaccagcagcgtggccagagcctggagcggcaccttcgacgagctgctgagcaagcagatcggccagttcctgagaacctacttcagaatgaactacaccggcctggccgagtaccccgacttcttcgccgtgtgcctgatcctgctgctggccggcctgctgagcttcggcgtgaaggagagcgcctgggtgaacaaggtgttcaccgccgtgaacatcctggtgctgctgttcgtgatggtggccggcttcgtgaagggcaacgtggccaactggaagatcagcgaggagttcctgaagaacatcagcgccagcgccagagagccccccagcgagaacggcaccagcatctacggcgccggcggcttcatgccctacggcttcaccggcaccctggccggcgccgccacctgcttctacgccttcgtgggcttcgactgcatcgccaccaccggcgaggaggtgagaaacccccagaaggccatccccatcggcatcgtgaccagcctgctggtgtgcttcatggcctacttcggcgtgagcgccgccctgaccctgatgatgccctactacctgctggacgagaagagccccctgcccgtggccttcgagtacgtgggctggggccccgccaagtacgtggtggccgccggcagcctgtgcgccctgagcaccagcctgctgggcagcatgttccccctgcccagaatcctgttcgccatggccagagacggcctgctgttcagattcctggccagagtgagcaagagacagagccccgtggccgccaccctgaccgccggcgtgatcagcgccctgatggccttcctgttcgacctgaaggccctggtggacatgatgagcatcggcaccctgatggcctacagcctggtggccgcctgcgtgctgatcctgagataccagcccggcctgagctacgaccagcccaagtgcagccccgagaaggacggcctgggcagcagccccagagtgaccagcaagagcgagagccaggtgaccatgctgcagagacagggcttcagcatgagaaccctgttctgccccagcctgctgcccacccagcagagcgccagcctggtgagcttcctggtgggcttcctggccttcctggtgctgggcctgagcgtgctgaccacctacggcgtgcacgccatcaccagactggaggcctggagcctggccctgctggccctgttcctggtgctgttcgtggccatcgtgctgaccatctggagacagccccagaaccagcagaaggtggccttcatggtgcccttcctgcccttcctgcccgccttcagcatcctggtgaacatctacctgatggtgcagctgagcgccgacacctgggtgagattcagcatctggatggccatcggcttcctgatctacttcagctacggcatcagacacagcctggagggccacctgagagacgagaacaacgaggaggacgcctaccccgacaacgtgcacgccgccgccgaggagaagagcgccatccaggccaacgaccaccaccccagaaacctgagcagccccttcatcttccacgagaagaccagcgagttctag

SEQ ID NO: 100230 - DNA, 2094 bp, synthetic construct; identical to SEQ ID NO: 100229
  misc_feature 1..2094: note = Description of Artificial Sequence: Synthetic coding sequence
  source 1..2094: mol_type = other DNA

SEQ ID NO: 100231 - DNA, 1977 bp, synthetic construct
  misc_feature 1..1977: note = Description of Artificial Sequence: Synthetic coding sequence
  source 1..1977: mol_type = other DNA
atgatcccctgcagagccgccctgaccttcgccagatgcctgatcagaagaaagatcgtgaccctggacagcctggaggacaccaagctgtgcagatgcctgagcaccatggacctgatcgccctgggcgtgggcagcaccctgggcgccggcgtgtacgtgctggccggcgaggtggccaaggccgacagcggccccagcatcgtggtgagcttcctgatcgccgccctggccagcgtgatggccggcctgtgctacgccgagttcggcgccagagtgcccaagaccggcagcgcctacctgtacacctacgtgaccgtgggcgagctgtgggccttcatcaccggctggaacctgatcctgagctacgtgatcggcaccagcagcgtggccagagcctggagcggcaccttcgacgagctgctgagcaagcagatcggccagttcctgagaacctacttcagaatgaactacaccggcctggccgagtaccccgacttcttcgccgtgtgcctgatcctgctgctggccggcctgctgagcttcggcgtgaaggagagcgcctgggtgaacaaggtgttcaccgccgtgaacatcctggtgctgctgttcgtgatggtggccggcttcgtgaagggcaacgtggccaactggaagatcagcgaggagttcctgaagaacatcagcgccagcgccagagagccccccagcgagaacggcaccagcatctacggcgccggcggcttcatgccctacggcttcaccggcaccctggccggcgccgccacctgcttctacgccttcgtgggcttcgactgcatcgccaccaccggcgaggaggtgagaaacccccagaaggccatccccatcggcatcgtgaccagcctgctggtgtgcttcatggcctacttcggcgtgagcgccgccctgaccctgatgatgccctactacctgctggacgagaagagccccctgcccgtggccttcgagtacgtgggctggggccccgccaagtacgtggtggccgccggcagcctgtgcgccctgagcaccagcctgctgggcagcatcttccccatgcccagagtgatctacgccatggccgaggacggcctgctgttcaagtgcctggcccagatcaacagcaagaccaagacccccatcatcgccaccctgagcagcggcgccgtggccgccctgatggccttcctgttcgacctgaaggccctggtggacatgatgagcatcggcaccctgatggcctacagcctggtggccgcctgcgtgctgatcctgagataccagcccggcctgagctacgaccagcccaagtgcagccccgagaaggacggcctgggcagcagccccagagtgaccagcaagagcgagagccaggtgaccatgctgcagagacagggcttcagcatgagaaccctgttctgccccagcctgctgcccacccagcagagcgccagcctggtgagcttcctggtgggcttcctggccttcctggtgctgggcctgagcgtgctgaccacctacggcgtgcacgccatcaccagactggaggcctggagcctggccctgctggccctgttcctggtgctgttcgtggccatcgtgctgaccatctggagacagccccagaaccagcagaaggtggccttcatggtgcccttcctgcccttcctgcccgccttcagcatcctggtgaacatctacctgatggtgcagctgagcgccgacacctgggtgagattcagcatctggatggccatcggcttcctgatctacttcagctacggcatcagacacagcctggagggccacctgagagacgagaacaacgaggaggacgcctaccccgacaacgtgcacgccgccgccgaggagaagagcgccatccaggccaacgaccaccaccccagaaacctgagcagccccttcatcttccacgagaagaccagcgagttctag

SEQ ID NO: 100232 - DNA, 1977 bp, synthetic construct; identical to SEQ ID NO: 100231
  misc_feature 1..1977: note = Description of Artificial Sequence: Synthetic coding sequence
  source 1..1977: mol_type = other DNA

SEQ ID NO: 100233 - DNA, 1464 bp, synthetic construct
  misc_feature 1..1464: note = Description of Artificial Sequence: Synthetic coding sequence
  source 1..1464: mol_type = other DNA
atgggcgacaccggcctgagaaagagaagagaggacgagaagagcatccagagccaggagcccaagaccaccagcctgcagaaggagctgggcctgatcagcggcatcagcatcatcgtgggcaccatcatcggcagcggcatcttcgtgagccccaagagcgtgctgagcaacaccgaggccgtgggcccctgcctgatcatctgggccgcctgcggcgtgctggccaccctgggcgccctgtgcttcgccgagctgggcaccatgatcaccaagagcggcggcgagtacccctacctgatggaggcctacggccccatccccgcctacctgttcagctgggccagcctgatcgtgatcaagcccaccagcttcgccatcatctgcctgagcttcagcgagtacgtgtgcgcccccttctacgtgggctgcaagcccccccagatcgtggtgaagtgcctggccgccgccgccatcctgttcatcagcaccgtgaacagcctgagcgtgagactgggcagctacgtgcagaacatcttcaccgccgccaagctggtgatcgtggccatcatcatcatcagcggcctggtgctgctggcccagggcaacaccaagaacttcgacaacagcttcgagggcgcccagctgagcgtgggcgccatcagcctggccttctacaacggcctgtgggcctacgacggctggaaccagctgaactacatcaccgaggagctgagaaacccctacagaaacctgcccctggccatcatcatcggcatccccctggtgaccgcctgctacatcctgatgaacgtgagctacttcaccgtgatgaccgccaccgagctgctgcagagccaggccgtggccgtgaccttcggcgacagagtgctgtaccccgccagctggatcgtgcccctgttcgtggccttcagcaccatcggcgccgccaacggcacctgcttcaccgccggcagactgatctacgtggccggcagagagggccacatgctgaaggtgctgagctacatcagcgtgagaagactgacccccgcccccgccatcatcttctacggcatcatcgccaccatctacatcatccccggcgacatcaacagcctggtgaactacttcagcttcgccgcctggctgttctacggcctgaccatcctgggcctgatcgtgatgagattcaccagaaaggagctggagagacccatcaaggtgcccgtggtgatccccgtgctgatgaccctgatcagcgtgttcctggtgctggcccccatcatcagcaagcccacctgggagtacctgtactgcgtgctgttcatcctgagcggcctgctgttctacttcctgttcgtgcactacaagttcggctgggcccagaagatcagcaagcccatcaccatgcacctgcagatgctgatggaggtggtgccccccgaggaggaccccgagtag

SEQ ID NO: 100234 - DNA, 1464 bp, synthetic construct; identical to SEQ ID NO: 100233
  misc_feature 1..1464: note = Description of Artificial Sequence: Synthetic coding sequence
  source 1..1464: mol_type = other DNA

SEQ ID NO: 100235 - DNA, 1908 bp, synthetic construct
  misc_feature 1..1908: note = Description of Artificial Sequence: Synthetic coding sequence
  source 1..1908: mol_type = other DNA
atggccagaggcctgcccaccatcgccagcctggccagactgtgccagaagctgaacagactgaagcccctggaggacagcaccatggagaccagcctgagaagatgcctgagcaccctggacctgaccctgctgggcgtgggcggcatggtgggcagcggcctgtacgtgctgaccggcgccgtggccaaggaggtggccggccccgccgtgctgctgagcttcggcgtggccgccgtggccagcctgctggccgccctgtgctacgccgagttcggcgccagagtgcccagaaccggcagcgcctacctgttcacctacgtgagcatgggcgagctgtgggccttcctgatcggctggaacgtgctgctggagtacatcatcggcggcgccgccgtggccagagcctggagcggctacctggacagcatgttcagccacagcatcagaaacttcaccgagacccacgtgggcagctggcaggtgcccctgctgggccactaccccgacttcctggccgccggcatcatcctgctggccagcgccttcgtgagctgcggcgccagagtgagcagctggctgaaccacaccttcagcgccatcagcctgctggtgatcctgttcatcgtgatcctgggcttcatcctggcccagccccacaactggagcgccgacgagggcggcttcgcccccttcggcttcagcggcgtgatggccggcaccgccagctgcttctacgccttcgtgggcttcgacgtgatcgccgccagcagcgaggaggcccagaaccccagaagaagcgtgcccctggccatcgccatcagcctggccatcgccgccggcgcctacatcctggtgagcaccgtgctgaccctgatggtgccctggcacagcctggaccccgacagcgccctggccgacgccttctaccagagaggctacagatgggccggcttcatcgtggccgccggcagcatctgcgccatgaacaccgtgctgctgagcctgctgttcagcctgcccagaatcgtgtacgccatggccgccgacggcctgttcttccaggtgttcgcccacgtgcaccccagaacccaggtgcccgtggccggcaccctggccttcggcctgctgaccgccttcctggccctgctgctggacctggagagcctggtgcagttcctgagcctgggcaccctgctggcctacaccttcgtggccaccagcatcatcgtgctgagattccagaagagcagcccccccagcagccccggccccgccagccccggccccctgaccaagcagcagagcagcttcagcgaccacctgcagctggtgggcaccgtgcacgccagcgtgcccgagcccggcgagctgaagcccgccctgagaccctacctgggcttcctggacggctacagccccggcgccgtggtgacctgggccctgggcgtgatgctggccagcgccatcaccatcggctgcgtgctggtgttcggcaacagcaccctgcacctgccccactggggctacatcctgctgctgctgctgaccagcgtgatgttcctgctgagcctgctggtgctgggcgcccaccagcagcagtacagagaggacctgttccagatccccatggtgcccctgatccccgccctgagcatcgtgctgaacatctgcctgatgctgaagctgagctacctgacctgggtgagattcagcatctggctgctgatgggcctggccgtgtacttcggctacggcatcagacacagcaaggagaaccagagagagctgcccggcctgaacagcacccactacgtggtgttccccagaggcagcctggaggagaccgtgcaggccatgcagccccccagccaggcccccgcccaggaccccggccacatggagtag

SEQ ID NO: 100236 - DNA, 1908 bp, synthetic construct; identical to SEQ ID NO: 100235
  misc_feature 1..1908: note = Description of Artificial Sequence: Synthetic coding sequence
  source 1..1908: mol_type = other DNA

SEQ ID NO: 100237 - DNA, 249 bp, synthetic construct
  misc_feature 1..249: note = Description of Artificial Sequence: Synthetic coding sequence
  source 1..249: mol_type = other DNA
atggccagaggcctgcccaccatcgccagcctggccagactgtgccagaagctgaacagactgaagcccctggaggacagcaccatggagaccagcctgagaagatgcctgagcaccctggacctgaccctgctgggcgtgggcggcatggtgggcagcggcctgtacgtgctgaccggcgccgtggccaaggaggtggccggccccgccgtgctgctgagcttcggcgtggccgccgtggccagctag
